United States Patent Application Publication US 2023/0272434 A1 - sequence listing, part 17

SEQ ID NO: 28453 - protein, 1139 aa, Mamestra brassicae
MLTRAALQRARPPPPDPSLSSASPPPDIGSPLSPAVAVASSSSDEYFSPPTSPTPVRRQGRGRPPRGLGPRGQPAPSRVPATGGCVQRMRWTQSMNENVMRAYYGSTEGGTNLTAYRVRMLSLFQDLEPTVNVSAQRLSDQVRVIQRNHRLDDAALDRLRSEVLNNLIISTPTQTAVQAPVNGRITPRPTNVSDEVDDRVVTVSSQCNDRLRSALEDALREYRSTPTELRPRLPRLPMHKKNRALVCALDSLLQNIFESSESLVDTHSILYCGAVAACRIANVKFSGCDEAIRPKPAAPAWQRRIERRIDETRALIGKLYCFREGNTRPRVMRFVRRAFSGTEISPRDFTSRVTERIDFLKQKVCAWASRIRRYKRRVDRYSQNRMFQSDERWVYRAWERPEQSVTDVCRPDDVATSIFWRSIWSVPICHAEGGWMRDVERVCEAIPQMEKITITTLDVAKAVRPLPNWKSPGPDGLHNFWLKWYSSSHALLASQFQSSLDSGSLPQFLTTGVTHLLHKTGSPTEPKNYRPITCLSTVYKLLTSILRAKINEHIESNSIMSASQNGCRKGSRGTKELLLIDMAISQQVRRSRKDLSTCWIDYKKAYDSVPHTWLMKVLELYKIDATLRTFLESCMRQWKTVLRYPGCRPIQGSDEPVWIKRGIFQGDSLSPLWFCLALNPLSTLLEDSGLGYRLRRGGQAISHLLYMDDLKLFAPNNLRLMELLKVTETFSSAIRMEFGVDKCAVMHVKKGEIMESEGIHLSDSIQVRSLSSTETYKYLGMLEALGINGTDMKQSLRERFFGRLKKVLNSLLSGGNKVRAFNGWVMPVLMYTFGILKWTQTELDALDRRVRTLLTANRMHHPRSSVMRLYIPRKCGGRGLLNAKTLHNREMCSLREYFLKADVGMHRDVVAVDKGLTPLSMAKENWRTPVILTTDDRKEVWKGKELHGRFYRALHGSDVDFSASVAWLRFGDLFGETEGFVCAIMDEVILTNNYRRHIMKDGTVDMCRACHRPGESIRHIISGCSRLANGEYLHRHNQVARIIHQQLALKYNLVDSEVPYYKYVPDPVLENDHVTLYWDRSIITDRTIVANKPDIVVIDRLARRTMIIDVTIPHDENLVKAEKEKQIKYLDLAHEVVDM

SEQ ID NO: 28454 - protein, 1199 aa, Mamestra brassicae
MLTRAALQRARPPPPDPSLSSASPPPDIGSPLSPAVAVASSSSDEYFSPPTSPTPVRRQGRGRPPRGLGPRGQPAPSRVPATGGCVQRMRWTQSMNENVMRAYYGSTEGGTNLTAYRVRMLSLFQDLEPTVNVSAQRLSDQVRVIQRNHRLDDAALDRLRSEVLNNLIISTPTQTAVQAPVNGSITPRPNNVSDEVDDRVVTVSSQCNDRLRSALEDALREYRSTPTELRPRLPRLPMHKKNRALVCALDSLLQNIFESSESLVDTHSILYCGAVAACRIANVKFPGCDEAIRPKPAAPAWQRRIERRIDETRALIGKLYCFREGNTRPRVMRFVRRAFSGTEISPRDFTSRVTERIDFLKQKVCAWASRIRRYKRRVDRYSQNRMFQSDERWVYRAWERPEQSVTDVCRPDDVATSIFWRSIWSVPICHAEGGWMRDVERVCEAIPQMEKITITTLDVAKAVRPLPNWKSPGPDGLHNFWLKWYSSSHALLASQFQSSLDSGSLPQFLTTGVTHLLHKTGSPTEPKNYRPITCLSTVYKLLTSILRAKINEHIESNSIMSASQNGCRKGSRGTKELLLIDMTISQQVRRSRKDLSTCWIDYKKAYDSVPHTWLMKVLELYKIDATLRTFLESCMRQWKTVLRYPGCRPIQGSDEPVWIKRGIFQGDSLSPLWFCLALNPLSTLLEDSGLGYRLRRGGQAISHLLYMDDLKLFAPNNLRLMELLKVTETFSSAIRMEFGVDKCAVMHVKKGEIMESEGIHLSDSIQVRSLSSTETYKYLGMLEALGINGTDMKQSLRERFFGRLKKVLNSLLSGGNKVRAFNGWVMPVLMYTFGILKWTQTELDALDRRVRTLLTANRMHHPRSSVMRLYIPRKCGGRGFLNAKTLHNREMCSLREYFLKADVGMHRDVVAVDKGLTPLSMAKENWRTPVILTTDDRKEVWKGKELHGRFYRALHGSDVDFSASVAWLRFGDLFGETEGFVCAIMDEVILTNNYRRHIMKDGTVDMCRACHRPGESIRHIISGCSRLANGEYLHRHNQVARIIHQQLALKYNLVDSEVPYYKYVPDPVLENDHVTLYWDRSIITDRTIVANKPDIVVIDRLARRTMIIDVTIPHDENLVKAEKEKQIKYLDLAHEVVDMWNVDSAVIVPIVVTANGLMAKSFDDHLSKLALRSWVKGLIQKAVLLDTARIVRRFLSLEP

SEQ ID NO: 28455 - protein, 1104 aa, Noctua fimbriata
MIPGASVRGNTGVVLVSTSLTDPSALPRAEDIHRGFPHREQKKKKKVRVIQRNHMLDDAVHDRLRSEVLSNRVILTPAQTAVQASVIDATPPRFNTAVVEEDDRVAVVSSQCNDRLRSALEDALREYRSTPTNFRPRLPRLPMHNKNRALVCALDSQLKNIFESSENLVDTHSILYCGAVAACRLANVKFPNCDVATRPKPAVPAWQCRIERRIDGARVLIGKLHCFREGNTRPRVMRFVRRAFSGTEISPQEYMSRVTERIDFLKQKVYAWANRIRRYKRRVDRYSQNRMFQSDQRWVYRAWERPEQNMTDVCRPDDAATSSFWRSIWSVPVCHTEAVWMRDVEQVCEPIPEMEPILITPLDVARAVRPLPNWKSPGPDGLHNFWLKWLSSSHTCLASQFQSSLESGSLPQFLTTGVTHLLHKSGSPAEPKNYRPITCLSTVYKLLTSILRAKINTHIDENSIMSASQNGCRNGSRGTKELLLIDMAISQQVRRSRKDLSTCWIDYKKAYDSVPHTWLMRVLELYKIDATLRAFLESCMGQWRTVLRYPGCRQIQGNDEPVWIKRGIFQGDSLSPLWFCLALNPLSTLLEDSGLGYRLRRGGQIISHLLYMDDLKLFAPNKLQLMELLKVTETFSSAIRMEFGVDKCAVMYVKQGEIMESEGIQLSDSIHLRTLSSTESYKYLGMSEALGINVTDMKQSLKERFFGRLNKVLHSLLSGGNKVRAFNGWVMPVLMYSFGVLKWTQTELDALDRRVRTLLTANRMHHPRSSVMRLYIPRKCGGRGFLNAKSLHNREMCSLREYFLKVEVGMHRDVVAVDKGLTPLSMAKENWRKPEVLTTDDRKEVWQGKELHGRFYRALHGPDVDFLASVSWLRFGDLFGETEGFVCAIMDEVMLTNNYRKYIMKDGTVDVCRACHRPGESIRHIISGCSRLANGEYLHRHNQVARINHQQLALKYKLVESEVPYYKYVADPVLEKDHVTLYWDQSIITDRTILANKPDIVVIDRSARRVMIVDVTIPHDENLVKAEKEKQIKYLDLAHEVVDMWNVNSAIIVPIVVTANGLIAKSLDDHLSKLSLGGWIKGLIQKAVLLDTARIVRRFLSLEP

SEQ ID NO: 28456 - protein, 1202 aa, Noctua fimbriata
MITRAAYRRARLPPPDPSLSSASPPPESSPIVSAVTPAVAVASSSSDEYFSPPTSPTTVRRQGRGRPPRSLGLRGHPAPSRVPAAGGCVQRMRWTHSINENVMRAYYGSTEGGTNLTAYRVGMLSLFQVLEPTVNVSAQRLSDQVRVIQRNHMLDDAVLDRLRSEVLSNRIVLTPAQTAVQASVIDATPPRFNPAVVEEDDRVAVVSSQCNDRLRSALEDALREYRSTPTELRPRLPRLPMHNKNRALVCALDSQLKNIFESSENLVDTHSILYCGAVAACRLANVKFPNCDVATRPKPAVPAWQRRIERRIDGARVLIGKLHCFREGNTRPRVMRFVRRAFSGTGISPQEYMSRVTERIDFLKQKVYAWANRIRRYKRRVDRYSQNRMFQSDERWVYRTWERPELNMADVCRPDDATTSSFWRSIWSVPVCHTEADWMHDVERVCEPIPEMEPVLITPLDIARAVRPLPNWKSPGPDGLHNFWLKWLSSSHTCLASQFQSSLESGSFPQFLTTGVTHLLHKSGSPAEPKNYRPITCLSTVYKLLTSILRAKINTHIDKNSIMSASQNGCRNGSRGTKELLLIDMAISQQVRRSRKDLSTCWIDYKKAYDSVPHTWLMRVLELYKIDATLRAFLESCMGQWRTVLRYPGCRQIQGNDEPVWIKRGIFQGDSLSPLWFCLALNPLSTLLEDSGLGYRLRRGGQVISHLLYMDDLKLFATNKLRLMELLKVTETFSSAIRMEFGVDKCAVMYVKRGEIMESEGIQLSDSIHLRSLSSSESYKYLGMSEALGINVTDMKQSLKERFFGRLNKVLHSLLSGGNKVRAFNGWVMPVLMYSFGVLKWTQIELDALDRRVRTLLTANRMHHPRSSVMRLYIPRKCGGRGFLNAKSLHNREMCSLGEYFLKVEVGMHRDVVAVDKGLTPLSMAKENWRKPEVLTTDDRKEVWQGKELHGRFYRALHGPDVDFLASVSWLRFGDLFGETEGFVCAIMDEVMLTNNYRKYIMKDGTVDVCRACHRPGESIRHIISGCSRLANGEYLHRHNLVARIIHQQLALKYNLVESEVPYYTYVPDPVLENGSITLYWDQSIITDRTIVANKPDIVVVDRSERRTMIVDITVPHDENLVKAEKDKKIKYLDLAREVVDMWDVDSAIIVPIVVSAHGLIAKSLDQYLRRLSLGSWIKGLIQKAVLLDTARIVRRFLSLEP

SEQ ID NO: 28457 - protein, 1265 aa, Noctua fimbriata
MDQPRQARLNLVFDRLLFSHELVLKIYKPMTQHYCFHPTRPNYSSQFSTTKVIPIGILIKQLVYHSVPKFEETEGNNNNNKLSSASPPPESRPIVSAVTPAVAVASSSSDEYFSPPTSPTPVRRQGRGRPPRSLGLRGHPAPSRVPAAGSCVQRMRWTHSINENVMRAYYGSTEGGTNLTAYRVGMLSLFQVLEPTINVSAQRLSDQVRVIQRNHMLDDAVLDRLRSEVLSNRIVLTPAQTAVQASVIDATPPRFNPAVVEEDDRVAVVSSQCNDRLRSALEDALREYRSTPTELRPRLPRLPMHNKNRALVCALDSQLENIFESSENLVDTHSILYCGAVAACRLANVKFPNCDVATRPKPAVPAWQRRIERRIDGARVLIGKLHCFREGNTRPRVMRFVRRAFSGTGISPQEYMSGVTERIDFLKQKVYAWANRIRRYKRRVDLYSQNRMFQSDERWVYRAWERPELNMTDVCRPDDAATSFFWRSIWSVPICHTEADWMRDVKRVCEPIPEMEPILITPLNIARAVRPLPNWKSPGPDGLHNFWLKWLSSSHTCLASQFQSSFESGSLPQFLTTGVTHLLHKSGSPAEPKNYRPITCLSTVYKLLTSILRAKINTHIDKNSIMSASQNGCRNGSRGTKELLLIDMAISQQVRRSRKDLSTCWIDYKKAYDSVPHTCFMRVLELYKIDATLRAFLESCMGQWRTVLRYPGCRQIQGNDEPVWIKRGIFQGDSLSPLWFCLALNPLSTLLEDSGLGYRLRRGGQVISHLLYMDDLKLFAPNKLQLMELLKVTETFSSAIRMEFGVDKCAVMYVKRGEIMESEGFQLSDSIHLRSLSSSESYKYLGMSEALGINVTDMKQSLKERFFGRLNKVLHSLLSGGNKVRAFNGWVMPVLMYSFGVLKWTQTELDALDRRVRTLLTANRMHHPRSSVMRLYIPRKCGGRGFLNVKSLHNREMCSLREYFFKVEVGMHRDVVAVDKGLTPLSMAKENWRKPEVLTTDDRKEVWQGKELHGRFYRALHGPDVDFLASVSWLRFGDLFGETEGFVCAIMDEVMLTNNYRKYIMKDGTVDVCRACHRPGESIRHIISGCSRLANGEYLHRHNQVARIIHQQLALKYKLVESEVPYYKYVPDPVLEKDHVTLYWDQSIITDRTIVANKPDIVVIDRSARRVMIVDVTIPHDENLVKAEKEKQIKYLNLAHEVVDMWNVNSAIIVPIVVTANGLIAKSLDDHLSKLSLGGWIKGLIQKAVLLDTARIVRRFLSLEP

SEQ ID NO: 28458 - protein, 1197 aa, Noctua fimbriata
MLTRAAARRARLPPPDPSLSSASPPPESSPIVSAVTPAVAVASSSSDEYFFPPASLTPVRRQGRGRPPRSLGLRGHPAPSRVPAAGGCVQRMRWTHSINENVMRAYYGSTDRRTNLTAYRVGMLSLFQVLEPTVNVSAQQLSDQVRVIQRNHMLDDAVLDRLRSEVLSNRIVLTPAQTAVQASVIDATPPRFNPGDRVAVVSSQCNDRLRSVLEDALREYRSTPTELRPRLPRLPMHNKNMALVCALDLQLENIFESSENLVDTHSILYCGAVAACRLANVKFPNCDVATRPKPAVPAWQRRIERRIDGARVLIGKLHCFREGNTRPRVMRFVRRAFSGTGISPQEYMSRVTERIDFLKQKVYAWANRIRRYKRRVDRYSQNRMFQSDERWVHRAWERPELNMTDVCCPDDAATSSFWRSIWSVPVCHTEADWMRDVERVCEPIPEMEPILITPLDIARAVHPLPNWKSPGPDGLHNFWLKWLSSSHTCLASQFQSSLESGSLPQFLTTGVTHLLHKLGSAAEPKNYRPITCLSTVYKLLTSILRAKINTHIDKNSIMSASQNGCRNGSRGTKELLLIDMAISQQVRRSRKDLSTCWIDYKKAYDSVPHTWLMRVLELYKIDATLRAFLESCMGQWRTVLRYPGCRQIQRNDEPVWIKRGIFQGDSLSPLWFCLALNPLSTLLEDSGLGYQLRRGGQVISHLLYMDDLKLFAPNKLRLMELLKVTETFSSAIRMKFGVDKCAVMYVKRREIMESEGIQLSDSIHLRSLSSTESYKYLGMSEALGINVTDMKQSLKERFFGRLNKVLHSLLSGGNKVHAFNGWVMPVLMYSFGVLKWTQTELDALDRRVRTLLTANRMHHPRSSVMRLYIPRKCGGRGFLNAKSLHNREMCSLREYFLKAEVGMHRDVVAVDKGLTPLSMAKENWRKPVVVTTDDRKEVWQGKELYGRFYRDIHGPDVDFLASVSWLRFGDLFGETEGFVCAIMDEVMLTNNYRKYIMKDGTVDVCRACHRPGESIRHIISGCSRLANGEYLHRHNQVARIIHQQLALKYKLVESEVPYYKYVPDPALEKDHVTLYWDQSIITDRTIVANKPDIVVIDRSARRVMIVDVTMPHDMNLVKAEKEKQIKYLDLAHEVVDMWNVNSAIIVPIVVTANGLIAKSLDDHLSRLSLGGWIKGLIQKAVLLDTARIVRRFLSLEP

SEQ ID NO: 28459 - protein, 1202 aa, Noctua fimbriata
MITRAAYRRARLPPPDPSLSSASPPPESSPIVSAVTPAVAVASSSSDEYFSPPTSPTPVRRQGRGRPPRSLGLRGHPAPSRVPAAGGCVQRMRWTHSINENVMRAYYGSTEGGTNLTAYRVGMLSLFQVLEPTVNVSAQRLSDQVRVIQRNHMLDDAVLDRLRSEVLSNRIVLTPAQTAVQASVIDATPPRFNPAVVEEDDRVAVVSSQCNDRLRSALEDALREYRSTPTELRPRLPRLPMHNKNRALVCALDSQLENIFESSENLVDTHSILYCGAVAACRLANVKFSNCDVATRPKPAVPAWQRRIERRIDGARVLIGKLHCFREGNTRPRVMRFVRRAFSGTGISPQEYMSRVTERIDFLKQKVYAWANRIRRYKRRVDRYSQNRMFQSDERWVYRAWERPELNMTDVCRPDDAATSSFWRSIWSVPVCHTEADWMRDVERVCEPIPEMEPILITPLDIARAVRPLPNWKSPGPDGLHNFWLKWLSSSHTCLASQFQSSLESGSLPQFLTTGVTHLLHKSGSPAEPKNYRPITCLSTVYKLLTSILRAKINTHIDKNSIMSASQNGCRNGSRGTKELLLIDMAISQQVRRSRKDLSTCWIDYKKAYDSVPHTWLMRVLELYKIDATLRAFLESCMGQWRTVLRYPGCRQIQGNDEPVWIKRGIFQGDSLSPLWFCLALNPLSTLLEDSGLGYRLRRGGQVISHLLYMDDLKLFAPNKLQLMELLKVTETFSSAIRMEFGVDKCAVMYVKRGEIMESEGIQLSDFIHLRSLSSSESYKYLGMSEALGINVTDMKQSLKERFFGRLNKVLHSLLSGGNKVRAFNGWVMPVLMYSFGVLKWTQTELDALDRRVRTLLTANRMHHPRSSVMRLYIPRKCGGRGFLNAKSLHNREMCSLREYFLKVEVGMHRDVVAVDKGLTPLSMAKENWRKPEVLTTDDRKEVWQGKELHGRFYRALHGPDVDFLASVSWLRFGDLFGETEGFVCAIMDEVMLTNNYRKYIMKDGTVDVCRACHRPGESIRHIISGCSRLANGEYLHRHNQVARIIHQQLALKYKLVESEVPYYKYVPDPVLEKNHVTLYWDQSIITDRTIVANKPDIVVIDRSARRVMIVDVTIPHDENLVKAEKEKQIKYLDLAHEVVDMWNVNSAIIVPIVVTANGLIAKSLDDHLSKLSLGGWIKGLIQKAVLLDTARIVRRFLSLEP

SEQ ID NO: 28460 - protein, 1202 aa, Noctua fimbriata
MITRAASRRARLPPPDQSLSSASPPPESSPVVSAVTPAVAVASSSSDEYFSPPTSPTPVRRQGRGRPPRSLGLRGHPAPSRVPAAGGCVQRMRWTHSINENVMRAYYGSTEGGTNLTAYRVGMLSLFQVLEPTINVSAQRLSDQVRVIQRNHMLDDAVLDRLRSEVLSNRIVFTPAQTAVQASVIDATPPRFNPAVVEEDDRVAVVSSQCNDRLRSALEDALREYRSTPTELRPRLPRLPMHNKNRALVCALDSQLKNLFESSENLVDTHSILYCGAVAACRLANVKFPNCDVATRPKPAVPAWQCRIECRIDGARVLIGKLHCFREGNTRPRVMRFVRRAFSGTGISPQEYMSRVTERIDFLKQKVYAWANRIRRYKRRVDRYSQNRMFQSDERWVYRAWERPDQNMTDMCRPDDAATSSFWRSIWSVPVCHTEADWMRDVEQVCEPIPEMEPILITPLDVARAVRPLPNWKSPGPDGLHNFWLKWLSSSHTCLASQFQSSLESGSLPQFLTTGVTHLLHKSGSPAEPKNYRPITCLSTVYKLLTSILRAKINTHIDKNSIMSASQNGCRNGSRATKELLLIDMAISQQVRRSRKDLSTCWIDYKKAYDSVPHTWLMRVLELYKIDATLRAFLESCMGQWRTVLRYPGCRQIQGNDEPVWIKRGIFQGDSLSPLWFCLALNPLSTLLEDSGLGYRLRRGGQVISHLLYMDDLKLFAPNKLQLMELLKVTETFSSAIRMEFGVDKCAVMYVKQGEIMKSEGIQLSDSIHLRTLSSTESYKYLGMSEALGINVTDMKQSLKERFFGRLNKVLHSLLSGGNKVRAFNGWVMPVLMYSFGVLKWTQTELDALDRRVRTLLTANRMHHPRSSVMRLYIPRKCGGRGFLNAKSLHNREMCSLREYFLKVEVGMHRDVVAVDKGLTPLSMAKENWRKPEVLTTDDRKEVWQGKELHGRFYRALHGPDVDFLASVSWLRFGDLFGETEGFVCAIMDEVMLTNNYRKYIMKDGTVDVCRACHRPGESIRHIISGCSRLANGEYLHRHNQVARIIHQQLALKYKLVESEVPYYKYVPDPVLEKDHVTLYWDQSIITDRTIVANKPDIVVIDRSARRVMIVDVTIPHDENLVKAEKEKQIKYLDLAHEVVDMWNVNSAIIVPIVVTANGLIAKSLDDHLSKLSLGGWIKGLIQKAVLLDTARIVRRFLSLEP

SEQ ID NO: 28461 - protein, 868 aa, Noctua fimbriata
MRFVRRAFSGTGISPQEYMSRVTERIDFLKQKVYAWANRIRRYKRRVDRYSQNRMFQSDERWVYRAWERPELNMTDVCRPDDAATSSFWRSIWSVPVCHTEADWMRDVERVCEPIPEMEPILITPLDIARAVRPLPNWKSPGPDGLHNFWLKWLSSSHTCLASQFQSSLESGSLPQFLTTGVTHLLHKSGSPAEPKNYRPITCLSTVYKLLTSILRAKINTHIDKNSIMSASQNGCRNGSRGTKELLLIDMAISQQVRRSRKDLSTCWIDYKKAYDSVPHTWLMRVLELYKIDATLRAFLESCMGQWRTVLRYPGCRQIQGNDEPVWIKRGIFQGDSLSPLWFCLALNPLSTLLEGSGLGYRLRRGGQVISHLLYMDDLKLFAPNKLRLMELLKVTETFSSAIRMEFGVDKCAVMYVKQGEIMESEGIQLSDSIHLRTLSSTESYKYLGMSEALGINVTDMKQSLKERFFGRLNKVLHSLLSGGNKVRAFNGWVMPVLMYSFGVLKWTQTELDALDRRVRTLLTANRMHHPRSSVMRLYIPRKCGGRGFLNAKSLHNREMCSLREYFLKVEVGMHRDVVAVDKGLTPLSMAKENWRKPEVLTTDDRKEVWQGKELHGRFYRALHGPDVDFLASVSWLRFGDLFGETEGFVCAIMDEVMLTNNYRKYIMKDGTVDVCRACHRPGESIRHIISGCSRLANGEYLHRHNQVARIIHQQLALKYKLVESEVPYYKYVPDPVLEKDHVTLYWDQSIITDRTIVANKPDILVIDRSARRVMIVDVTIPHDENLVKAEKEKQIKYLDLAHEVVDMWNVNSAIIVPIVVTANGLIAKSLDDHLSRLSLGGWIKGLIQKAVLLDTARIVRRFLSLEP

SEQ ID NO: 28462 - protein, 1202 aa, Noctua fimbriata
MITRAASRRARLPPPDQSLSSASPPPESSPIVSAVTPAVAVASSSSDEYFSPPTSPTPVRRQGRGRPPRSLGLRGHPAPSRVPAAGGCVQRMRWTHSINENVMRAYYGSTEGGTNLTAYRVGMLSLFQVLEPTINVSAQRLSDQVRVIQRNHMLDDAVLDRLRSEVLSNRIVLTPAQTAVQASVIDATPPRFNPAVVEEDDRVAVVSSQCNDRLRSALEDALREYRSTPTELRPRLPRLPMHNKNRALVCALDSQLKNLFESSENLVDTHSILYCGAVAACRLANVKFPNCDVATRPKPAVPAWQRRIECRIDGARVLIGKLHCFREGNTRPRVMRFVRRAFSGTGISPQEYMSRVTERIDFLKQKVYAWANRIRRYKRRVDRYSQNRMFQSDERWVYRAWERPDQNMTDMCRPDDAATSSFWRSIWSVPVCHTEADWMRDVEQVCEPIPEMEPILITPLDVARAVRPLPNWKSPGPDGLHNFWLKWLSSSHTCLASQFQSSLESGSLPQFLTTGVTHLLHKSGSPAEPKNYRPITCLSTVYKLLTSILRAKINTHIDKNSIMSASQNGCRNGSRGTKELLLIDMAISQQVRRSRKDLSTCWIDYKKAYDSVPHTWLMRVLELYKIDATLRAFLESCMGQWRTVLRYPGCRQIQGNDEPVWIKRGIFQGDSLSPLWFCLALNPLSTLLEDSGLGYRLRRGGQVISHLLYMDDLKLFAPNKLQLMELLKVTETFSSAIRMEFGVDKCAVMYVKQGEIMESEGIQLSDSIHLRTLSSTESYKYLGMSEALGINVTDMKQSLKERFFGRLNKVLHSLLSGGNKVRAFNGWVMPVLMYSFGVLKWTQTELDALDRRVRTLLTANRMHHPRSSVMRLYIPRKCGGRGFLNAKSLHNREMCSLREYFLKVEVGMHRDVVAVDKGLTPLSMAKENWRKPEVLTTDDRKEVWQGKELHGRFYRALHGPDVDFLASVSWLRFGDLFGETEGFVCAIMDEVMLTNNYRKYIMKDGTVDVCRACHRPGESIRHIISGCSRLANGEYLHRHNQVARIIHQQLALKYKLVESEVPYYKYVPDPVLEKDHVTLYWDQSIITDRTIVANKPDIVVIDRSARRVMIVDVTIPHDENLVKAEKEKQIKYLDLAHEVVDMWNVNSAIIVPIVVTANGLIAKSLDDHLSKLSLGGWIKGLIQKAVLLDTARIVRRFLSLEP

SEQ ID NO: 28463 - protein, 1202 aa, Noctua fimbriata
MITRAASRRARLPPPDQSLSSASPPPESSPIVSAVTPAVAVASSSSDEYFSPPTSPTPVRRQGRGRPPRSLGLRGHPAPSRVPAAGGCVQRMRWTHSINENVMRAYYGSTEGGTNLTAYRVGMLSLFQVLEPTINVSAQRLSDQVRVIQRNHMLDDAVLDRLRSEVLSNRIVFTPAQTAVQASVIDATPPRFNPAVVEEDDRVAVVSSQCNDRLRSALEDALREYRSTPTELRPRLPRLPMHNKNRALVCALDSQLKNLFESSENLVDTHSILYCGAVAACRLANVKFPNCDVATRPKPAVPAWQRRIECRIDGARVLIGKLHCFREGNTRPRVMRFVRRAFSGTGISPQEYMSRVTERIDFLKQKVYAWANRIRRYKRRVDRYSQNRMFQSDERWVYRAWERPDQNMTDMCRPDDAATSSFWRSIWSVPVCHTEADWMRDVEQVCEPIPEMEPILITPLDVARAVRPLPNWKSPGPDGLHNFWLKWLSSSHTWLASQFQSSLESGSLPQFLTTGVTHLLHKSGSPAEPKNYRPITCLSTVYKLLTSILRAKINTHIDKNSIMSASQNGCRNGSRATKELLLIDMAISQQVRRSRKDLSTCWIDYKKAYDSVPHTWLMRVLELYKIDATLRAFLESCMGQWRTVLRYPGCRQIQGNDEPVWIKRGIFQGDSLSPLWFCLALNPLSTLLEDSGLGYRLRRGGQVISHLLYMDDLKLFAPNKLQLMELLKVTETFSSAIRMEFGVDKCAVMYVKQGEIMKSEGIQLSDSIHLRTLSSTESYKYLGMSEALGINVTDMKQSLKERFFGRLNKVLHSLLSGGNKVRAFNGWVMPVLMYSFGVLKWTQTELDALDRRVRTLLTANRMHHPRSSVMRLYIPRKCGGRGFLNAKSLHNREMCSLREYFLKVEVGMHRDVVAVDKGLTPLSMAKENWRKPEVLTTDDRKEVWQGKELHGRFYRALHGPDVDFLASVSWLRFGDLFGETEGFVCAIMDEVMLTNNYRKYIMKDGTVDVCRACHRPGESIRHIISGCSRLANGEYLHRHNQVARIIHQQLALKYKLVESEVPYYKYVPDPVLEKDHVTLYWDQSIITDRTIVANKPDIVVIDRSARRVMIVDVTIPHDENLVKAEKEKQIKYLDLAHEVVDMWNVNSAIIVPIVVTANGLIAKSLDDHLSKLSLGGWIKGLIQKAVLLDTARIVRRFLSLEP

SEQ ID NO: 28464 - protein, 1203 aa, Atethmia centrago
MLTRAASKRARPPPPDSSLSSASPPPVSSPTVSAVITPAAVVASSSSDEYFSPPTSPTPVRRQGRDRPPKSLGLRGHPAPSRVPAAGGCVQRMRWTQSMNENVMRAYYGSTEGGTNLTAYRVRMLSLFQELEPTVNVSAQRLSDQVRVIQRNRRLDDATLDRLRSEVLSNYIISTPAQTAVHTPIIDVIPPRSNHGVEEEDDRAATVSSQCNVRLRSALEDAFREYRSTPTELRPRLPRLPMHKKNRALMCALDSQLKVFFESSEDLVDTHSILYCAAVAACRLANVKFPNSDGATRPKPAVPAWQCRIERRIDKARVLIGKLYCFREGNTRPRVMRFVRRAFSGTGISPREYMSHITERIDFLKQKVCAWASRIRRYKRRVDRYTQNRMFQSDERWVYRAWERPKQNVTDVCRPDDATTTAFWRSIWSVPVCHVEADWMRDVERVCETIPEMEVVIITPSDIARAVRPLPNWKSPGPDGLHNFWLKWLTSSHTCLASQFQSSLESGSLPQFMTTGITHLLHKSGSPAEPKNYRPITCLSTVYKLLTSILRAKMNTHIDSNSIMSASQNGCRNGSRGTKELLLIDMAISQQVRRSRKDLSTCWIDYKKAYDSVPHTWLMRVLELYKIDTTLRTFLESCMGQWRTVLRYPGCRQIQGNDEPVWIKRGIFQGDSLSPLWFCLALNPLSMQLEDSGLGYRLRRGGQIISHLLYMDDLKIFAPNKLQLMKLLKVTETFSSAIRMEFGVDKCALMHVKRGEIMESEGIQLSDSIHLRSLSSPESYKYLGMSEALGINVTDMKQSLKERFFGRLKKVLISLLSGGNKVRAFNSWVMPVLTYSFGILKWTQTELDALDRRVRTLLTANRMHHPRSSVMRLYIPRKCGGRGFLNAKTLHNREICSLREYFLKTEVGMHRDVVAVDKGLTPLSMAKENWCKPVVLTTDDRKEIWQSKELHGRFYRALHEPDADFLASVSWLRFGDLFGETEGFVCAIMDEVILTNNYRRHIMKDGTVDVCRACHRPGESIRHIISGCSRLANGEYLHRHNQVARIIHQQLALKYKLVKSEVPYYKYVPDPVLENDHVTLYWDRSIITDRTIVANKPDIVVIDRLARRAMIVDVTIPHDDNLVKAEKEKQIKYLDLAHEVVDVWNVNSAVIVPIVVTANGLMARSLNHHLSRLALDGWIKGLIQKAVLLDTARIVRRFLSLEP

SEQ ID NO: 28465 - protein, 1100 aa, Atethmia centrago
MLSLFQKLEPTVNVSAQRLSDQVRVIQRNHRLDDAALDRLRSEVLSNHIVSTPAQTATHAPIINAIPPRSNHDVEEEDDRVATVSSQCNVRLRSALEDAFREYRSTPTELRPRLPRLPMHKKNRALVCTLDSLLKDFFESSEDLVDTHSILYCAAVAACRLANVKFPNCDGATRPKPAVPAWQCRIERRIDGARVLIGKLYCFREGNTRPRVMRFVRRAFSGTGISPREYMSRVTERIDFLKQKVCAWASRIRRYKRRVDRYTQNRMFQSDERWVYRAWERPEQNETDVCRPDDATTTAFWRSIWSVPVCHAEADWMRDVERVCETIPEMEVVIITPSDIARAVRPLPNWKSPGPDGLHNFWLKWLTSSHTCLASQFQSSLESGSLPQFLTTGITHLLHKSGSPAEPKNYRPITCLSTVYKLLTSILRAKINTHIDSNSIMSASQNGCRNGSRGTKELLLIDMAISQQVRRFRKDLSTCWIDYKKAYDSVPHTWLMRVLEFYKIDTTLRTFLESCMGQWRTVLRYPGCRQIQGNDEPVWIKRGIFQGDSLSPLWFCLALNPLSTLLEDSGLGYRLRRGGQVISHLLYMDDLKIFAPNKLQLMELLKVTETFSSAIRMDFGVDKCAVMHVKRGEIMESEGIQLSDSIHLRSLSSPESYKHLGMSEALGINVTDMKQSLKERFFGRLKKVLISPLSGGNKVRAFNGWVMPVLMYSFGILKWTQTELDALDRRVRTLLTANRMHHPRSSVMRLYIPRKCGGRGFLNAKTLHNREICSLREYFLKTEVGMHRDVVAVDKGLTPLSMAKENWCKPVILTTDDRKEIWQNKELHGRFYRALHEPDVDFLASVSWLRFGDLFGETEGFVCAIMDEVILTNNYRRHIMKDGTVDVCRACHRPGESIRHIISGCSRLANGEYLHRHNQVARIIHQQLALKYKLVNSEVPYYKYAPDPVLENDHVTLYWDRSIITDRTIVANKPDIVVIDRLARRAMIVDVTIPHDENLVKAEKEKQIKYLDLAHEVVDMWNVDSAVIVPIVVTANGLMAESLNHHLSRLSLGGWIKGLIQKAVLLDTARIVRRFLSLESQPPVAWTLLPTPADHYFLYF

SEQ ID NO: 28466 - protein, 1169 aa, Atethmia centrago
MKFPIIIIIIIFFYFYFSPPTSPTPVRRQGRGRPPKSLGLRGQLAPSRVPAAGGCVQRMRWTQSMNENVMRAYYGSTEGGTNLTAYRVRMLSLFQELEPTVNVSAQRLSDQVRVIQRNHRLDDAALDRLRSEVLSNHIVSTPAQTATHAPIIDAFPPRSNHDVEEEDDRVATVSSQCNVRLRSALEDAFREYRSTPTELRPRLPRLPMHKKNRALVCALDSLLKDFFESSEDLVDTHSILYCAAVAACRLANVKFPNCDEATRPKPAVPAWQYRIERRIDGARVLISKLYCFREGNTRPRVMRFVRRAFSGTGISPREYMSRVTERIDFLKQKVCAWASRIRRYKRRVDRYTQNRMFQSDERWVYRAWERPEQNETDMCRPDDATTTAFWRSIWSEPVCHAEADWMRDVERVCETIPEMEVVVITPSDIARAVRPLPNWKSPGPDGLHNFWLKWLTSSHTYLASQFQSSLESGSLPQFLTTGITHLLHKSGSPAEPKNYRPITCLSTVYKLLTSILRAKINTHIDSNSIMSASQNGCRNGSRGTKELLLIDMAISQQVRRSRKDLSTCWIDYKKAYDSVPHTWLMKVLELYKIDTTLRTFLESCMGQWRTVLRYPGCRRIQGNDEPVWIKRGIFQGDSLSPLWFCLALNPLSTLLEDSGLGYRLRRGGQVISHLLYMDDLKIFAPNKLRLMELLKVTETFSGAIRMEFGVDKCAVMHVKRGEIMESEGIQLSDSIHLRSLSSPESYKYLGMSEALGINVTDMKQLLKERFFGRLKKVLISLLSGGNKVRAFNGWVMPVLMYSFGILKWTQTELDALDRRVRTLLTANRMHHPRSSVMRLYIPRKCGGRGFLNAKTLHNREICSLREYFLKAEVGMHRDVVAVDKGLTPLSMAKENWCKPVVLTTDDRKEIWQNKELHGRFYRALHEPDVDFLASVSWLRFGDLFGETEGFVCAIMDEVILTNNYRRHIMKDGTVDVCRACHRPGESIRHIISGCSRLANGEYLHRHNQVARIIHQQLALKYKLVNSEVPYYKYVPDPVLENDHVTLYWDRSIITDRTIVANKPDIVVIDRLARRAMIVDVTIPHDDNLVKAEKEKQIKYLDLAHEVVDMWNVNSAVIVPIVVTANGLMAESLNHHLSRLSLGGWIKGLIQKAVLLDTARIVRRFLSLEP

SEQ ID NO: 28467 - protein, 1222 aa, Atethmia centrago
MLTRSAARARPPPPDSSLSSASPPPVPSPTVSAVTTPAAVVASSSSDEYFSPPTSPTPVRRQGRGRPPKSLGLRGQLAPSRVPAAGGCVQRMRWTQSMNENVMRAYYGSTEGGINLTAYRVRMLSLFQELEPTVNVSAQRLSDQVRVIQRNHRLDDAALDRLRSEVLSNHIVSTPAQTATHAPIIDAIPPRSNHDVEEEDDRVATVSSQCNVRLRSALEDAFREYRSTPTELRLRLPRLPMHKKNRALVCALDSLLKDFFESSEDLVDTHSILYCAAVAACRLANVKFPNCDEATRPKPAVPAWQCRIERRIDGARVLISKLYCFREGNTRPRVMRFVRRAFSGTGISPREYMSRVTERIDFLKQKVCAWASRIRRKRRVDRYTQNRMFQSDERWVYRAWERPEQNETDMCRPDDATTTAFWRSIWSEPVCHAEADWMRDVERVCETIPEMEVVVITPSDIAIAVRPLPNWKSPGPDGLHNFWLKWLTSSHTCLASQFQSSLESGSLPQFLTTGITHLLHKSGSPAEPKNYRPITCLSTVYKLLTSILRAKINTHIDSNSIMSASQNGCRNGSRGTKELLLIDMAISQQVRRSRKDLSTCWIDYKKAYDSVPHTWLMKVLELYKIDTTLRTFLESCMGQWRTVLRYPGCRRIQGNDEPVWIKRGIFQGDSLSPLWFCLALNPLSTLLEDSGLGYRLRRGGQVISHLLYMDDLKIFAPNKLRLMELLKVTETFSGTIRMEFGVDKCAVMHVKRGEIMESEGIQLSDSIHLRSLSSPESYKYLGMSEALGINVTDMKQLLKERFFGRLKKVLISLFSGGNKVRAFNGWVMPVLMYSFGILKWTQTELDALDRRVRTLLTANRMHHPRSSVMRLYIPRKCGGRGFLNAKTLHNREICSLREYFLKAEVGMHRDVVAVDKGLTPLSMAKENWCKPVVLTTDDRKEIWQNKELHGRFYRALHEPDVDFLASVSWLRFGDLFGETEGFVCAIMDEVILTNNYRRHIMKDGTVDVCRACHRPGESIRHIISGCSRLANGEYLHRHNQVARIIHQQLALKYKLVNSEVPYYKYVPDPVLENDHVTLYWDRSIITDRTIVANKPDIVVIDRLARRAMIVDVTIPHDDNLVKAEKEKQIKYLDLAHEVVDMWNVNSTVIVPIVVRPLRPDSEGSTPRYGSHCEEVPVSGALTTGNLDPAPDTGGPLFYIFLNVFFFCFYKKYLKMYFIWQKT

SEQ ID NO: 28468 - protein, 1203 aa, Atethmia centrago
MLTRAASKRARPPPPDSSLSSASPPPVSSPTVSAVITPAAVVASSSSDEYFSPPTSPTPVRRQGRDRPPKSLGLRGHPAPSRVPAAGGCVQRMRWTQSMNENVMRAYYGSTEGGTNLTAYRVRMLSLFQELEPTVNVSAQRLSDQVRVIQRNRRLDDATLDRLRSEVLSNYIISTPAQTAVHTPIIDVIPPRSNHGVEEEDDRAATVSSQCNVRLRSALEDAFREYRSTPTELRPRLPRLHMHKKNRALMCALDSQLKVFFESSEDLVDTHSILYCAAVAACRLANVKFPNSDGATRPKPAVPAWQCRIERRIDKARVLIGKLYCFREGNTRPRVMRFVRRAFSGTGISPREYMSHITERIDFLKQKVCAWASRIRRYKRRVDRYTQNRMFQSDERWVYRAWERPKQNVTDVCRPDDATTTAFWRSIWSVPVCHVEADWMRDVERVCETIPEMEVVIITPSDIARAVRPLPNWKSPGPDGLHNFWLKWLTSSHTCLASQFQSSLESGSLPQFMTTGITHLLHKSGSTAEPKNYRPITCLSTVYKLLTSILRAKINTHIDSNSIMSASQNGCRNGSRGTKELLLIDMAISQQVRRSRKDLSTCWIDYKKANDSVPHTWLMRVLELYKIDTTLRTFLESCMGQWRTVLRYPGCRQIQGNDEPVWIKRGIFQGDSLSPLWFCLALNPLSMQLEDSGLGYRLRRGGQIISHLLYMDDLKIFAPNKLQLMKLLKVTETFSSAIRMEFGVDKCAVMHVKRGEIMESEGIQLSDSIHLRSLSSPESYKYLGMSEALGINVTDMKQSLKERFFGRLKKVLISLLSGGNKVRAFNSWVMPVLTYSFGILKWTQTELDALDRRVRTLLTANRMHHPRSSVMRLYIPRKCGGRGFLNAKTLHNREICSLREYFLKTEVGMHRDVVAVDKGLTPLSMAKENWCKPVVLTTDDRKEIWQSKELHGRFYRALHEPDVDFLASVSWLRFGDLFGETEGFVCAIMDEVILTNNYRRHIMKDGTVDVCRACHRPGESIRHIISGCSRLANGEYLHRHNQVARIIHQQLALKYKLVNSEVPYYKYVPDPVLENDHVTLYWDRSIITDRTIVANKPDIVVIDRLARRAMIVDVTIPHDDNLVKAEKEKQIKYLDLAHEVVDMWNVNSAVIVPIVVTANGLMARSLNHHLSRLALDGWIKGLIQKAVLLDTARIVRRFLSLEP

SEQ ID NO: 28469 - protein, 1200 aa, Xestia c-nigrum
MITRAASRRRARLPSPDSSLSSASPPPDPGSPVSTVAAVASSSSDEYFSPPTSPTPVRRAGRGRPPRSLGLRGQQAPSRVPATGGCVQRMRWTQSMNENAMRAYYGSTEGGTNLTAYRVRMLSLFQDLEPAVNVSAQRLSDQVRVIQRNHMLDDAALDRLRSEVLSNRIILTPAQTAVQASAIDATPPRSNPAVVEEDGRVATVSSQCNDRLRSALEDALREYRSTPTELRPRLPRLPMHKKNRALVCALDSQLKNVFESSEDLVDTHSILFCGAVAACRLANVKFPNCDLATRPKPAVPVWQRRIERRIDGARVLIGKLYCFREGNTRPRVMRFVRRAFSGTEISPQEYMSRVTERIDFLKQKVYAWASRIRRYKRRVDRYSQNRMFQCDERWVYRAWERPDQNVTDVCHPGDAATSSFWRSIWSVPVCHSEADWMRDVERVCEPIPEMAPVVITSLDIARAVRPLPNWKSPGPDGLHNFWLKWLSSSHTYLASQFQSSLESGSLPQFLTTSVTHLLHKSGSPTEPQNYRPITCLSTVYKLLTSILRTKINTHIDNNSIMSASQNGCRNGSRGTKELLLIDMAISQQVRRSRKDLSTCWIDYKKAYDSVPHSWLMRVLELYKIDATLCTFLKSCMGQWRTVLRYPGCRQIQGNDESVWIKRGIFQGDSLSPLWFCLALNPLSTLLENSGLGYQLRKDGQVISHLLYMDDLKLFAPNKLRLMELLKVTETFSNAIRMEFGVDKCAVMYVKRGEIMESEGLQLSNSIHLRSLSSSESYKYLGMSEALGINVTDMKQSLRERFFGRLKKVLNSLLSGGNKVRAFNGWVMPVLMYSFGILKWTQTELDALDRRVRTLLTENRMHHPRSSVMRLYIPRKCGGRSFLNAKTLHNREVCSLREYFLKAEVGMHRDVVAVDKGLTPLSMAKENWRKPVILTTDDRKKEWQGKVLHGRFYRALHGPDVDFLASVSWLRFGDLFGETEGFVCAIMDEVMLTNNYRKYIMKNGTVDVCRACHCPGESIRHIISGCSRLANGEYLHRHNQVARIIHQQLALKFKLVESEVPYYKYVPDPVLVKDHITLYWDQSIITDRTIVANKPDIVVIDRSARRVMIIDVTIPHDENLVKAEKEKQIKYLDLAHEVRDMWNMNSVIIVPIIVTANGLIAKSLDEHLSKLSLGGWIKGLIQKAVLLDTARIVRRFLSLQP

SEQ ID NO: 28470 - protein, 1202 aa, Omphaloscelis lunosa
MLTRSAARSARLPPPDSPLSSASPPPVPSPIVNAVSTPAAVVASSSSDEYFSPPTSPTPVRRQGRGRPPRSLGLRGQPAPSRVPAAGGCVQRMRWTQLMNENVMRAYYGSTEGGTNLTAYRVRMLSLFQELEPTVNVSAQRLSDQVRVIQRNHRLDDIALDRLRSEVLSNHIVSTRAQTAAQESNIDPTPPRFNYGVEEDDRVATVSSQCNDRLRSALEDAFREYRYTPTELRPRLPRLPMHKKNRALVCALDSQLTNFFESSEDLIDTHSILYCAAVAACRLANVKFPNYDGATRPKPVVPAWQCRIERRIDGARVLIGKLYCFREGNTRPRVMRFVRRAFLGTGISPQEYMSRVTERIDFLKQKVCAWASRIRRYKRRVDRYTQNRMFQSDERWVYRAWERPEQNVTDVCRPDDAATSAFWRSIWSVPVCHTEAGWMQDVERVCETIPEMDAVFITPLDVARAVRPLPNWKSPGPDGLHNFWLKWLSSSHTRLASQFQSSLESGLLPQFLTTGVTHLLHKSGNPAEPKNYRPITCLPTVYKLLTSILRTKINTHIDSNSIMSASQNGCRNGSRGTKELLLIDMAISQQVRRSRKDLSTCWIDYKKAYDSVPHTWLMRVLELYKVHTTLRTFLMSCMGQWRTVLRYPGCRQTQGNDEPVWIKRGIFQGDSLSPLWFCLALNPLSTLLEGSGLGYRLRRGGQVISHLLYMDDLKLFAPNKLRLMELLKVTETFSGAIRMEFGVDKCAVMHVKRGEIMESEGTQLSDSIHLRSLSSAENYRYLGMSESLGINVADMKQSLKERFFGRLKKVLISFLSGGNKVRAFNGWVMPVLMYSFGILKWTQTELDALDRRVRTLLTTNRMHHPRSSVMRLYIPRKCGGRGFLNAKTLHNREVCSLREYFFKADVGMHRDVVAVDNGLTPLSMAKENWRKPVVLTTDDRKEVWQSKALHGRFYRALHEPGVDFLASVSWLRFGDLFGETEGFICAIMDEVILTNNYRRHIMKDGTVDVCRACHRPGESIRHIISGCSRLANGEYLHRHNQVARIIHQQLALKYKLVDSEVPYYKYVPDPVLENGHVTLYWDRSIITDRTIIANKPDIVVIDRLARRAMIVDVTIPHDENLVKAEKEKQIKYLDLAHEVVDMWNVSSAIIVPIVVTANGLMAESLDQHLSRLSLGGWIKRLIQKAVLLDTARIVRRFLSLQP

SEQ ID NO: 28471 - protein, 868 aa, Busseola fusca
MRFVRQAFSGTGISPREYISRVTERIDFLKQKVCAWASRIRRYKRRVDRYTQNRMFQSDERWVYRAWERPEQSEANVCRPDDATTSAFWRSIWSVPVSHAEGGWIRNVERVCETIPEMDAIIITPLDVARAVRPLPNWKSPGPDGLQNFWLKWLTSSHTCLASQFQSSLESGSLPQFLTTGVTHLLHKSGSPAEPKNYRPITCLSTVYKLLTSILRAKINAHIDSFSIMSTSQNGCRNGSRGTKELLLIDMAISQQVRRSHKDLSTCWIDYKKAYDSVPHTWLMRVLELYKINATLRTFLDSCMGQWKTVLRYPGGRQTQGNDEPVWIKRGIFQGDSLSPLWFCLALNPLSTLLEDSGLGYRLRRGGQVISHLLYMDDLKLFAPNKLHLMELLKVTETFSNAIRMEFGVDKCAVMHVKRGKIMEPEGISLSDSIHLRSLSSFENYKYLGMSEALGINDADMKQSLKERFFCRLKKVLNSLLSGGNKVRAFNGWVMPVLMYSFGILKWTQTELDALDRRVRTLLTANRMHHPRSSVMRLYIPRKCGGRGFLNAKTLHNREVCSLREYFLKTEVGMHRDVVAVDKGLTPLSMAKENWHKPKILTTDDRKTVWQSKELHGRFYRALHEPEVDFLASVSWLRFGDLFGETEGFVCAIMDEVILTNNYRRYIMKDGTVDVCRACHHPGESIRHIISGCSRLANGEYLHRHNQVARIIHQQLALKYKLVDSEVPYYKYVPDPVLENDHVTLYWDRSIITDRTIIANKPDIVVIDRLARLTMIVDVTIPHDGNLVKAEKEKQIKYLDLAHEVVDMWNVNSAVIVPIVVSANGLIAKSLDQHLSRLSLGGWIKGLIQKAVLLDTARIVRRFLSLEP

SEQ ID NO: 28472 - protein, 1110 aa, Sesamia nonagrioides
MRWTQTMNENVMRAYYGATEGGTNLTAYRERMLSLFQALEPTVNVSAQRLSDQVRVIQRNHRLDDIALDRLRSEVLSNQIAPTLTQTAAQASIIDAVPPRSNRVEEEDDRVETVSSQYNDRLRSALEDAFRDYRSTPTNLRPRLPRLPMHKKNRALVCALDSQLKNFFESSEDLIDTHSILYCAAVAACRLAKVKFPNCEEATRPKLAVPAWQRRIERRIDGTRVLIGKLYCFREGNTRPRVMRFVRQAFSGTGISPREYINNVTERIDFLKQKVCAWASRIRRYKKRVDRYTQNRMFQSDERWVYRAWERPEQNEADECRPDDATTSAFWRGIWSVSVCHTEGDWTQDVEQVCEAIPEMDNILITPLDVATAVRSLPNWKSPGPDGLHNFWLKWLSSSHTCLASQFQSSLESGSLPQFLTTGITHLLHKSGSTAEPKNYRPITCLPTVYKVLTSILKAKINNHLDSNSIMSVSQNGCRSGSRGTKELLLIDMAISQQVRRSRKDLSTCWIDYKKAYDSVPHTWLMRVLELYKINATLRTFLRSCMGQWKTVLRYPGSRQIQGNDEPVWIKRGIFQGDSLSPLWFCLALNPLSTLLEDSGLGYRLKRGGQVISHLLYMDDLKLFAPNKLHLMKLLNVTETFSSGIKMEFGVDKCAVMHVKRGQIMESEGITLPDSIHLRSLSSIESYKYLGMSEALGINDADMKQSLKERFFGRLKKVLNSLLSGGNKVRAFNGWIMPVLMYSFGILKWTQTELDALDRRVRTLLTANRMHHPRSSVMRLYIPRKCGGRGFLNAKTLHNREVFSLREYFLKTVVGMHHDVVTVDKGLTPLSMAKENWHKPIILTTDDRKMVWQSKELHGRFYRALHGPDIDFLASVSWLRFGDLFGETEGFVCAIMDEVILTNNYRRYIMKDGTIDVCRACHHPGESIRHIISGCSRLANSEYLHRHNQVARIIHQQLALKYKLVDSEVPYYKYVPDPVLENDHVTLYWDRSIITDRTIVANKPDIVVIDRLARLAMIVDVTIPHDGNLVKAEKEKQMKYLDLAHEVVDMWNVNSAVIVPIVVSANGLIAKSLDQHLLRLSLGSWIKGLIQKAVLLDTARIVRRFLSLEP

SEQ ID NO: 28473 - protein, 962 aa, Sesamia nonagrioides
MHKKNRALVCALDSLLKNFFESSEDLIDTHSILYCAAVAACRLAKVKFPNCEEAARPKSAVPAWQRRIERRIDGTRVLIGKLYCFRDGNTRPRVMRFVRQAFSGTGISTREYINHLTERIDFLKQKVCAWASRIRRYKRRVDRYTQNHMFQSDERWVYRAWERPEQNEADVCRPDDATTSAFWRGIWSVSVCHSEGNWIRNVEQVCETIPEMDTILITPSDVAAAVRSLPNWKSPGPDGLHNFWLKWLSSSHTCLASQFQSSLESGSLPQFLTTGITHLLHKSGSTAEPKNYRPITCLPTVYKVLTSILKAKINKHLNSNSIMSVSQNGCKSGSRGTKELLLIDMAISQQVRRSRKDLSTCWIDYKKAYDSVPHTWLMRVLELYKINATLRTFLRSCMGQWKTALHYPGSRQIQGNDEPVWIKRGIFQGDSLSPLWFCLALNPLSKLLENSGLGYRLRRGGQVISHLLYMDDLKLFAPNELHLMKLLNVTETFSSGIRMEFGVDKCAVMHVKQGEIMESEGITLPDSIHLRSLSSFESYKYLGMSEALGINDADMKQSLKERFFGRLKKVLNSLLSGGNKVRAFNGWVMPVLMYSFGILKWTQTELDALDRRVRTLLTANRMHHPRSSVMRLYIPRKCGGRGFLNAKTLHNREVCSLREYFLQTVVGMHHDVVKVDKGLTPLSMAKENWHKPIILTTDDRRKVWQSKELHGRFYRALHEPDVDFLASVSWLRFSDLFGETEGFVCAIMDEVILTNNYRRYIMKDGTIDVCRACHHPGESIRHIISGCSRLANSEYLHRHNQVARIIHQQLALKYKLVDSEVPYYKYVPDPVLENDHVTLYWDRSIITDRTIVANKPDIVVIDRLARLAMIVDVTIPHDGNLVKAEKEKKMKYLDLAHEVVDMWNVNSAVIVPIVVSANGLIAKSLDQHLLRLALGSWIKGLIQKAVLLDTARIVRRFLSLEP

SEQ ID NO: 28474 - protein, 868 aa, Sesamia nonagrioides
MRFVRQAFSGTGISPREYISHVTERIDFLKQKVCAWASRIRRYKRRVDRYTQNRMFQSDERWVYRAWERTEQNEADVCRPDDAATSAFWRSIWSVPGCHAEGDWIQDVEQVCEMIPEMDTILITPIDVVTAVRSLPNWKSPGPDGLHNFWLKWLSSSHTCLASQFQSSLESGSLPQFLTTGITHLLHKSGSTAEPNNYRPITCLPTVYKVLTSILKAKINKHLDSNSIMSVSQNGCRSGSRGTKELLLIDMAISQQVRRARKDLSTCWIDYKKAYDSVPHTWLMRVLELYKVNATLRTFLRSCMGQWKTVLRYPGSRRIQGNDEPVWIKRGIFQGDSLSPLWFCLALNPLSTLLEDSGLGFRLRRGGQVISHLLYMDDLKLFAPNKLHLMKLLNVTETFSSGIKMEFGVDKCAVMHVKRGQIMESEGITLPDSIHLRSLSSVESYKYLGMSEALGINDADMKQSLKERFFGRLKKVLKSLLSGGNKVRAFNGWVMPVLMYSFGILKWTQTELDALDRRVRTLLTANRMHHPRSSVMRLYIPRKCGGRGFLNAKTLHNREVCSLREHFLKTVVGMHHDVVTVDKGLTPLSMAKENWHKPIILTTDDRKMIWQSKELHGRFYRALHEPDVDFLASVSWLRFSDLFGETEGFVCAIMDEVILTNNYRRYIMRDGTIDVCRACHHPGESIRHIISGCSRLANGEYLHRHNQVARIIHQQLALKYKLVDSEVPYYKYVPDPVLENDHATLYWDRSIITDRTIVANKPDIVVIDRLARLAMIVDVTIPHDGNLVKAEKEKQMKYLDLAHEVVDMCNVNSAVIVPIVVSANGLIAKSLDQHLLRLSLGSWIKGLIQKAVLLDTARIVRRFLSLEP

SEQ ID NO: 28475 - protein, 1202 aa, Sesamia nonagrioides
MLTRQAARRARSPPPDSSPSSASPPPVPSANVSAVTTPATVVASSSSDEYFSPPTSPTPVRRQGRGRPPKSLGLRGHPAPSRVPAAGGCVQRMRWTQTMNENVMRAYYRATEGGTNLTAYRERMLSLFQALEPTVNVSAQRLSDQVRVIQRNHRLDDIALDRLRSEVLSNQITPTLTQTAAQASTIDAAPPRSNRVEEEDDRVETVSSQYNDRLRNALEDAFRDYRSTPTNLRPRLPRLPMHKKNRALVCALDSLLKNFFESSEDLIDTHSILYCAAVAACRLAKVKFPNCEEAARPKPAVPAWQRRIERRIDGTRVLIGKLYCFRDGNTRPRVMRFVRRAFSGTGISPREYINHLTERIDFLKQKVCAWASRIRRYKRRVDRYTQNRMFQSDERWVYRAWERPELNEADVCRPDDATTSAFWRGIWSVSVCHTEGDWIQNVEQVCETIPEMDTIFITPSDVATAVRSLPNWKSPGPDGLHNFWLKWLSSSHTCLASQFQSSLESGSLPQFLTTGITHLLHKSGSTAEPKNYRPITCLPTVYKVLTSILKAKINKHLDSNSIMSVSQNGCKSGSRGTKELLLIDMAISQQVRRSRKDLSTCWIDYKKAYDSVPHTWLMRVLELYKINATLRTFLRSCMGQWKTALHYPGSRQIQGNDEPVWIKRGIFQGDSLSPLWFCLALNPLSTLLENSGLGYRLRRGGQVISHLLYMDDLKLFAPNELHLMKLLNVTETFSSGIRMEFGVDKCAVMHVKQGEIMESAGITLPDSIHLRSLSSFESYKYLGMSEALGINDADMKQSLKERFFGRLKKVLNSLLSGGNKVRAFNGWVMPVLMYSFGILKWTQTELDALDRRVRTLLTANRMHHPRSSVMRLYIPRKCGGRGFLNAKTLHNREVCSLREYFLQTVVGMHHDVVTVDKGLTPLSMAKKNWHKPIILTTDDRKKVWQSKELHGRFYRALHEPDVDLLASVSWLRFSDLFGETEGFVCAIMDEVILTNNYRRYIMKDGTIDVCRACHHPGESIRHIISGCSRLANSEYLHRHNQVARIIHQQLALKYKLVDSEVPYYKYVPDPVLENDHVTLYWDRSIITDRTIVANKPDIVVIDRLARLAMIVDVTIPHDGNLVKAEKEKQIKYLDLAHEIVDMWNVNSAVIVPIVVSANGLIAKSLDQHLLRLSLGSWIKGLIQKAVLLDTARIVRRFLSLEP

SEQ ID NO: 28476 - protein, 868 aa, Noctua janthe
MRFVRRAFSGTGISPQEYMSRVTERIDFLKQKVYAWANRIRRYKRRVDRYSQNRIFQSDERWVYRAWERPEQNMTDVCRPDDAATSSFWRSIWSVPVCHTEADWMRDVERACEPIPEMEPILITSIDITRAVRPLPNWKSPGPDGLHNFWLKWLSSSHACLASQFQSSLESGSLPQFLTTGVTHLLHKSGSPAEPKNYRPITCLSTVYKLLTSILRVKINTHIDKNFIMSASQNGCRNRSRGTKELLLIDMAISQQVRRSRKDLSTCWIDYKKAYDSVPHTWLMRVLELYKIDATLRAFLESCMGQWRTVLRYPGCRQIQGNDEPVWIKRGIFQGDSLSPLWFCLALNPLSTLLEDSGLGYRLRRGGQVISHLLYMDDLKLFAPNKLRLMELLKVTETFSNAIRMEFGVDKCAVMYVKRGEIMESEGIQLSDSIHLRSLSSSESYKYLGMSESLGINVTDMKQSLRERFFGRLNKVLNSLLSGGNKVRAFNGWVMPVLMYSFGVLKWTQTELDALDRRVRTLLTANRMHHPRSSVMRLYIPRKCGGRGFLNAKTLHNREICSLREYFLKTEVGMHRDVVAVDKGVTPLSIAKENWRKPVVLTTNDRKEVWQGKELHGRFYRALHGPDVDFLASVSWLRFGDLFGETEGFVCAIMDEVMLTNNYRKYIMKDGTVDVCRACHRPGESIRHIISGCSRLANGEYLHRHNQVARIIHQQLALKYKLVESEVPYYKYVPDPVLEKDHVTLYWDRSIITDRTIVANKPDIVVIDRLARRVMIVDVTIPHDENLVKAEKEKQIKYLDLAHEVVDMWNVNSAIIVPIVVTANGLIAKSLDDHLSRLSLGGWIKGLIQKAVLLDTARIVRRFLSLEP

SEQ ID NO: 28477 - protein, 868 aa, Mythimna ferrago
MRFVRRAFLGTGISPQGYMSRVTERIDFLKQKVCAWASRIRRYKRRVDRYSQNRMFQSDERWVYRAWERPEHSVIDGCRPDDFATITFWRNIWSVPVSHAEGGWMRDVERVCEAIPEMEKVTITPEDVAKAVRPLPNWKSPGPDGLQNFWLKWYSSSHALLASQFQSILESGSLPEYLTTGITHLLHKTGNPVDPKNYRPITCLSTVYKLLTSILRAKINIHIENHQIISPSQNGCRNGSRGTKELLLIDMAISQQTRRSRKDLSTCWIDYKKAYDSVPHTWLMRVLEFYKIDITLRTFLESCMRQWKTVLRYPGCRPIEGNDEPIWIKRGIFQGDSLSPLWFCLALNPLSTLLEDSGLGYRLRRGGQVISHLLYMDDLKLFAPSTLQLMELLKVTETFSSAIRMEFGVDKCAGMHVKRGKIMESEGIQLPDSIHLRSLSSTETYKYLGMSEALGINNADMKQSLKERFFGRLKKVLNSLLSGGNKVRAFNGWVMPVLMYSFGILKWTQTELDALDRRVRTLLTANRMHHPRSSVMRLYIPRKCGGRGFLNAKTLHNREVCSLREYFLKTDVGMHRDVVAVDKGLTPLSMAKEDWHKPVIMTTDNRKEIWKGKELHGRFFRALHEPDVDFLASVAWLRFSDLFGETEGFVCAIMDEVILTNNYRRYIMKDGTVDVCRACHRPGESIRHIISGCSRLANGEYLHRHNQVARIIHQQLALKYNLVDLEVPYYKYVPDPVLENDHVTLYWDRSIITDRTIVANKPDIVVIDRSARRAMIVDITIPHDENLVKAEKEKQMKYLDLAHEVGDMWSVDSAVIVPIVVTANGLIAKSFDDHLSKLSLHGWIKGQIQKAVLLDTARIVRKFLSLEP

SEQ ID NO: 28478 - protein, 962 aa, Mythimna ferrago
MHKKNRALVCALDSLLKNVFESSDSLLDTHSILYCGAVAACRLANVKFPCYGVATRPTPAAPAWQCRIERRIDEARALIGKLYCFREGNTRPRVMRFVRRAFSGTEISPREYMSRVTERIDFLKQKVCAWANRIRGYKRRVDRYSQNRMFQSDERWLYRAWERPGQNVTDGFRRDSVATNTFWRSIWSEPVCHNEGGWMRDVERVCKAIPEMDKVFITPLDVARAVRPLPNWKSPGPDGLQNFWLKWYSSSHAILASQFQSSLESGSLPQILTTGTTHLLHKTGSTADPKNYRPITCLSTVYKLLTSILRVKITLHIEKNSIMFASQNGCRNGSRGTKELLLIDMAISQQVRRSHKDLSTCWIDYKKAYDSVPHTWLMKVLELYKIDATLRTFLESCMRQWKTVLRYPGCRPIQGNNEPIWIKRGIFQGDSLSPLWFCLALNPLSTLLEDSGLGYRLRRGGQVLSHLLYMDDLKLFAHNNSQLIELLKVTETFSSVIRMEFGVDKCAVMHVRRGEIVESEGIQLSDSIHLRSLSSTETYKYLGMSEALGINVADMKQTLKERFFGRLKKVLNSLLSGGNKVRAFNGWVMPVLMYSFGILKWTQTELDALDRRVRTLLTANRMHHPRSSVMRLYIPRKCGGRGFLNAKTLHNREVCSLREYFLKTDVGMHRDVVAVDKGLTPLSMAKENWRKPVVLTTDDRKEVWKGKELHGRFFRALHEPDVDFSASVAWLRFSNLFGETEGFVCAIIDEVILTNNYRRHIMKDGTVDVCRACHRPGESIRHIISGCSRLANGEYLHRHNQVARILHQQLALKYNLVDSEVPYYRYVPDPVLENDHVTLYWDRSIITDRTIVANKPDIVVIDRLARRAMIVDVTIPHDENLVKAEKEKQIKYLDLAHEVVDMWNVDSAIIVPIVVTANGLIAKSFDDHLSKLSLHGWIRGLIQKAVLLDTARIVRRFLSLEP

SEQ ID NO: 28479 - protein, 1081 aa, Mythimna ferrago
MLSLFQDLEPTVNVSAQRLSDQVRVIQRNHRLDDAALDRLRSQVLSNPIVSTPQQIQTVGPSTSVTTTSRYDHVEDEADDRVDRVSSQCNDRLRSALEDALREYRSTPTELRPRLPRLPMHKKNRALVCALDSLLKNVFESSDSLLDTHSILYCGAVAACRLANVKFPCYGVATRPTPAAPAWQCRIERRIDEARALIGKLYCFREGNTRPRVMRFVRRAFSGTEISPREYMSRVTERIDFLKQKVCAWANRIRRYKRRVDRYSQNRMFQSDERWVYRAWERPGQNVTDGFRPDRVATNTFWRSIWSEPVCHNEGGWMRDVERVCEAIPEMDKVFISPLDVARAVRPLPNWKSPGPDGLQNFWLKWYSSSHAILASQFQSSLESGSLPQILTTGTTHLLHKTGSTADPKNYRPITCLSTVYKLLTSILRVKITLHIEKNSIMFASQNGCRNGSRGTKELLLIDMAISQQVRRSRKDLSTCWIDYKKAYDSVPHTWLMKVLELYKIDATLRTFLESCMRQWKTVLRYPGCRPIQGNDEPIWIRRGIFQGDSLSPLWFCLALNPLSTLLEDSGLGYRLRRGGQVLSHLLYMDDLKLFAHNNSQLMELLKVTETFSSAIRMEFGVDKCAVMHVRRGEIVESEGIQLSDSIHLRSLSSTETYKYLGMSEALGINVADMKQTLKERFFGRLKKVLNSLLSGGNKVRAFNGWVMPVLMYSFGILKWTQTELDALDRRVRTLLTANRMHHPRSSVMRLYIPRKCGGRGFLNAKTLHNREVCSLREYFLKTDVGMHRDVVAVDKGLTPLSMAKENWRKPVVLTTDDRKEVWKGKELHGRFFRALHEPDVDFSASVAWLRFSNLFGETEGFVCAIMDEVILTNNYRRHIMKDGTVDVCRACHRPGESIRHIISGCSRLANGEYLHRHNQVARILHQQLALKYNLVDSEVPYYRYVPDPVLENDHVTLYWDRSIITDRTIVANKPDIVVIDRLARRAMIVDVTIPHDENLVKAEKEKQIKYLDLAHEVVDMWNVDSAIIVPIVVTANGLIAKSFDDHLSKLSLHGWIKGLIQKAVLLDTARIVRRFLSLEP

SEQ ID NO: 28480 - protein, 1200 aa, Mythimna ferrago
MLTRTAARRARHPPPGSSLSSASPPPDPGSPVSPAAAVASSSSDEYFSPPTSPTPVRRPGRGRPPKSMGPRGQPAPSRVPAAGGCVQRMRWTQSMNENVMRAYYGSTEGGTNLTAYRERMLSLFQVLEPTVNVSAQRLSDQVRVIQRNHRLDDAALDRLRSEILSNQIVSTSTQTQTAATPTTNAISPRSDHNNDDADDRVVTVSSQCNERLRSALEDALCEYMSTPTELRPRLPRLPMHKKNRALVCALDSLLKNIFESSENLVDTHSILYCGAVAACRLAKIKFPNIDGTIRPKTAVPAWQCRIERRIDEARVLIGKLHCFREGNTRPRVMRFVRRAFLGTGISPQGYMSRVTERIDFLKQKVCAWASRIRRYKRRVDRYSQNRMFQSDERWVYRAWERPEHSVIDECRPDDLATITFWRNIWSVPVSHTEGGWMRDVERVCEAIPEMEKVTITPEDVAKAVRPLPNWKSPGPDGLQNFWLKWYSSSHAPLASQFQSILESGSLPEYLTTGVTHLLHKTGNPVDPKNYRPITCLSTVYKLLTSILRAKINIHIENNQIISPSQNGCRNGSRGTKELLLIDMAISQQTRRSRKDLSTCWIDYKKAYDSVPHTWLMRVLELYKIDITLRTFLESCMRQWKTVLRYPGCRPIQGNDEPIWIKRGIFQGDSLSPLWFCLALNPLSTLLEDSGLGYRLRRGGQVISHLLYMDDLKLFAPSNLQLMELLKVTETFSSAIRMEFGVDKCAGMHVKRGEIMESEGIQLPDSIHLRSLSSTETYRYLGMSEALGINNADMKQSLKERFFGRLKKVLNSLLSGGNKVRAFNGWVMPVLMYSFGILKWTQTELDALDRRVRTLLTANRMHHPRSSVMRLYIPRKCGGRGFLNAKTLHNREVCSLREYFLKTDVGMHRDVVAVDKGLTPLSMAKEDWHKPVIMTTDNRKEIWKGKELHGRFFRALHEPDVDFLASVAWLRFSDLFGETEGFVCAIMDEVILTNNYRRYIMKDGTVDVCRACHRPGESIRHIISGCSRLANGEYLHRHNQVARIIHQQLALKYNLVDLEVPYYKYVPDPVLENDHVTLYWDRSIITDRTIVANKPDIVVIDRSARRAMIVDITIPHDENLVKAEKEKQIKYLDLAHEIVAMWNVDSAIIVPIVVTANGLIAKSFDDHLSKLSLRGWIKGQIQKAVLLDTARIVRKFLSLEP

SEQ ID NO: 28481 - protein, 1081 aa, Mythimna ferrago
MLSLFQVLEPTVNVSAQRLSDQVRVIQRNHRLDDAALDRLRSEILSNQIISISTQTQTAATPTTNAISPRSDHNNDDADDRVVTVSSQCNERLRSALEDALCEYMSTPTELRPRLPRLPMHKKNRALVCALDSLLKTIFESSENLVDTHSILYCGAVAACRLAKIKFPNIDGTIRPKTAVPAWQCRIERRIDEARVLIGKLHCFREGNTRPRVMRFVRRAFLGTGISPQGYMSRVTERIDFLKQKVCAWASRIRRYKRRVDRYSQNRMFQSDERWVYRAWERPEHSVIDECRPDDLATITFWRNIWSVPVSHTEGDWMRDVERVCEAIPEMEKVTITPEDVAKAVRPLPNWKSPGPDGLQNFWLKWYSSSHAPLASQFQSILESGSLPEYLTTGVTHLLHKTGNPVDPKNYRPITCLSTVYKLLTSILRAKINIHIENNQIISPSQNGCRNGSRGTKELLLIDMAISQQTRRSRKDLSTCWIDYKKAYDSVPHTWLMRVLELYKIDITLRTFLESCMRQWKTVLRYPGCRPIQGNDEPIWIKRGIFQGDSLSPLWFCLALNPLSTLLEDSGLGYRLRRGGQVISHLLYMDDLKLFAPNKLRLMELLKVTENFSSAIRMEFGVDKCAVMHVKRGEIMESEGVQLSDSIHLRSLSSTETYKYLGMSEALGINVTDMKQSLKERFVGRLKKVLNSLLSGGNKVRAFNGWVMPVLMYSFGILKWTQTELDALDRRVRTLLTANRMHHPRSSVMRLYIPRKCGGRGFLNAKTLHNREVCSLREYFLKTDVGMHRDVVAVDKGLTPLSMAKENWRKPVVLTTDDRKEVWKGKELHGRFFRALHEPDVDFSASVAWLRFSNLFGETEGFVCAIMDEVILTNNYRRHIMKDGTIDVCRACHRPGESIRHIISGCSRLANGEYLHRHNQVARILHQQLALKYNLVDSEVPYYRYVPGPVLENDHVTLYWDRSIITDRTIVANKPDIVVIDRLARRAMIVDVTIPHDENLVKAEKEKQIKYLDLAHEVVDMWNVDSAIIVPIVVTANGLIAKSFDDHLSKLSLHGWIKGLIQKAVLLDTARIVRRFLSLEP

SEQ ID NO: 28482 - protein, 1201 aa, Hydraecia micacea
MLTRLAAKRARITPPDSSLSSASPPPEPSPIESAVTPTVAVASSSSDEYFSPPTSPTPVRRQGRGRPPRSLGLRGQPAPSRVPATGGCVQRMRWTQSMNENVMRAYYGSTEGGTNLTAYRDRMLSLFQELEPTVNVSAQRLSDQVRVIQRNHRLDDIALDRLRSEVLSNHIVSTPVQTAAQTSTVDAIPPRSNHVEEEDDRVDTVSSQCNVRLRSALEDAFHEYRLTPTELRPRLPRLPMHKKNRALVCALNSQLKNFFENSEDLVDTHSILYCAAVAACRLANVKFPICDGATRPKPAVPAWQHRIERRIDGARVLIGKLYCFREGNTRPRVMRFVKRAFSGTGISPREYISHVTERIDFLKQKVCAWASRIRRYKWRIDRYTQNRMFQSDERWVYRAWERPEQNKTDVCRPDDAATSAFWRSIWSVPVCHTEAGWIQDVERVCETVPEMETVLITPLDVARAVRPLPNWKSPGPDGLHNFWLKWLNSSHTCLASQFQSSLESGSLPQFLTTGVTHLLHKSGSPAEPKNYRPITCLSTVYKLLTSILRAKINTHIENNSIMSASQNGCRNGSRGTKELLLIDMAISQQVRRSRKDLSICWIDYKKAYDSVPHTWLMRVLELYKIDATLRTFLESCMGQWKTVLRYPGCRQIQGNDEPVWIKRGIFQGDSLSPLWFCLALNPLSTLLEDSGLGYRLRRGGQVISHLLYMDDLKLFAPTRLHLMELLKVTETFSSAIRMEFGVDKCAVMHVKRGEIMESEGIQLSDSINLRSLSSSESYKYLGMSEALGINVTDMKQSLKERFFCRLSKVLISLLSGGNKVRAFNGWVMPVLMYSFGILKWTQTELDALDRRVRTLLTANRMHHPRSSVMRLYIPRKCGGRGFLNAKTLHNREVCSLREYFLKAEVGMHRDVVAVDKGLTPLSMAKENWRKPVVLTTDDRKKVWQSKELHGRFYRALHEPGVDFLASVSWLRFGDLFGETEGFVCAIMDEVILTNNYRRHIMKDGTVDVCRACHRPGESIRHIISGCSRLANGEYLHRHNQVARIIHQQLALKYKLVDSEVPYYKYVPDPVLENDHVTLYWDRSIITDRTIVANKPDIVVIDRLARRTMIVDVTIPHDGNLVKAEKEKQMKYLDLAHEVVDMWNVSSAVIVPIVVSANGLMAEGLDEHLSRLSLGGWIKSLIQKAVLLDMARIVRRFLSLEP

SEQ ID NO: 28483 - protein, 1202 aa, Noctua pronuba
MLTRAAARRARLSPPDSSLSSASPLPESSPIVSAVTPAVAVASSSSDEYFSPPTSPTPVRRQGRGRPPTSLGLRGHPAPSRVPATGGCVQRMRWTHPINENVMRAYYGFTEGGTNLTAYRVRMLSLFQVLEPTVNVSAQRLSDQVRVIQRNHMLDDAVLDRLRSEVLSNRIVLTPSQTVVQTTAIDVSPPRSNPAIVEEDDRVATVSSQCNDRLRSALEDALREYRYTPTELRPRLPRLPMHKKNRALVCALDSQLKNLFESSEDLVDTHSILYCGAVAACRLAKLKFTNSDAATRPKPAVPAWQCRIERRIDGARVLIGKLHCFREGNTRPRVMRFVRRAFSGTGISPQEYMSRVTERIDFLKQKVYAWANRIRRYKRRVDRYSQNRMFQSDERWVYRAWERPEQNMTDVCRPDDATTSSFWSSIWSVPVCHTEGDWMRAVERVCEPIPEMEPILITSLDVARSVRPLPNWKSPGPDGLHNFWLKWLSSSHTCLASQFQSSLESGALPQFLTTGVTHLLHKSGNPAEPKNYRPITCLSTVYKLLTSILRAKINTHIDKNSIMSASQNGCRNGSRGTKELLLIDMAISQQVRRSRKDLSTCWIDYKKAYDSVPHTWLMRVLELYKIDATLRTFLESCMGQWRTVLRYPGCRQIQGNDEPVWIKRGIFQGDSLSPLWFCLALNPLSTLLEDSGLGYRLRRGGQVISHLLYMDDLKLFAPNKLRLMELLKVTETFSSAIRMEFGVDKCAVMYVKRGEIMESEGIQLSDSIHLRSLSSSESYKYLGMSEALGINVTDMKQSLRERFFGRLKKVVNSLLSGGNKVRAFNGWVMPVLMYSFGILKWTQTELDALDRRVRTLLTANRMHHPRSSVMRLYIPRKCGGRGFLNAKTLHNRELCSLREYFLKAEVGMHRDVVAVDKGLTPLSMAKENWRKPVVLTTDDRKEVWQGKELHGRFYRALHGPDVDFLASVSWLRFGDLFGETEGFVCAIMDEVMLTNNYRKYIMKDGTVDVCRACHRPGESIRHIISGCSRLANGEYLHRHNQVARIIHQQLALKYKLVESEVPYYKYVPDPVLEKDHVTLYWDRSIITDRTIVANKPDIVVIDRSARRVMIVDVTIPHDENLVKAEKEKQIKYLDLAHEVVDMWNVDSAIIVPIVVTANGLMAKSLDDHLSRLSLGGWIKGLIQKAVLLDTARIVRRFLSLEP

SEQ ID NO: 28484 - protein, 1207 aa, Ochropleura plecta
MLTRRRAQEQQALPSSPGSSLSSASQPPGRATRVSAVSPVAAVASSSSDEFFSPPSSPPPPPTRQRRGRGRPPAGLGSRGQQAPIRVPAAGGNVSRMRWTSFINANVMRAYYGSTEGGTNLTAYRVRMLSLFQDLEPTINVSAQRLSDQVRVIQRNHLLDDAALDRLRSEVLSNRVILTTPQTAVQASAIDVTQPRSNPAVVEEDDRVATVSSQCNDRLRSALEDALRDYRSTPAELRPRLPRLPMHKKNRALVCALDSQLKNLFESSEDLVDTHSILYCGAVAVCRLANVKFPNCDVATRPKPSVPAWQCRIERRIDEARALIGKLYCFREGNTRPRVMRFVRRAFSGTGISPQEYMSRTTERIDFLKQKVYAWANRIQRYKRRVDRYSQNRMFRSDERWVYRAWERPEQSVTDVCRPDDVATSSFWHSIWSVRVCHTEAGWMRDVERVCETIPEMEPILITSLDIASAVRPLPNWKSPGPDGLHNFWLKWLSSSHTRLASQFQSCLESGSLPQFLTTGVTHLLYKSGSPAEPKNYRPITCLSTVYKLLTSILRAKINSHIVKNSIISASQNGCRNGSRGTKELLLIDMAISQQVRRSRKDLSTCWIDYKKAYDSVPHTWLKRVLELYKIDTTLRTFLESCMGQWRTVLRYPGCRQIQGNDEPVWIKRGIFQGDSLSPLWFCLALNPLSTLLEDSGLGYRLRRGGQVISHLFYMDDLKLFAPNKLRLMELLKVTETFSNAIRMEFGVDKCAVMYVKRGEIMESEGIHLSDSIHLRSLSSSESYKYLGMSEALGINVADMKQLLRERFFGRLKKVLKSLLSGGNKVRAFNSWVMPVLMYSFGILKWTQTELDALDRRVRTLLTANRMHHPRSSVMRLYIPRKCGGRGFLNAKTLHNREVCSLREYFLKTDVGMHRDVVAVDKGLTPLSMAKENWRKPVVLTTDYRKEVWQGKELHGRFYKALHGPDVDFLASVSWLRFGDLFGETEGFVCAIMDEVMLTNNYRKYIMKDGTVDVCRACHRPGESIRHIISGCSRLANGEYLHRHNQVARIIHQQLALKYNLVESEVPYYKYVPDPVLEKDHVTLYWDRSIITDRTIVANKPDIVVIDRSARRVMIIDVTIPHDENLVKAEKEKQLKYLDLAHEVVDMWNVNSAIIVPIVITANGLIAKSLDEHLSKLSLGGWIKGLIQKAVLLNTARIVRRFLSLEP

SEQ ID NO: 28485 - protein, 1174 aa, Ochropleura plecta
MLTRRRAQEQKALPPFPGSPLSSASQPPGRATRVSAVSPVAAVASSSSDEFFSPPSSPPPPTRQRRGRGRPPAGLGSRSQQAPIRVPAVGGNVSRMRWTSSINANVMRAYYGSTEGGTNLTAYRVRMLSLFQDLEPTINVSAQRLSDQVRVIQRNHMLDDAALDRLRSEVLSNRIILTTPQTAMQASVIDGMQPRSDPAVVEEDDRVATVSSQCNERLRSALEDALRDYRSTPAELRPRLPRLPMHKKNRALVCALDSQLKNLFESSEDLVDTHSILYCGAVAVCRLANVKFPSCDVATRPKPSVPAWQCRIERRIDEARVLIGKLYCFREGNTRPRVMRFVRRAFSGTGISPQEYMSRTTERIDFLKQKVYAWANRIRRYKRRVDRYSQNRMFRSDERWVYRAWERPEQSVTDVCRPDDVATSSFWHSIWSVPVCHTEADWMRDVERVCETIPEMEPILITSLDIASAVRPLPNWKSPGPDGLHNFWLKWLSSSHTRLASQFQSCLESGSLPQFLTTGVTHLLYKSGSPAEPKNYRPITCLSTVYKVLTSILRAKINSHIDNNSIMSASQNGCRNGSRGTKELLLIDMAISQQVRRSRKDLSTCWIDYKKAYDSVPHTWLKRVLELYKIDATLRAFLESCMGQWRTVLRYPGCRQIQGNDEPVWIKRGIFQGDSLSPLWFCLALNPLSTLLEDSGLGYRLRRGGQVISHLLYMDDLKLFAPNKLRLMELLKVTETFSNAIRMEFGLDKCAVMYVKRGEIMESEGIQLSDSIHLRSLSSSESYKYLGMSEALGINVADMKQLLRERFFGRLKKVLKSLLSGGNKVRAFNSWVMPVIMYSFGILKWTQTELDALDRRVRTLLTGNRMHHPRSSVMRLYIPRKCGGRGFLNAKTLHNREVCSLREYFLKTDVGMHRDVVAVDKGLTPLSMAKENWRKPVVLTTDDRKVVWQGKELHGRFYKALHGPDVDFLASVSWLRFGDLFGETEGFVCAIMDEVMLTNNYRKYIMKDGTVDVCRACHRPGESIRHIISGCSRLANSEYLHRHNQVARIIHQQLALKYNLVESEVPYYKYVPDPVLEKDHVTLYWDRSIITDRTIVANKPDIVVIDRSTRRVMIIDVTIPHDENLVKAEKEKQLKYLDLAHEVVDMWNVNSFFFFFFFFFFFIIDRLAFDHYLT

SEQ ID NO: 28486 - protein, 1207 aa, Ochropleura plecta
MLTRRRAQEQQALPSSPGSSLSSASQPPGRATRVSAVSPVAAVASSSSDEFFSPPSSPPPPPTRQRRGRGRPPAGLGSRGQQAPIRVPAAGGNVSRMRWTSFINANVMRAYYGSTEGGTNLTAYRVRMLSLFQDLEPTINVSAQRLSDQVRVIQRNHLLDDAALDRLRSEVLSNRVILTTPQTAVQASAIDVTQPRSNPAVVEEDDRVATVSSQCNDRLRSALEDALRDYRSTPAELRPRLPRLPMHKKNRALVCALDSQLKNLFESSEDLVDTHSILYCGAVAVCRLANVKFPNCDVATRPKPSVPAWQCRIERRIDEARALIGKLYCFREGNTRPRVMRFVRRAFSGTGISPQEYMSRTTERIDFLKQKVYAWANRIQRYKRRVDRYSQNRMFRSDERWVYRAWERPEQSVTDVCRPDDVATSSFWHSIWSVRVCHTEAGWMRDVERVCETIPEMEPILITSLDIASAVRPLPNWKSPGPDGLHNFWLKWLSSSHTRLASQFQSCLESGSLPQFLTTGVTHLLYKSGSPAEPKNYRPITCLSTVYKLLTSILRAKINSHIVKNSIISASQNGCRNGSRGTKELLLIDMAISQQVRRSRKDLSTCWIDYKKAYDSVPHTWLKRVLELYKIDTTLRTFLESCMGQWRTVLRYPVCRQIQGNDEPVWIKRGIFQGDSLSPLWFCLALNPLSTLLEDSGLGYRLRRGGQVISHLFYMDDLKLFAPNKLRLMELLKVTETFSNAIRMEFGVDKCAVMYVKRGEIMESEGIHLSDSIHLRSLSSSESYKYLGMSEALGINVADMKQLLRERFFGRLKKVLKSLLSGGNKVRAFNSWVMPVLMYSFGILKWTQTELDALDRRVRTLLTANRMHHPRSSVMRLYIPRKCGGRGFLNAKTLHNREVCSLREYFLKTDVGMHRDVVAVDKGLTPLSMAKENWRKPVVLTTDYRKEVWQGKELHGRFYKALHGSDVDFLASVSWLRFGDLFGETEGFVCAIMDEVMLTNNYRKYIMKDGTVDVCRACHRPGESIRHIISGCSRLANGEYLHRHNQVARIIHQQLALKYNLVESEVPYYKYVPDPVLEKDHVTLYWDRSIITDRTIVANKPDIVVIDRSARRVMIIDVTIPHDENLVKAEKEKQLKYLDLAHEVVDMWNVNSAIIVPIVITANGLIAKSLDEHLSKLSLGGWIKGLIQKAVLLNTARIVRRFLSLEP

SEQ ID NO: 28487 - protein, 1199 aa, Hecatera dysodea
MLTRAATLRARHPPPGSPLSSASPPPDIESQVSPAVAVASSSSDEYFSPPTSPPPVRRQGRGRPPRGLGPRGQPAPSRVPATGGCVQRMRWTQSMNENVMRAYYGSTEGGINLTAYRVRMLSLFQDLEPTVNVSAQRLSDQVRVIQRSHRLDEAALDRLRSEVLNNLIISTPTQTAVQAPGSGAIIPRPIHVCDEVVDRVVTVSSQCNDRLRSALEDALREYRSTPTELRPRLPRLPMHKKNRALVCALDSLLKNIFESSENLVDTHSILYCGAVAACRVANVKFSNSDGATRPKNAAPAWQCRIERRIDEARVLIGKLYCFREGNTRPRVMRFVRRAFLGTEISPQEYMSRVTERIDFLKQKVCAWANRIRRYKRRVDRYSQNRMFQSDERWVYRAWERPEQSVTDVCRPDDVTTNTFWRSIWSVPVCHAEGGWMRDVERVCEAIPQMEKITITTVDIATAVRPLPNWKSPGPDGLHNFWLKWYSSSHALLASQFQSSLDSGSLPQFLTTGITHLLHKTGSPAEPKNYRPITCLSTVYKLLTSILRVKINEHIESNSIMSYSQNGCRKGSRGTKELLLIDMAISQQVRRSRKDLSTCWIDYKKAYDSVPHTWLLKVLELYKVDATLRTFLESCMRQWKTVLRYPGCRPIQGNEEPVWIKRGIFQGDSLSPLWFCLALNPLSTLLEDSGLGYRLRRGGQTISHLLYMDDLKLFAPNNLRLMELLKVTETFSSAIRMEFGVDKCAVMHVKKGEIMESEGIQLSDSIQVRSLSSTETYKYLGMSEALGINGADMKQSLKERFFGRLKKVLNSLLSGGNKVRAFNGWVMPVLMYSFGILKWTQTELDALDRRVRTLLTANRMHHPRSSVMRLYIPRKCGGRGFLNAKTLHNREMCSLREYFLKADVGMHRDVVAVDKGFTPLSMAKENWRKPVIPTTDDRREVWRGKELHGRFYRALYGSDVDFSASVAWLRFGDLFGETEGFVCAIMDEVILTNNYRRHIMKDGTVDVCRACHRPGESIRHIISGCSRLANGEYLHRHNQVARIIHQQLALKYKLVDSEVPYYKYVPDPVLENDHATLYWDRSIITDRTIIANKPDIVVIDRLARRTMIIDVTIPHDENLVKAEKEKQIKYLDLAHEVVGMWNVDSAVIVPIVVTANGLMAKSFDEHLSKLALHGWLKGLIQKAVLLDTARIVRRFLSLEP

SEQ ID NO: 28488 - protein, 868 aa, Mythimna impura
MRYVRRAFSGTGISPPEYLSRVTERIDFLKQKVCAWANRIRRYKRRVDRYSQNRMFQSDERWVYRAWERPEQNVTDVTRPDAVATNAFWRNIWSVFVCHTEDGWMREVERVCEAIPEMEKVIISPTDVARAVRPLPNWKSPGPDGLQNFWLKWYSSSHALLASQFQSSLESGSLPQFLTTGVTHLLHKTGSTAEPKNYRPITCLSTVYKLLTSILRTKINQHIDNNSIMSASQNGCRNGSRGTKELLLIDMTISQQVRRSRKDLSTCWIDYKKAYDSVPHTWLMRVLELYKIDATLRTFLESCMGQWNTVLRYPGCRSIRRDDEPIWIKRGIFQGDSLSPLWFCLALNPLSTLLEESGLGYRLRRDGQVLSHLLYMDDLKLIAPNKLRLMELLKVTETFSSAIRMEFGVDKCAVMHVKRGEIMESEGIQLSDSIHLRSLSSTETYKYLGMSEALGINVADMKQSLKERFFGRLKKVLNSLLSGGNKVRAFNGWVMPVLMYSFGILKWTQTELDALDRRVRTLLTANRMHHPRSSVMRLYIPRKCGGRGFLNTKTLHNREVCSLREYFHKTDVGMHRDVVAVDKGLTPLSMAKENWRKPVVLTTDDRKEVWKSKELHGRFYRALHESDVDFAASVAWLRFSNLFGETEGFICAIMDEVILTNNYRRYIMKDGTVDVCRACHRPGESIRHIISGCSRLANGEYLHRHNQVARIIHQQLALKYNLVYSEVPYYRYVPDPVLENDHVTLYWDRSIITDRTIVANKPDIVVIDRLARRAMIVDVTIPHDENLVKAEKEKQIKYLDLAHEVVDMWNVDSAVIVPIVVTANGLIAKSFDDHLSKLSLRGWIKGLIQKAVLLDTARIVRRFLSLEP

SEQ ID NO: 28489 - protein, 970 aa, Xestia xanthographa
MFLFISPEIVYNNRALVCALDSQLKNIFESSENLVDTHSILFCGAVAACRIANVKFPNCDVATRPKPAVPAWQRRIERRIDGARVLIGKLYCFREGNTRPRVMRFVRRAFSGTEISPQEYMSRATERIDFLKQKVYAWANRIRRYKRRVDRYSQNRMFQSDERWVYRAWERPEQNMTDVCRPDDAAMSSFWRSIWSVPVCHTEADWMRDVERVCEPIPEMEPIFITPVDVARAVRPLPNWKSPGPDGLHNFWLKWFSSSHTCLASQFQSSLESGSLPQFLTTGVTHLLHKSGSPAVPKNYRPITCLSTIYKLLTSILRVKINTHIDKNSIMSASQNGCRNGSRGTKELLLIDMAISQQVRRSRKDLSTCWIDYKKAYDSVPHTWLMRVLELYKVDTTLRTFLESCMGQWKTVLRYPGCRQIQGSDEPVWIKRGIFQGDSLSPLWFCLALNPLSTLLENSGLGCRLRKDGQVISHLLYMDDLKLFAPNKLRLMELLKVTETFSSAIRMEFGVDKCAVMYVKRGEIMESEGLQLSDSIHLKSLSSSETYKYLGMSEALGINVTDMKQSLRERFFGRLRKVLNSLLSGGNKVRAFNGWVMPVLMYSFGILKWTQTELDALDRRVRTLLTESRMHHPRSSVMRLYIPRKCGGRGFLNAKTLHNREVCSLREYFLKAEVGMHRDVVAVDKGLTPLSMAKENWHRPEVLTTDDRKEVWQGKVLHGRFYRALHGPDVDFIASVSWLRFGDLFGETEGFVCAIMDEVMLTNNYRKYIMKDGTVDVCRACHLPGESIRHIISGCSRLANGEYLHRHNQVARIIHQQLALKYKLVESEVPYYKYVPDPVLENDHVTLYWDRSIITDRTIVANKPDIVMMDRSARRVMIIDVTIPHDENLVKAEKEKQIKYLDLAHEVRGMWNMNSVIIVPIVVSANGLIAKSFDDHLSKLSLGGWIKGLIQKAVLLDTARIVRRFLSLQP

SEQ ID NO: 28490 - protein, 1199 aa, Xestia xanthographa
MLTRAAARRARLPSPESSLSSASPPPDPGSPVSPVAAVASSSSDEYFSPPTLPPPVRRAGRGRPPTSLGLRGQQAPSRVPATGGCVQRMKWTQSINENVMRAYYGSTEGGTNLTAYRVRMLSLFQDLEPTVNVSAQRLSDQVRVIQRNHRLDDAALDRLRSEVLSNLIILTPTQTAVHTSVNNVTLPRSNPDVVEEDDRVATVSSQCNYRLRSALEDAFREYRSTPTELRPRLPRLPMHKKNRALVCALDSQLKNIFESSENLVDTHSILFCGAVAACRLANVKFPNCDVATRPKPAVPAWQCRIERRIDEARVLIGKLYCFREGNTRPRVMRFVRRAFSGTEISPQEYMSRVTERIDFLKQKVYAWANRIRWYKRRVDRYSQNRMFQSDERWVYRAWERPEQNMTDVCRPDDAATSSFWRSIWSVPVCHTESDWMRDVERVCEPIPEMEPILITPLDIAKAVRPLPNWKSPGPDGLHNFWLKWFSSSHTCLASQFQSSLESGSLPQFLTTGVTHLLHKSGSPADPKNYRPITCLSTIYKLLTSILRVKINTHIDKNSIMSASQNGCRNGSRGTKELLLIDMAISQQVRRSRKDLSTCWIDYKKAYDSVPHTWLMRVLELYKIDTTLRAFLESCMGQWKTALRYPGCRQIQGSDEPVWIKRGIFQGDSLSPLWFCLALNPLSILLENSGLGYRLRKDSQVISHLLYMDDLKLFAPNKLRLMELLKVTETFSSAIRMEFGVDKCAVMYVKRGEIMESEGLQLSDSIHLRSLSSSETYKYLGMSEALGINVTDMKQSLKERFFGRLRKVLNSLLSGGNKVRAFNGWVMPVLMYSFGILKWTQTELDALDRRVRTLLTETRMHHPRSSVMRLYIPRKSGGRGFLNAKTLHNREVCSLREYFLKAEVGMHRDVVAVDKGLTPLSMAKENWHKPEVLTTDDRKEVWQGKELHGRFYRALHGPDVDFLASVFWLRFGDLFGETEGFVCAIMDEVMLTNNYRKYIMKDGTVDVCRACHLPGKSIRHIISGCSRLANGEYLHRHNQVARIIHQQLALKYKLVESEVPYYKYVPDPVLEKDHVTLYWDRSIITDRTIVANKPDIVMIDRSARRVMIIDVTIPHDENLVKAEKEKQIKYLDLAHEVRDMWNMNSVIIVPIVVTANGLIAKSFDDHISKLSLGGWIKGLIQKAVLLDTARIVRRFLSLQP

SEQ ID NO: 28491 - protein, 1142 aa, Mamestra brassicae
MITRAAARRAHPPPPGSSLSSASPTPDIGSQVSPVVAVASSSSDEYFSPPTSPTPVRRQGSGRPPRSLGSRGQPALSRVPAAGGCVQRMRWTQSMNENVMRAYYGSTEGVTNLTAYRVRMLSLFQDLEPTVNVSAQRLSDQVRVIQHNCRLDDAALERLRSEVLSNLIISTPTQTVVQAPASGAITPRPNNGSDEVDDRVVTVSSQCNDRLRSALEDALREYRLTPTELRPRLPRLPMHKKNRALVCALDSLLQNIFESSESLVDTHSILFCGAVAACRIANVKFPSCDEAIRPKPAAPAWQCRIERRIDEARALIGKLYCFREGNTRPRVMRFVRRAFSGTGISPREYTFRVTERIDFLKQKVCAWANRIRWYKRRVDRYSQNRMFQSDERWVYRAWERPEQSVTDVYRPDDVATSTFWRSIWSVPICHAEGGWMRDVERVCETIPQMEKITITTLDIAKAVRPLPNWKSPGPDGLHNFWLKWYSSSHALLASQFQSSLESGSLPQFLTTGITHLLHKTGSPAEPKNYRPITCLSTVYKLLTSILRAKINEHIESNSIMSASQNGCRKGSRGTKELLLIDMAISQQVRRSRKDLSTCWIDYKKAYDSVPHTWLMKVLELYKIDATLRTFLESCMRQWKTVLRYPGCQPIQGSDEPVWIKRGIFQGDSLSPLWFCLALNPLSTLLEDSGLGYRLRRGGQAISHLLYMDDLKLFAPNNLRLMELLKVTETFSSAIRMEFGVDKCAVMHVKKGEIMESEGIQLSDSIQVRSLSSTESYKYLGMSEALGINGTDMKQSLRERFFGRLKKVLNSLLSGGNKVRAFNGWVMPVLMYTFGILKWTQTELDALDRRVRTLLTANRIHHPRSSVMRLYIPRKCGGRGFLNAKTLHNREMCSLREYFLKADVGMHRDVVAVDKGLTPLSMAKENWRKPVILTTDDRKEVWKGKELHGRFYRALYGSDVDFSASVAWLRFGDLFGETEGFVCAIMDEVILTNNYRKHIMKDGTVDVCRACHRPGESIRHIISGCSRLANGEYLHRHNQVARIIHQQPALKYKLVDSEVPYYKYVPDPVLENDHVTLYWDRSIITDRTIVANKPDIVVIDRLARRTMIIDVTIPHDENLVKAEKEKQIKYLDLAHEVVDMWPC

SEQ ID NO: 28492 - protein, 1199 aa, Mamestra brassicae
MLTRAALQRARPPPPDPSLSSASPPPDIGSPLSPAVAVASSSSDEYFSPPTSPTPVRRQGRGRPPRGLGPRGQPAPSRVPATGGCVQRMRWTQSMNENVMRAYYGSTEGGTNLTAYRVRMLSLFQDLEPTVNVSAQRLSDQVRVIQRNHRLDDAALDRLRSEVMSNLIISTPTQTAVQAPVNGSITPRPNNVSDEVDDRVVTVSSQCNDRLRSALEDALREYRSTPTELRPRLPRLPMHKKNRALVCALDSLLQNIFESSESLVDTHSILYCGAVAACRIANVKFPGCDEAIRPKPAAPAWQRRIERRIDETRALIGKLYCFREGNTRPRVMRFVRRAFSGTEISPRDFTSRVTERIDFLKQKVCAWASRIRRYKRWVDRYSQNRMFQSDERWVYRAWERPEQSVTDVCRPDDVATSIFWRSIWSVPICHAEGGWMRDVERVCEAIPQMEKITITTLDVAKAVRPLPNWKSPGPDGLHNFWLKWYSSSHALLASQFQSSLDSGSLPQFLTTGVTHLLHKTGSPTEPKNYRPITCLSTVYKLLTSILRAKINEHIESNSIMSASQNGCRKGSRGTKELLLIDMTISQQVRRSRKDLSTCWIDYKKAYDSVPHTWLMKVLELYKIDATLRTFLESCMRQWKTVLRYPGCRPIQGSDEPVWIKRGIFQGDSLSPLWFCLALNPLSTLLEDSGLGYRLRRGGQAISHLLYMDDLKLFAPNNLRLMELLKVTETFSSAIRIEFGVDKCAVMHVKKGEIMESEGIHLSDSIQVRSLSSTETYKYLGMLEALGINGTDMKQSLRERFFGRLKKVLNSLLSGGNKVRAFNGWVMPVLMYTFGILKWTQTELDALDRRVRTLLTANRMHHPRSSVMRLYIPRKCGGRGFLNAKTLHNREMCSLREYFLKADVGMHRDVVAVDKGLTPLSMAKENWRTPVILTTDDRKEVWKGKELHGRFYRALHGSDVDFSASVAWLRFGDLFGETEGFVCAIMDKIILTNNYRRHIMKDGTVDMCRACHRPGESIRHIISGCSRLANGEYLHRHNQVASIIHQQLALKYNLVDSEVPYYKYVPDPVLENDHVTLYWDRSIITDRTIVANKPDIVVIDRLARRTMIIDVTIPHDENLVKAEKEKQIKYLDLAHEVVDMWNVESAVIVPIVVTANGLMAKSFDDHLSKLALRSWVKGLIQKAVLLDTARIVRRFLSLEP

SEQ ID NO: 28493 - protein, 1199 aa, Mamestra brassicae
MLTRAALQRARPPPPDPSLSSASPPPDIGSPLSPAVAVASSSSDEYFSPPTSPTPVRRQGRGRPPRGLGPRGQPAPSRVPATGGCVQRMRWTQSMNENVMRAYYGSTEGGTNLTAYRVRMLSLFQDLEPTVNVSAQRLSDQVRVIQRNHRLDDAALDRLRSEVLNNLIISTPTQTAVQAPVNGSITPRPNNVSDEVDDRVVTVSSQCNDRLRSALEDALREYRSTPTELRPRLPRLPMHKKNRALVCALDSLLQNIFESSESLVDTHSILYCGAVAACRIANVKFPGCDEAIRPKPAAPAWQRRIERRIDETRALIGKLYCFREGNTRPRVMRFVRRAFSGTEISPRDFTSRVTERIDFLKQKVCAWASRIRRYKRRVDRYSQNRMFQSDERWVYRAWERPEQSLTDVCRPDDVATSIFWRSIWSVPICHAEGGWMRDVERVCEAIPQMEKITITTLDVAKAVRPLPNWKSPGPDGLHNFWLKWYSSSHALLASQFQSSLDSGSLPQFLTTGVTHLLHKTGSPTEPKNYRPITCLSTVYKLLTSILRAKINEHIESNSIMSASQNGCRKGSRGTKELLLIDMTISQQVRRSRKDLSTCWIDYKKAYDSVPHTWLMKVLELYKIDATLRTFLESCMRQWKTVLRYPGCRPIQGSDEPVWIKRGIFQGDSLSPLWFCLALNPLSTLLEDSGLGYRLRRGGQAISHLLYMDDLKLFAPNNLRLMELLKVTETFSSAIRMEFGVDKCAVMHVKKGEIMESEGIHLSDSIQVRSLSSTETYKYLGMLEALGINGTDMKQSLRERFFGRLKKVLNSLLSGGNKVRAFNGWVMPVLMYTFGILKWTQTELDALDRRVRTLLTANRMHHPRSSVMRLYIPRKCGGRGFLNAKTLHNREMCSLREYFLKADVGMHRDVVAVDKGLTPLSMAKENWRTPVILTTDDRKEVWKGKELHGRFYRALHGSDVDFSASVAWLRFGDLFGETEGFVCAIMDEVILTNNYRRHIMKDGTVDMCRACHRPGESIRHIISGCSRLANGEYLHRHNQVARIIHQQLALKYNLVDSEVPYYKYVPDPVLENDHVTLYWDRSIITDRTIVANKPDIVVIDRLARRTMIIDVTIPHDENLVKAEKEKQIKYLDLAHEVVDTWNVDSAVIVPIVVTANGLMAKSFDDHLSKLALRSWVKGLIQKAVLLDTARIVRRFLSLEP

SEQ ID NO: 28494 - protein, 1202 aa, Noctua fimbriata
MITRAASRRARLPPPDQSLSSASPPPEISPIVSAVTPAVAVASSSSDEYFSPPTSPTPVRRQGRGRPPRSLGLRGHPAPSRVPAAGGCVQRMRWTHSINENVMRAYYGSTEGGTNLTAYRVGMLSLFQVLEPTINVSAQRLSDQVRVIQRNHMLDDAVLDRLRSEVLSNRIVFTPAQTAVQASVIDATPPRFNPAVVEEDDRVAVVSSQCNDRLRSALEDALREYRSTSTELRPRLPRLPMHNKNRALVCALDSQLKNLFESSENLVDTHSILYCGAVAACRLANVKFPNCDVATRPKPAVPAWQRRIECRIDGARVLIGKLHCFREGNTRPRVMRFVRRAFSGTGISPQEYMSRVTERIDFLKQKVYAWANRIRRYKRRVDRYSQNRMFQSDERWVYRAWERPDQNMTDMCRPDDAATSSFWRSIWSVPVCHTEADWMRDVEQVCEPIPEMEPILITPLDVARAVRPLPNWKSPGPDGLHNFWLKWLSSSHTCLASQFQSSLESGSLPQFLTTGVTHLLHKSGSPAEPKNYRPITCLSTVYKLLTSILRAKINTHIDKNSIMSASQNGCRNGSRATKELLLIDMAISQQVRRSRKDLSTCWIDYKKAYDSVPHTWLMRVLELYKIDATLRAFLESCMGQWRTVLRYPGCRQIQGNDEPVWIKRGIFQGDSLSPLWFCLALNPLSTLLEDSGLGYRLRRGGQVISHLLYMDDLKLFAPNKLQLMELLKVTETFSSAIRMEFGVDKCAVMYVKQGEIMESEGIQLSDSIHLRTLSSTESYKYLGMSEALGINVTDMKQSLKERFFGRLNKVLHSLLSGGNKVRAFNGWVMPVLMYSFGVLKWTQTELDALDRRVRTLLTANRMHHPRSSVMRLYIPRKCGGRGFLNAKSLHNREMCSLREYFLKVEVGMHRDVVAVDKGLTPLSMAKENWRKPEVLTTDDRKEVWQGKELHGRFYRALHGPDVDFLASVSWLRFGDLFGETEGFVCAIMDEVMLTNNYRKYIMKDGTVDVCRACHRPGESIRHIISGCSRLANGEYLHRHNQVARIIHQQLALKYKLVESEVPYYKYVPDPVLEKDHVTLYWDQSIITDRTIVANKPDIVVIDRSARRVMIVDVTIPHDENLVKAEKEKQIKYLDLAHEVVDMWNVNSAIIVPIVVTANGLIAKSLDDHLSKLSLGGWIKGLIQKAVLLDTARIVRRFLSLEP

SEQ ID NO: 28495 - protein, 1199 aa, Noctua fimbriata
MITRAAYRRARLTTPDSPLSSASPPPDPGSPVLPAAAVASSSSDEYFSPPTSPTPVRRQGRGRPPRSLGLRGHPAPSRVPAAGGCVQRMRWTHSINENVMRAYYGSTEGGTNLTAYRVRMLSLFQVLEPTVNVSAQRLSDQVRVIQRNHMLDDAVLDRLRSEVLSNRVILTPAQTAVQASVVDATPPRFNPAVVEEDDRVAVVSNQCNDRLRSALEDALREYRSTPTELRPRLPRLPMHNKNRALVCALDSQLKNIFECSENLVDTHSILYCGAVAACRLANVKFPNCDVATRPKPAVPAWQYRIERRIDGARVLIGKLHCFREGNTRPRVMRFVRRAFSGTGISPQEYMSRVTERIDFLKQKVYAWANRIRRYKRRVDRYSQNRMFQSDERWVYRAWERPELNMTDVCRPDDAATSSFWRSIWSVPVCHTEADWMRDVERVCEPIPEMEPILITPLDIARAVRPLPNWKSPGPDGLHNFWLKWLSSSHTCLASQFQSSLESGSLPQFLTTGVTHLLHKSGSPAEPKNYRPITCLSTVYKLLTSILRAKINTHIDKNSIMSASQNGCRNGSRGTKELLLIDMAISQQVRRSRKDLSTCWIDYKKAYDSVPHTWLMRVLELYKIDATLRAFLESCMGQWRTVLRYPGCRQIQGNDEPVWIKRGIFQGDSLSPLWFCLALNPLGTLLEDSGLGYRLRRGGQVISHLLYMDDLKLFAPNKLQLMELLKVTENFSSAIRMEFGVDKCAVMYVKQGEIMESEGIQLSDSIHLRTLSSTESYKYLGMSEALGINVTDMKQSLKERFFGRLNKVLHSLLSGGNKVRAFNGWVMPVLMYSFGVLKWTQTELDALDRRVRTLLTANRMHHPRSSVMRLYIPRKCGGRGFLNAKSLHNREMCSLREYFFKVEVGMHRDVVAVDKGLTPLSMAKENWRKPEVLTTDDRKEVWQGKELHGRFYRALHGPDVDFLASVSWLRFGDLFGETEGFVCAIMDEVMLTNNYRKYIMKDGTVDVCRACHRPGESIRHIISGCSRLANGEYLHRHNQVARIIHQQLALKYKLVESEVPYYKYVPDPVLEKDHVTLYWDQSIITDRTIVANKPDIVVIDRSARRVMIVDVTIPHDENLVKAEKEKQIKYLDLAHEVVDMWNVNSAIIVPIVVTANGLIAKSLDDHLSKLSLGGWIKGLIQKAVLLDTARIVRRFLSLEP

SEQ ID NO: 28496 - protein, 1050 aa, Noctua fimbriata
MLDDAVLDRLRSEVLSNRVILTPAQTAVQASVIDATPPRFNPAVVEEDDRVAVVSSQCNDRLRSALEDALREYRSTPTELRPRLPRLPMHNKNRALVCALDSQLKNIFESSENLVDTHSILYCGAVAACRLANVKFPNCDVATRPKPAVPAWQCRIERRIDGARVLIGKLHCFREGNTRPRVMRFVRRAFSGTGISPQEYMSRVTERIDFLKQKVYAWANRIRRYKRRVDRYSQNRMFQSDERWVYRAWERPELNMTDVCRPDDAATSSFWRSIWSVPVCHTEADWMRDVERVCEPIPEMEPILITPLDTARAVRPLPNWKSPGPDGLHNFWLKWLSSSHTCLASQFQSSLESGSLPQFLTTGVTHLLHKSGSPAEPKNYRPITCLSTVYKLLTSILRAKINTHIDKNSIMSASQNGCRNGSRGTKELLLIDMAISQQVRRSRKDLSTCWIDYKKAYDSVPHTWLMRVLELYKIDATLRAFLESCMGQWRTVLLYPGCRQIQGNDEPVRIKRGIFQGDSLSPLWFCLALNPLSTLLEDSGLGYRLRRGGQVISHLLYMDDLKLFAPNKLQLMELLKVTENFSSAIRMEFGVDKCAVMYVKQGEIMESEGIQLSDSIHLRTLSSTESYKYLGMSEALGINVTDMKQSLKERFFGRLNKVLHSLLSGGNKVRAFNGWVMPVLMYSFGVLKWTQTELDALDRRVRTLLTANRMHHPRSSVMRLYIPRKCGGRGFLNAKSLHNREMCSLREYFLKVEVGMHRDVVAVDKGLTPLSMAKENWRKPEVLTTDDRKEVWQGKELHGRFYRALHGSDVDFLASVSWLRFGDLFGETEGFVCAIMDEVMLTKNYRKYIMKDGTVDVCRACHRPGESIRHIISGCSRLANGEYLHRHNQVARIIHQQLALKYKLVESEVPYYKYVPDPVLEKDHVTLYWDQSIITDRTIVANKPDIVVIDRSARRVMIVDVTIPHDENLVKAEKEKQIKYLDLAHEVVDMWNVNSAIIVPIVVTANGLIAKSLDDHLSKLSLGGWIKGLIQKAVLLDTARIVRRFLSLEP

SEQ ID NO: 28497 - protein, 1202 aa, Noctua fimbriata
MLTRAAARRARLPPPDPSHSSASPPPESSHIVSAVTPAVAVASSSSDEYFSPPTSPTPVRRQGRGRPPRSLGLRGHPAPSRVPAAGGCVQRMRWTHSINENVMRAYYGSTEGGTNLTAYRVGMLSLFQVLEPTINVSAQRLSDQVRVIQRNHMLDDAVLDRLRSEVLSNRIVFTPAQTAVQASVIDATPPRFNPAVVEEDDRVAVVSSQCNDRLRSALEDALREYRSTPTELRPRLPRLPMHNKNRALVCALDSQLKNLFESSENLVDTHSILYCGAVAACRLANVKFPNCDVATRPKPAVPAWQRRIERRIDGARVLIGKLHCFREGNTRPRVMRFVRRAFSGTGISPQEYMSRVTERIDFLKQKVYAWANRIRRYKRRVDRYSQNRMFQSDERWVYRAWERPDQNMTDVCRPDDAATSSFWRSIWSVPVCHTEADWMRDVEQVCEPIPEMEPILITPLDVARAVRPLPNWKSPGPDGLHNFWLKWLSSSHTCLASQFQSSLESGSLPQFLTTGVTHLLHKSGSPAEPKNYRPITCLSTVYKLLTSILRAKINTHIDKNSIMSASQNGCRNGSRGTKELLLIDMAISQQVRRSRKDLSTCWIDYKKAYDSVPHTWLMRVLELYKIDATLRAFLESCMGQWRTVLRYPGCRQIQGNDEPVWIKRGIFQGDSLSPLWFCLALNPLSTLLEDSGLGYRLRRGGQVISHLLYMDDLKLFAPNKLRLMELLKVTETFSSAIRMEFGVDKCAVMYVKQGEIMESEGIQLSDSIHLRTLSSTESYKYLGMSEALGINVTDMKQSLKERFFGRLNKVLHSLLSGGNKVRAFNGWVMPVLMYSFGVLKWTQTELDALDRRVRTLLTANRMHHPRSSVMRLYIPRKCGGRGFLNAKSLHNREMCSLREYFLKVDLGMHRDVVAVDKGLTPLSMAKENWRKPEVLTTDDRKEVWQGKELHGRFYRALHGPDVDFLASVSWLRFGDLFGETEGFVCAIMDEVMLTNNYRKYIMKDGTVDVCRACHRPGESIRHIISGCSRLANGEYLHRHNQVARIIHQQLALKYKLVESEVPYYKYVPDPVLEKDHVTLYWDQSIITDRTIVANKPDIVVIDRSARRVMIVDVTIPHDENLVKAEKEKQIKYLDLAHEVVDMWNVNSAIIVPIVVTANGLIAKSLDDHLSKLSLGGWIKGLIQKAVLLDTARIVRRFLSLEP

SEQ ID NO: 28498 - protein, 1202 aa, Noctua fimbriata
MITRAAYRRARLPPPDPSLSSASPPPESSPIVSAVTPAVAVASSSSDEYFSPPTSPTPVRRQGRGRPPRSLGLRGHPAPSRVPAAGGCVQRMRWTHSINENVMRAYYGSTEGGTNLTAYRVGMLSLFQVLEPTVNVSAQRLSDQVRVIQRNHMLDDAVLDRLRSEVLSNRIVLTPAQTAVQASVIDATPPRFNPAVEEEDDRVAVVSSQCNDRLRSALEDALREYRSTPTELRPRLPRLPMHNKNRALVCALDSQLENIFESSENLVDTHSILYCGAVAACRLANVKFSNCDVATRPKPAVPAWQRRIERRIDGARVLIGKLHCFREGNTRPRVMRFVRRAFSGTGISPQEYMSRVTERIDFLKQKVYAWANRIRRYKRRVDRYSQNRMFQSDERWVYRAWERPELNMTDVCRPDDAATSSFWCSIWSVPVCHTEADWMRDVERVCEPIPEMEPILITPLDIARAVRPLPNWKSPGPDGLHNFWLKWLSSSHTCLASQFQSSLESGSLPQFLTTGVTHLLHKSGSPAEPKNYRPITCLSTVYKLLTSILRAKINTHIDKNSIMSASQNGCRNGSRGTKELLLIDMAISQQVRRSRKDLSTCWIDYKKAYDSVPHTWLMRVLELYKIDATLRAFLESCMGQWRTVLRYPGCRQIQGNDEPVWIKRGIFQGDSLSPLWFCLALNPLSTLLEDSGLGYRLRRGGQVISHLLYMDDLKLFAPNKLQLMELLKVTETFSSAIRMEFGVDKCAVMYVKRGEIMESEGIQLSDFIHLRSLSSSESYKYLGMSEALGINVTDMKQSLKERFFGRLNKVLHSLLSGGNKVRAFNGWVMPVLMYSFGVLKWTQTELDALDRRVRTLLTANRMHHPRSSVMRLYIPRKCGGRGFLNAKSLHNREMCSLREYFLKVEVGMHRDVVAVDKGLTPLSMAKENWRKPEVLTTDDRKEVWQGKELHGRFYRALHGPDVDFLASVSWLRFGDLFGETEGFVCAIMDEVMLTNNYRKYIMKDGTVDVCRACHRPGESIRHIISGCSRLANGEYLHRHNQVARIIHQQLALKYKLVESEVPYYKYVPDPVLEKNHVTLYWDQSIITDRTIVANKPDIVVIDRSARRVMIVDVTIPHDENLVKAEKEKQIKYLDLAHEVVDMWHVNSAIIVPIVVTANGLIAKSLDDHLSKLSLGGWIKGLIQKAVLLDTARIVRRFLSLEP

SEQ ID NO: 28499 - protein, 1202 aa, Noctua fimbriata
MLTRAAARRARLPPPDPSLSSASPPPESSHIVSAVTPAVAVASSSSDEYFSPPTSPTPVRRQGRGRPPRSLGLRGHPAPSRVPAAGGCVQRMRWTHSINENVMRAYYGSTEGGTNLTAYRVGMLSLFQVLEPTVNVSAQRLSDQVRVIQRNHMLDDAVLDRLRSEVLSNRIVLTPAQTAVQASVIDATPPRFNPAVVEEDDRVAVVSSQCNDRLRSALEDALREYRSTPTELRPRLPRLPMHNKNRALVCALDSQLENIFESSENLVDTHSILYCGAVAACRLANVKFPNCDVATRPKPAVPAWQRRIERRIDGARVLIGKLHCFREGNTRPRVMRFVRRAFSGTGISPQEYMSRATERIDFLKQKVYAWANRIRRYKRRVDRYSQNRMFQSDERWVYRAWERPELNMTDVCRPDDAATSSFWRSIWSVPVCHTEADWMCDVERVCEPIPEMEPILITPLDIARAVRPLPNWKSPGPDGLHNFWLKWLSSSHTCLASQFQSSLESGSLPQFLTTGVTHLLHKSGSPAEPKNYRPITCLSTVYKLLTSILRAKINTHIDKNSIMSASQNGCRNGSRGTKELLLIDMAISQQVRRSRKDLSTCWIDYKKAYDSVPHTWLMRVLELYKIDATLRAFLESCMGQWRTVLRYPGCRQIQGNDEPVWIKRGIFQGDSLSPLWFCLALNPLSTLLEDSGLGYRLRRGGQVISHLLYMDDLKLFAPNELRLMELLKVTETFSSAIRMEFGVDKCAVMYVKQGEIMESEGIQLSDSIHLRTLSSTESYKYLGMSEALGINVTDMKQSLKERFFGRLNKVLHSLLSGGNKVRAFNGWVMPVLMYSFGVLKWTQTELDALDRRVRTLLTANRMHHPRSSVMRLYIPRKCGGRGFLNAKSLHNREMCSLREYFFKVEVGMHRDVVAVDKGLTPLSMAKENWRKPEVLTTDDRKEVWQGKELHGRFYRALHGPDVDFLASVSWLRFGDLFGETEGFVCAIMDEVMLTNNYRKYIMKDGTVDVCRACHRPGESIRHIISGCSRLANGEYLHRHNQVARIIHQQLALKYKLVESEVPYYKYVPDPVLEKDHVTLYWDQSIITDRTIVANKPDIVVIDRSARRVMIVDVTIPHDENLVKAEKEKQIKYLDLAHEVVDMWNVNSAIIVPIVVTANGLIAKSLDDHLSRLSLGGWIKGLIQKAVLLDTARIVRRFLSLEP

SEQ ID NO: 28500 - protein, 1202 aa, Noctua fimbriata
MITRAAYRRARLPPPDPSLSSASPPPESSPIVSAVTPAVAVASSSSDEYFSPPTSPTPVRRQGRGRPPRSLGLRGHPAPSRVPAAGGCVQRMRWTHSINENVMRAYYGSTEGGTNLTAYRVGMLSLFQVLEPTVNVSAQRLSDQVRVIQRNHMLDDAVLDRLRSEVLSNRIVLTPAQTAVQASVIDATPPRFNPAVVEEDDRVAVVSSQCNDRLRSALEDALREYRSTSTELRPRLPRLPMHNKNRALVCALDSQLENIFESSENLVDTHSILYCGAVAACRLANVKFPNCDVATRPKPAVPAWQCRIERRIDGARVLIGKLHCFREGNTRPRVMRFVRRAFSGTGISPQEYMSRVTERIDFLKQKVYAWAIRIRRYKRRVDRYSQNRMFQSDERWVYRAWERPELNMTDVCRPDDAATSSFWRSIWSVPVCHTEADWMRDVERVCEPIPEMEPILITPLDIARAVRPLPNWKSPGPDGLHNFWLKWLSSSHICLASQFQSSLESGSLPQFLTTGVTHLLHKSGSPAEPKNYRPITCLSTVYKLLTSILRAKINTHIDKNSIMSASQNGCRNGSRGTKELLLIDMAISQQVRRSRKDLSTCWIDYKKAYDSVPHTWLMRVLELYKIDTTLRAFLESCMGQWRTVLRYPGCRQIQGNDEPVWIKRGIFQGDSLSPLWFCLALNPLSTLLEDSGLGYRLRRGGQVISHLLYMDDLKLFAPNKLRLMELLKVTENFSSAIRMEFGVDKCAVMYVKQGEIMESEGIQLSDSIHLRTLSSTESYKYLGMSEALGINVTDMKQSLKERFFGRLNKVLHSLLSGGNKVRAFNGWVMPVLMYSFGVLKWTQTELDALDRRVRTLLTANRMHHPRSSVMRLYIPRKCGGRGFLNAKSLHNREMCSLREYFLKVEVGMHRDVVAVDKGLTPLSMAKENWRKPEVLTTDDRKEVWQGKELHGRFYRALHGPDVDFLASVSWLRFGDLFGETEGFVCAIMDEVMLTKNYRKYIMKDGTVDVCRACHRPGESIRHIISGCSRLANGEYLHRHNQVARIIHQQLALKYKLVESEVPYYKYVPDPVLEKDHVTLYWDQSIITDRTIVANKPDIVVIDRSARRVMIVDVTIPHDENLVKAEKEKQIKYLDLAHEVVDMWNVNSAIIVPIVVTANGLIAKSLDDHLSKLSLGGWIKGLIQKAVLLDTARIVRRFLSLEP

SEQ ID NO: 28501 - protein, 1202 aa, Noctua fimbriata
MITRAAYRRARLPPPDPSLSSASPPPESSPIVSAVTPAVAVASSSSDEYFSPPTSPTPVRRQGRGRPPRSLGLRGHPAPSRVPAAGGCVQRMRWTHSINENVMRAYYGSTEGGTNLTAYRVGMLSLFQVLEPTVNVSTQRLSDQVRVIQRNHMLDDAVLDRLRSEVLSNRIVLTPAQTAVQALVIDATPPRFNPAVVEEDDRVAVVSSQCNDRLRSALEDALREYRSTPTELRPRLPRLPMHNKNRALVCALDSQLENIFESSENLVDTHSILYCGAVAACRLANVKFSNCDVATRPKPAVPAWQRRIERRIDGARVLIGKLHCFREGNTRPRVMRFVRRAFSGTGISPQEYMSRVTERIDFLKQKVYAWANRIRRYKRRVDRYSQNRMFQSDERWVYRAWERPELNMTDVCRPDDAATSSFWRSIWSVPVCHTEADWMRDVERVCEPIPEMEPILITPLDIARAVRPLPNWKSPGPDGLHNFWLKWLSSSHTCLASQFQSSLESGSLPQFLTTGVTHLLHKSGSPAEPKNYRPITCLSTVYKLLTSILRAKINTHIDKNSIMSASQNECRNGSRGTKELLLIDMAISQQVRRSRKDLSTCWIDYKKAYDSVPHTWLMRVLELYKIDATLRAFLESCMGQWRTVLRYPGCRQIQGNDEPVWIKRGIFQGDSLSPLWFCLALNPLSTLLEDSGLGYRLRRGGQVISHLLYMDDLKLFAPNKLQLMELLKVTETFSSAIRMEFGVDKCAVMYVKRGEIMESEGIQLSDFIHLRSLSSSESYKYLGMSEALGINVTDMKQSLKERFFGRLNKVLHSLLSGGNKVRAFNGWVMPVLMYSFGVLKWTQTELDALDRRVRTLLTANRMHHPRSSVMRLYIPRKCGGRGFLNAKSLHNREMCSLREYFLKVEVGMHRDVVAVDKGLTPLSMAKENWRKPEVLTTDDRKEVWQGKELHGRFYRALHGPDVDFLASVSWLRFGDLFGETEGFVCAIMDEVMLTNNYRKYIMKDGTVDVCRACHRPGESIRHIISGCSRLANGEYLHRHNQVARIIHQQLALKYKLVESEVPYYKYVPDPVLEKNHVTLYWDQSIITDRTIVANKPDIVVIDRSARRVMIVDVTIPHDENLVKAEKEKQIKYLDLAHEVVDMWHVNSAIIVPIVVTANGLIAKSLDDHLSKLSLGGWIKGLIQKAVLLDTARIVRRFLSLEP

SEQ ID NO: 28502 - protein, 1202 aa, Noctua fimbriata
MITRAASRRARLPPPDQSLSSASPPPESSPIVSAVTPAVAVASSSSDEYFSPPTSPTPVRRQGRGRPPRSLGLRGHPAPSRVPAAGGCVQRMRWTHSINENVMRAYYGSTEGGTNLTAYRVGMLSLFQVLEPTINVSAQRLSDQVRVIQRNHMLDDAVLDRLRSEVLSNRNVLTPAQTAVQASVIDATPPRFNPAVVEEDDRVAVVSSQCNDRLRSALEDALREYRSTPTELRPRLPRLPMHNKNRALVCALDSQLKNLFESSENLVDTHSILYCGAVAACRLANVKFPNCDVATRPKPAVPAWQRRIECRIDGARVLIGKLHCFREGNTRPRVMRFVRRAFSGTGISPQEYMSRVTERIDFLKQKVYAWANRIRRYKRRVDRYSQNRMFQSDERWVYRAWERPDQNMTDMCRPDDAATSSFWRSIWSVPVCHTEADWMRDVEQVCEPIPEMEPILITPLDVARAVRPLPNWKSPGPDGLHNFWLKWLSSSHTCLASQFQSSLESGSLPQFLTTGVTHLLHKSGSPAEPKNYRPITCLSTVYKLLTSILRAKINTHIDKNSIMSASQNGCRNGSRATKELLLIDMAISQQVRRSRKDLSTCWIDYKKAYDSVPHTWLMRVLELYKIDATLRAFLESCMGQWRTVLRYPGCRQIQGNDEPVWIKRGIFQGDSLSPLWFCLALNPLSTLLEDSGLGYRLRRGGQVISHLLYMDDLKLFAPNKLQLMELLKVTETFSSAIRMEFGVDKCAVMYVKQGEIMESEGIQLSDSIHLRTLSSTESYKYLGMSEALGINVTDMKQSLKERFFGRLNKVLHSLLSGGNKVRAFNGWVMPVLMYSFGVLKWTQTELDALDRRVRTLLTANRMHHPRSSVMRLYIPRKCGGRGFLNAKSLHNREMCSLREYFLKVEVGMHRDVVAVDKGLTPLSMAKENWRKPEVLTTDDRKEVWQGKELHGRFYRALHGPDVDFLASVSWLRFGDLFGETEGFVCAIMDEVMLTNNYRKYIMKDGTVDVCRACHRPGESIRHIISGCSRLANGEYLHRHNQVARIIHQQLALKYKLVESEVPYYKYVPDPVLEKDHVTLYWDQSIITDRTIVANKPDIVVIDRSARRVMIVDVTIPHDENLVKAEKEKQIKYLDLAHEVVDMWNVNSAIIVPIVVTANGLIAKSLDDHLSKLSLGGWIKGLIQKAVLLDTARIVRRFLSLEP

SEQ ID NO: 28503 - protein, 1202 aa, Noctua fimbriata
MITRAASRRARLPPPDQSLSSASPPPESSPIVSAVTPAVAVASSSSDEYFSPPTSPTPVRRQGRGRPPRSLGLRGHPAPSRVPAAGGCVQRMRWTHSINENVMRAYYGSTEGGTNLTAYRVRMLSLFQVLEPTINVSAQRLSDQVRVIQRNHMLDDAVLDRLRSEVLSNRIVLTPAQTAVQASVIDATPPRFNPAVVEEDDRVAVVSSQCNDRLRSALEDALREYRSTPTELRPRLPRLPMHNKNRALVCALDSQLKNLFESSENLVDTHSILYCGAVAACRLANVKFPNCDVATRPKPAVPAWQRRIECRIDGARVLIGKLHCFREGNTRPRVMRFVRRAFSGTGISPQEYMSRVTERIDFLKQKVYAWANRIRRYKRRVDRYSQNRMFQSDERWVYRAWERPDQNMTDMCRPDDAATSSFWRSIWSVPVCHTEADWMRDVEQVCEPIPEMEPILITPLDVARAVRPLPNWKSPGPDGLHNFWLKWLSSSHTCLASQFQSSLESGSLPQFLTTGVTHLLHKSGSPAEPKNYRPITCLSTVYKLLTSILRAKINTHIDKNSIMSASQNGCRNGSRGTKELLLIDMAISQQVRRSRKDLSTCWIDYKKAYDSVPHTWLMRVLELYKIDATLRAFLESCMGQWRTVLRYPGCRQIQGNDEPVWIKRGIFQGDSLSPLWFCLALNPLSTLLEDSGLGYRLRRGGQVISHLLYMDDLKLFAPNKLQLMELLKVTETFSSAIRMEFGVDKCAVMYVKQGEIMESEGIQLSDSIHLRTLSSTESYKYLGMSEALGINVTDMKQSFKERFFGRLNKVLHSLLSGGNKVRAFNGWVMPVLMYSFGVLKWTQTELDALDRRVRTLLTANRMHHPRSSVMRLYIPRKCGGRGFLNAKSLHNREMCSLREYFFKVEVGMHRDVVAVDKGLTPLSMAKENWRKPEVLTTDDRKEVWQGKELHGRFYRALHGPDVDFLASVSWLRFGDLFGETEGFVCAIMDEVMLTNNYRKYIMKDGTVDVCRACHRPGESIRHIISGCSRLANGEYLHRHNQVARIIHQQLALKYKLVESEVPYYKYVPDPVLEKDHVTLYWDQSIITDRTIVANKPDIVVIDRSARRVMIVDVTIPHDENLVKAEKEKQIKYLDLAHEVVDMWNVNSAIIVPIVVTANGLIAKSLDDHLSKLSLGGWIKGLIQKAVLLDTARIVRRFLSLEP

SEQ ID NO: 28504 - protein, 1199 aa, Noctua fimbriata
MITRAAYRRARLTTPDSPLSSASPPPDPGSPVLPAAAVASSSSDEYFSPPTSPTPVRRQGRGRPPRSLGLRGHPAPSRVPAAGGCVQRMRWTHSINENVMRAYYGSTEGGTNLTAYRVRMLSLFQVLEPTVNVSAQRLSDQVRVIQRNHMLDDAVLDRLRSEVLSNRVILTPAQTAVQASVIDATPPRFNPAVVEEDDRVAVVSNQCNDRLRSALEDALREYRSTPTELRPRLPRLPMHNKNRALVCALDSQLKNIFESSENLVDTHSILYCGAVAACRLANVKFPNCDVATRPKPAVPAWQYRIERRIDGARVLIGKLHCFREGNTRPRVMRFVRRAFSGTGISPQEYMSRVTERIDFLKQKVYAWANRIRRYKRRVDRYSQNRMFQSDERWVYRAWERPELNMTDVCRPDDAATSSFWRSIWSVPVCHTEAYWMRDVERVCEPIPEMEPILITPLDIARAVRPLPNWKSPGPDGLHNFWLKWLSSSHTCLASQFQSSLESGSLPQFLTTGVTHLLHKSGSPAEPKNYRPITCLSTVYKLLTSILRAKINTHIDKNSIMSASQNGCRNGSRGTKELLLIDMAISQQVRRSRKDLSTCWIDYKKAYDSVPHTWLMRVLELYKIDATLRAFLESCMGQWRTVLRYPGCRQIQGNDEPVWIKRGIFQGDSLSPLWFCLALNPLGTLLEDSGLGYRLRRGGQVISHLLYMDDLKLFAPNKLQLMELLKVTENFSSAIRMEFGVDKCAVMYVKLGEIMESEGIQLSDSIHLRTLSSTESYKYLGMSEALGINVTDMKQSLKERFFGRLNKVLHSLLSGGNKVRAFNGWVMPVLMYSFGVLKWTQTELDALDRRVRTLLTANRMHHPRSSVMRLYIPRKCGGQGFLNAKSLHNREMCSLREYFLKVEVGMHRDVVAVDKGLTPLSMAKENWRKPEVLTTDDRKEVWQGKELHGRFYRALHGPDVDFLASVSWLRFGDLFGETEGFVCAIMDEVMLTNNYRKYIMKDGTVDVCRACHRPGESIRHIISGCSRLANGEYLHRHNQVARIIHQQLALKYKLVESEVLYYKYVPDPVLEKDHVTLYWDQSIITDRTIVANKPDIVVIDRSARRVMIVDVTIPHDENLVKAEKEKQIKYLDLAHEVVDMWNVNSAIIVPIVVTANGLIAKSLDDHLSKLSLGGWIKGLIQKAVLLDTARIVRRFLSLEP

SEQ ID NO: 28505 - protein, 1202 aa, Atethmia centrago
MLTRSAARARPPPPDSSLSSASPPAVPSPTVSAVTTPAAVVASSSSDEYFSSPTSPTPVRRQGRGRPPKSLGLRGQLAPSRVPAAGGCVQRMRWTQSMNENVMRAYYGSTEGGTNLTAYRVRMLSLFQKLEPTVNVSAQRLSDQVRVIQRNHRLDDAALDRLRSEVLSNHIVSTPAQTATHAPIINAIPPRSNHDVEEEDDRVATVSSQCNVRLRSALEDAFREYRSTPTELRPRLPRLPMHKKNRALVCTLDSLLKDFFESSEDLVDTHSILYCAAVAACRLANVKFPNCDGATRPKPAVPAWQCRIERRIDGARVLIGKLYCFRDGNTRPRVMRFVRRAFSGTGISPREYMSRVTERIDFLKQKVCAWASRIRRYKRRVDRYTQNRMFQSDERWVYRAWERPEQNETDVCRPDDATTTAFWRSIWSVPVCHAEADWMRDVERVCETMPEMEVVIITPSDIARAVRPLPNWKSPGPDGLHNFWLKWLTSSHTCLASQFQSSLESGSLPQFLTTGITHLLHKSGSPAEPKNYRPITCLSTVYKLLTSILRAKINTHIDSNSIMSASQNGCRNGFRGTKELLLIDMAISQQVRRFRKDLSTCWIDYKKAYDSVPHTWLMRVLEFYKIDTTLRTFFESCMGQWRTVLRYPGCRQIQGNDEPVWIKRGIFQGDSLSPLWFCLALNPLSTLLEDSGLGYRLRRGGQVISHLLYMDDLKIFAPNKLQLMELLKVTETFSSAIRMEFGVDKCAVMHVKRGEIMESEGIQLSDSIHLRSLSSPESYKYLGMSEALGINVTDMKQSLKERFFGRLKNVLISPLSGGNKVRAFNGWVMPVLMYSFGILKWTQTELDALDRRVRTLLTANRMHHPRSSVMRLYIPRKCGGRGFLNAKTLHNREICSLREYFLKTEVGMHRDVVAVDKGLTPLSMAKENWCKPVILTTDDRKEVWQNKELHGRFYRALHEPDVDFLASVSWLRFGDLFGETEGFVCAIMDEVILTNNYRRHIMKDGTVDVCRACHRPGESIRHIISGCSRLANGEYLHRHNQVARIIHQQLALKYKLVNSEVPYYKYAPDPVLENDHVTLYWDRSIITDRTIVANKPDIVVLDQLARRAMIVDVTIPHDENLVKAEKEKQIKYLDLAHEVVDMWNVDSAVIVPIVVTANGLMAESLNHHLSRLSLGGWIKGLIQKAVLLDTARIVRRFLSLES

SEQ ID NO: 28506 - protein, 1203 aa, Atethmia centrago
MLTRAASKRARPPPPDSSLSSASPPPVSSPTVSAVITPAAVVASSSSDEYFSPPTSPTPVRRQGRDRPPKSLGLRGHPAPSRVPAAGGCVQRMRWTQSMNENVMRAYYGSTEGGTNLTAYRVRMLSLFQELEPTVNVSAQRLSDQVRVIQRNRRLDDATLDRLRSEVLSNYIISTPAQTAVHTPIIDVIPPRSNHGVEEEDDRAATVSSQCNVRLRSALEDAFREYRSTPTELRPRLPRLPMHKKNRALMCALDSQLKVFFESSEDLVDTHSILYCAAVAACRLANVKFPNSDGATRPKPAVPAWQCRIERRIDKARVLIGKLYCFREGNTRPRVMRFVRRAFSGTGISPREYMSHITERIDFLKQKVCAWASRIRRYKRRVDRYTQNRMFQSDERWVYRAWERPKQNVTDVCRPDDATTTAFWRSIWSVPVCHVEADWMRDVERVCETIPEMEVVIITPSDIARAVRPLPNWKSPGPDGLHNFWLKWLTSSHTCLASQFQSSLESGSLPQFMTTGITHLLHKSGSPAEPKNYRPITCLSTVYKLLTSILRAKINTHIDSNSIMSASQNGCRNGSRGTKELLLIDMAISQQVRRSRKDLSTCWIDYKKAYDSVPHTWLMRVLELYKIDTTLRTFLESCMGQWRTVLRYPGCRQIQGNDEPVWIKRGIFQGDSLSPLWFCLALNPLSMQLEDSGLGYRLRRGGQIISHLLYMDDLKIFAPNKLQLMKLLKVTETFSSAIRMEFGVDKCAVMHVKRGEIMESEGIQLSDSIHLRSLSSPESYKYLGMSEALGINVTDMKQSLKERFFGRLKKVLISLLSGGNKVRAFNSWVMPVLTYSFGILKWTQTELDALDRRVRTLLTANRMHHPRSSVMRLYIPRKCGGRGFLNAKTLHNREICSLREYFLKTEVGMHRDVVAVDKGLTPLSMAKENWCKPVVLTTDDRKEIWQSKELHGRFYRALHEPDVDLLASVSWLRFGDLFGETEGFVCAIMDEVILTNNYRRHIMKDGTVDVCRACHRPGESIRHIISGCSRLANGEYLHRHNQVARIIHQQLALKYKLVNSEVPYYKYVPDPVLENDHVTLYWDRSIITDRTIVANKPDIVVIDRLARRAMIVDVTIPHDDNLVKAEKEKQIKYLDLAHEVVDMWNVNSAVIVPIVVTANGLMARSLNHHLSRLALDGWIKGLIQKVVLLDTARIVRRFLSLEP

SEQ ID NO: 28507 - protein, 1202 aa, Atethmia centrago
MLTRSTARARPPPPDSSLSSASPPPVPSPTVSAVTTPAAVVALSSSDEYFSPPTSPTPVRRQGRGRPPKSLGLRGQLAPSRVPAAGGCVQRLRWTQSMNENVMRAYYGSTEGGTNLTAYRVRMLSLFQELEPTVNVSAQRLSDQVRVIQRNHRLDDAALDRLRSEVLSNHIVSTPAQTATHAPIIDAIPPRSNHDVEEEDDRVATVSSQCNVRLRSALEDAFREYRSTPTELRPRLPRLPMHKKNRALVCALDSLLKDFFESSEDLVDTHSILYCAAVAACRLANVKFPNCDEATRPKPAVPAWQYRIERRIDGARVLISKLYCFREGNTRPRVMRFVRRAFSGTGISPREYMSRVTERIDFLKQKVCAWASRIRRYKRRVDRYTQNRMFQSDERWVYRAWERPEQNETDMCRPDDATTTAFWRSIWSEPVCHAEADWMRDVERVCETIPEMEVVVITPSDITRAVRPLPNWKSPGPDGLHNFWLKWLTSSHTCLASQFQSSLESGSLPQFLTTGITHLLHKSGSPAEPKNYRPITCLSTVYKLLTSILRAKINTHIDSNSIMSASQNGCRNGSRGTKELLLIDMAISQQDRRSRKDLSTCWIDYKKAYDSVPHTWLMKVLELYKIDTTLRTFLESCMGQWRTVLRYPGCRRIQGNDEPVWIKRGIFQGDSLSPLWFCLALNPLSTLLEDSGLGYRLRRGGQVISHLLYMDDLKIFAPNKLRLMELLKVTETFSGAIRMEFGVDKCAVMHVKRGEIMESEGIQLSDSIHLRSLSSPESYKYLGMSEALGINVTDMKQLLKERFFGRLKKVLISLLSGGNKVRAFNGWVMPVLMYSFGILKWTQTELDALDRRVRTLLTANRMHHPRSSVMRLYIPRKCGGRGFLNAKTLHNREICSLREYFLKAEVGMHRDVVAVDKGLTPLSMAKENWCKPVVLTTDDRKEIWQNKELHGRFYRALHEPDVDFLASVSWLRFGDLFGETEGFVCAIMDEVILTNNYRRHIMKDGTVDVCRACHRPGESIRHIISGCSRLANGEYLHRHNQVARIIHQQLALKYKLVNSEVPYYKYVPDPVLENDHVTLYWDRSIITDRTIVANKPDIVVIDRLARRAMIVDVTIPHDDNLVKAEKEKQIKYLDLAHEVVDMWNVNSAVIVPIVVTANGLMAESLNHHLSRLSLGGWIKGLIQKAVLLDTARIVRRFLSLEP

SEQ ID NO: 28508 - protein, 1202 aa, Atethmia centrago
MLTRSAARARPPPPDSSLSSASPPPVPSPTVSAVTTPAAVVASSSSDEYFSPPTSPTPVRRQGRGRPPKSLGLRGQLAPSRVPAAGGCVQRMRWTQSMNENVMRAYYGSTEGGTNLTAYRVRMLSLFQKLEPTVNVSAQRLSDQVRVIQRNHRLDDAALDRLRSEVLSNHIVSTPAQTATHAPIINAIPPRSNHDVEEEDDRVATVSSQCNVRLRSALEDAFREYRSTPTELRPRLPRLPMHKKNRALVCTLDSLLKDFFESSEDLVDTHSILYCAAVAACRLANVKFPNCDGATRPKPAVPAWQCRIERRIDGARVLIGKLYCFREGNTRPRVMRFVRRAFSGTGISPREYMSRVTERIDFLKQKVCAWASRIRRYKRRVDRYTQNRMFQSDERWVYRAWERPEQNETDVCRPDDATTTAFWRSIWSVPVCHAEADWMRDVERVCETIPEMDVVIITPSDIARAVRPLPNWKSPGPDGLHNFWLKWLTSSHTCLASQFQSSLESGSLPQFLTTGITHLLHKSGSPAEPKNYRPITCLSTVYKLLTSILRAKINTHIDSNSIMSASQNGCRNGSRGTKELLLIDMAISQQVRRFRKDLSTCWIDYKKAYDSVPHTWLMRVLEFYKIDTTLRTFLESCMGQWRTVLRYPGCRQIQGNDEPVWIKRGIFQGDSLSPLWFCLALNPLSTLLEDSGLGYRLRRGGQVISHLLYMDDLKIFAPNKLQLMELLKVTETFSSAIRMEFGVDKCAVMHVKRGEIMESEGIQLSDSIHLRSLSSPESYKYLGMSEALGINVTDMKQSLKERFFGRLKKVLISPLSGGNKVRAFNGWVMPVLMYSFGILKWTQTELDALDRRVRTLLTANRMHHPRSSVMRLYIPRKCGGRGFLNAKTLHNREICSLREYFLKTEVGMHRDVVAVDKGLTPLSMAKENWCKPVILTTDDRKEIWQNKELHGRFYRALHEPDVDFLASVSWLRFGDLFGETEGFVCAIMDEVILTNNYRRHIMKDGTVDVCRACHRPGESIRHIISGCSRLANGEYLHRHNQVARIIHQQLALKYKLVNSEVPYYKYAPDPVLENDHVTLYWDRSIITDRTIVANKPDIVVIDRLARRAMIVDVTIPHDENLVKAEKEKQIKYLDLAHEVVDMWNVDSAVIVPIVVTANGLMAESLNHHLSRLSLGGWIKGLIQKAVLLDTARIVRRFLSLES

SEQ ID NO: 28509 - protein, 1202 aa, Atethmia centrago
MLTRSAARARPPPPDSSLSSASPPPVPSPTVSAVTTPAAVVASSSSDEYFSPPTSPTPVRRQGRGRPPKSLGLRGQLAPSRVPAAGGCVQRMRWTQSMNENVMRAYYGSTEGGTNLTAYRVRMLSLFQKLEPTVNVSAQRLSDQVRVIQRNHRLDDAALDRLRSEVLSNHIVSTPAQTAIHAPIINAIPPRSNHDVEEEDDRVATVSSQCNVRLRSALEDAFREYRSTPTELRPRLPRLPMHKKNRALVCALDSLLKDFFESSEDLVDTHSILYCAAVAACRLANVKFPNCDGATLPKPAVPAWQCRIERRIDGARVLIGKLYCFREGNTRPRVMRFVRRAFSGTGISPREYMSHVTERIDFLKQKVCAWASRIRRYKRRVDRYTQNRMFQSDERWVYRSWERPEQNETDVCRPDDATTTAFWRSIWSVPVCHAEADWMRDVERVCETIPEMEIVIITPSDIARAVRPLPNWKSPGPDGLHNFWLKWLTSSHTCLASQFQSSLESGSLPQFLTTGITHLLHKSGSPAEPKNYRPITCLSTVYKLFTSILRAKINTHIDSNSIMSASQNGCRNGSRGTKELLLIDMAISQQVRRFRKDLSTCWIDYKKAYDSVPHTWLMRVLELYKIDTTLRTFLESCMGQWRTVLRYPGCRQIQGNDEPVWIKRGIFQGDSLSPLWFCLALNPLSTLLEDSGLGYRLRRGGQVISHLLYMDDLKIFAPNKLQLMELLKVTETFSSAIRMEFGVDKCAVMHVKRGEIMESEGIQLSDPIHLRSLSSPESYKYLGMSEALGINVTDMKQSLQERFFGRLKKVLISPLSGGNKVRAFNGWVMPVLMYSFGILKWTQTELDALDRRVRTLLTANRMHHPRSSVMRLYIPRKCGGRGFLNAKSLHNREICSLREYFLKTEVGMHRDVVAVDKGLTPLSMAKENWCKPVILTTDDRREIWQNKELHGRFYRALHEPDVDFLASVSWLRFGDLFGETEGFVCAIMDEVILTNNYRRHIMKDGTVDVCRACHRPGESIRHIISGCSRLANGEYLHRHNQVARIIHQQLALKYKLVNSEVPYYKYAPDPVLENDHVTLYWDRSIITDRTIVANKPDIVVIDRLARRAMIVDVTIPHDENLVKAEKEKQIKYLDLAHEVVDMWNVDSAVIVPIVVTANGLMAESLNHHLSRLSLDGWIKGLIQKAVLLDTARIVRRFLSLES

SEQ ID NO: 28510 - protein, 1209 aa, Xestia c-nigrum
MLTRHRAKLLRDAHPPSPGSSLSSASQPPGRATPVSTVSPVAAVASSSSDEFFSPPSTPPPPPSRGRRRGRGRPPAGLGPRGQQASSRVPAAGGNVSRMRWTQSMNENVMRAYYGATEGGSNLIAYRGQMLSLFQVLEPAVNVDAQRLSDQVRVIQRNHMLDDTVLDRLCSESRSNLVTPASPMIAVQLQTIPCPPLRSEYDSEEDGDEVISVSTQCNAQLRSALVGAFREYRSTPPELRPRLPRLPMHKKNKALVCALDSQLSNCFDSSKDLADTHSILYCGAVAACRVAHVKFPNNDRTTRPKLAVPAWQCRIERRIGEARVLIGKLICFREGNTRPRVMRFVRRAFSGTDVSFRDYLARITERIDFLKQKICAWASRIRRYKRRVERYTQNRSFQSDERWVYRAWERPDQGVTDTRLPDDDAMCSFWRSIWSVPVSHTEGDWIRKVEQVCDQIQEMGAIIISPQDVACAVRPLPNWKSPGPDGLHNFWIKWFQRSHARLASQFQSALESGSLPQFMTTGITHLLHKSGSTAEPKNYRPITCLPTVYKVLTSILRAKINKHIESNSIMSTSQNGCRNGSRGTKELLLIDMAISQQVRRSRKNLSTCWIDYKKAYDSVPHTWLMRVLELYKINATLRAFLESCMGQWKTVLRYPGCRQIQGSDEPVWIKRGIFQGDSLSPLWFCLALNPLSTLLENSGLGYRLRKDGQVISHLLYMDDLKLFAPNKLQLLELLKVTETFSNAIRMEFGVDKCAVMYVKRGEIMESEGLQLSDSIHLRSLSSSESYKYLGMSEALGINVTDMKQSLKERFFGRLKKVLNSLLSGGNKVRAFNGWVMPVLMYSFGILKWTQTELDALDRRVRTLLTANRMHHPRSSMMRLYIPRKCGGRGFLNAKNLHNREVCSLREYFLEADVGMHRDVVSVDKGLTPLSLANGNWRKPKVLDTNDRREEWQGKELHGRFYRALHGPDVDFLASVSWLRFGDLFGETEGFVCAIMDEVMMTNNYRKYIVKDGTVDICRACHRPGESIRHIISGCSSLANGEYLHRHNLVARIIHQQLALKYNLVESEVPYYKYAPDPVLVNGNITLYWDRPITTDRTVVANRPDIVVIDRLERRTMIVDLTVPHDENLVKAEQDKKNKYLDLAREVVDMWDVSTAIIVPIVVSANGLIAKSLDQHLRRLSLGSWIKGLIQKAVLLDTARIVRRFLSQEP

SEQ ID NO: 28511 - protein, 1073 aa, Xestia c-nigrum
MSPTPVRRAGRGRPPKGLGLRGQQAPSRVPATGGCVQRMKWTQLMNENVMRAYYGSTEGGTNLTAYRVRMLSLFQDLEPTVNASAQRLSDQVRVIQRNHLLDGAALDRLRSEVLSNRIILTPAQTAVQASSIDANPPRSNPAVVEEDDRDATVSSQCNDRLRSALEDALHEYRSTSAELRPRLPRLPMHKKNRALVCALDSQLKNVFESSEDLVDTHSILFCGAVAACRLANVKFPNCDLATRPKPAVPAWQRRIERRIDGARVLIGKLHCFREGNTRPRVMRFVRRAFSGTEISPQEYMSRVTERIDFLKQKVYAWASRIRRYKRRVTPLDIARAVRPLPNWKSPGPDGLHNFWLKWFSSSHTCLASQFQSSLESGSLPQFLTTGITHLLHKSGSPAEPKNYRPITCLSTVYKLLTSILRTKINTHVDSNSIMSASQNGCRNGSRGTKELLLIDMAISQQVRRARKDLSTCWIDYKKAYDSVPHSWLRRVLELYKIDATLRTFLESCMGQWRTVLRYPGCRQIQGNDEPVWIKRGIFQGDSLSPLWFCLALNPVSTLLENSGLGYRLRKDGQVISHLLYMDDLKLFAPNKLQLMELLKVTETFSSAIGMEFGVDKCAVMYVKRGKIMGTEGLQLSDSIHLRSLSSSESYKYLGMSEALGINVTDMKQSLKERFFGRLKKVLNSLLSGGNKVRAFNGWVMPVLMYSFGILKWTQTELDALDRRVRTLLTENRMHHPRSSVMRLYIPRKCGGRGFLNAKTLHNREVCSLREYFLKADVGMHRDVVAVDKGLTPLSMAKENWRKPVVLTTDDRKKEWQGKELHGRFYRALHGPDVDFLASVSWLRFGDLFGETEGFVCAIMDEVMLTNNYRKYIMKDGTVDVCRACHCPGESIRHIISGCSRLANGEYLHRHNQVARIIHQQLALKFKLVESEVPYYKYVPDPVLVKDHVTLYWDQSIITDRTIVANKPDIVVIDRSARRVMIIDVTIPHDENLVKAEKEKQMKYLDLAHEVRDMWNMNSVIIVPIVVTANGLIAKSLDEHLSKLSLGGWIKGLIQKAVLLDTARIVRRFLSLQP

SEQ ID NO: 28512 - protein, 1199 aa, Xestia c-nigrum
MITRAASRRALIPSPDSSLSSASPPPDPGSPVSPVAAVASSSSDEYFSPPTSPTPVRRAGRGRPPKGLGLRGQQAPSRVPATGGCVQRMKWTQLMNENVMRAYYGSTEGGTNLTAYRVRMLSLFQDLEPTVNASAQRLSDQVRVIQRNHLLDGAALDRLRSEVLSNRIILTPAQTAVQASSIDANPPRSNPAVVEEDDRVATVSSQCNDRLRSALEDALHEYRSTSAELRPRLPRLPMHKKNRALVCALDSQLKNVFESSEDLVDTHSILFCGAVAACRLANVKFPNCDLATRPKPAVPAWQRRIERRIDGARVLIGKLHCFREGNTRPRVMRFVRRAFSGTEISPQEYMSRVTERIDFLKQKVYAWASRIRRYKRRVDRYSQNRMFQSDERWVYRAWERPQQNMTDVCRPDDAATSSFWRSIWSVPVCHSEADWMRDVERVCEPIPTMEPILITPLDIARAVRPLPNWKSPGPDGLHNFWLKWFSSSHTCLASQFQSSLESGSLPQFLTTGITHLLHKSGSPAEPKNYRPITCLSTVYKLLTSILRTNINTHVDSNSIMSASQNGCRNGSRGTKELLLIDMAISQQVRRARKDLSICWIDYKKAYDSVPHSWLKRVLELYKIDATLRTFLESCMGQWRTVLRYPGCRQIQGNDEPVWIKRGIFQGDSLSPLWFCLALNPVSTLLENSGLGYRLRKDGQVISHLLYMDDLKLFAPNKLQLMELLKVTETFSSAIGMEFGVDKCAVMYVKRGKIMGSEGLQLSDSIHLRSLSSSESYKYLGMSEALGINVTDMKQSLKERFFGRLKKVLNSLLSGGNKVRAFNGWVMPVLMYSFGILKWTQTELDALDRRVRTLLTENRMHHPRSSVMRLYIPRKCGGRGFLNAKTLHNREVCSLREYFLKVDVGMHRDVVAVDKGLTPLSMAKENWRKPVVLTTDDRKKEWQGKELHGRFYRALHGPDVDFLASVSWLRFGDLFGETEGFVCAIMDEVMLTNNYRKYIMKDGTVDVCRACHCPGESIRHIISGCSRLANGEYLHRHNQVARIIHQQLALKFKLVESEVPYYKYVPDPVLVKDHVTLYWDQSIITDRTIVANKPDIVVIDRSARRVMIIDVTIPHDENLVKAEKEKQMKYLDLAHEVRDMWNMNSVIIVPIVVTANGLIAKSLDEHLSKLSLGGWIKGLIQKAVLLDTARIVRRFLSLQP

SEQ ID NO: 28513 - protein, 1199 aa, Xestia c-nigrum
MITRAASRRALIPSPDSSLSSASPPPDPGSPVSPVAAVASSSSDEYFSPPTSPTPVRRAGRGRPPKGLGLRGQQAPSRVPATGGCVQRMKWTQLMNENVMRAYYGSTEGGTNLTAYRVRMLSLFQDLEPTVNASAQRLSDQVRVIQRNHLLDGAALDRLRSEVLSNRIILTPAQTAVQASSIDANPPRSNPAVVEEDDRVATVSSQCNDRLRSALEDALHEYRSTSAELRPRLPRLPMHKKNRALVCALDSQLKNVFESSEDLVDTHSILFCGAVAACRVANVKFPNYDLATRPKPAVPAWQRRIERRIDGARVLIGKLHCFREGNTRPRVMRFVRRAFSGTEISPQEYMSRVTERIDFLKQKVYAWASRIRRYKRRVDRYSQNRMFQSDERWVYRAWERPQQNMTDVCRPDDAATSSFWRSIWSVPVCHSEADWMRDVERVCEPIPTMEPILITPLDIARAVRPLPNWKSPGPDGLHNFWLKWFSSSHTCLASQFQSSLESGSLPQFLTTGITHLLHKSGSPAEPKNYRPITCLSTVYKLLTSILRTKINTHVDSNSIMSASQNGCRNGSRGTKELLLIDMAISQQVRRARKDLSTCWIDYQKAYDSVPHSWLRRVLELYKIDATLRTFLESCMGQWRTVLRYPGCRQIQRNDEPVWIKRGIFQGDSLSPLWFCLALNPVSTLLENSGLGYRLRKDGQVISHLLYMDDLKLFAPNKLQLMELLKVTETFSSAIGMEFGVDKCAVMYVKRGKIMGSEGLQLSDSIHLRSLSSSESYKYLGMSEALGINVTDMKQSLKERFFGRLKKVLNSLLSGGNKVRAFNGWVMPVLMYSFGILKWTQTELDALDRRVRTLLTENRMHHPRSSVMRLYTPRKCGGRGFLNAKTLHNREVCSLREYFLKADVGMHRDVVAVDKGLTPLSMAKENWRKPVVLTTDDRKKEWQGKELHGRFYRALHGPDVDFLASVSWLRFGDLFGETEGFVCAIMDEVMLTNNYRKYIMKDGTVDVCRACHCPGESIRHIISGCSRMANGEYLHRHNQVARIIHQQLALKFKLVESEVPYYKYVPDPVLVKDHVTLYWDQSIITDRTIVANKPDIVVIDRSARRVMIIDVTIPHDENLVKAEKEKQMKYLDLAHEVRDMWNMNSVIIVPIVVTANGLIAKSLDEHLSKLSLGGWIKGLIQKAVLLDTARIVRRFLSLQP

SEQ ID NO: 28514 - protein, 1202 aa, Omphaloscelis lunosa
MLTRSAARSARLPPPDSPLSSASPPPVPSPIVNAVSTPAAVVASSSSDEYFSPPTSPTPVRRKGRGRPPRSLGLRGQPAPSRVPAAGGCVQRMRWTQLMNENVMRAYYGSTEGGTNLTAYRVRMLSLFQELEPTVNVSAQRLSDQVRVIQRNHRLDDIALDRLRSEVLSNHIVSTRAQTAAQESNIDPTPPRFNHGVEEDDRVATVSSQCNDRLRSALEDAFREYRYTPTELRPRLPRLPMHKKNRALVCALDSQLTNFFESSEDLIDTHSILYCAAVAACRLANVKFPNYDGATRPKPVVPAWQCRIERRIDGARVLIGKLYCFREGNTRPRVMRFVRRAFLGTGISPQEYMSRVTERIDFLKQKVCAWASRIRRYKRRVDRYTQNRMFQSDERWVYRAWERPEQNVTDVCRPDDAATSAFWRSIWSVPVCHTEAGWMQDVERVCETIPEMDAVFITPLDVARAVRPLPNWKSPGPDGLHNFWLKWLSSSHTRLASQFQSSLESGSLPQFLTTGVTHLLHKSGNPAEPKNYRPITCLSTVYKLLTSILRTKINTHIDSNSIMSVSQNGCRNGSRGTKELLLIDMAISQQVRRSRKDLSTCWIDYKKAYDSVPHTWLMRVLELYKVHTTLRTFLMSCMGQWRTVLRYPGCRQTQGNDEPVWIKRGIFQGDSLSPLWFCLALNPLSTLLEGSGLGYRLRRGGQVISHLLYMDDLKLFAPNKLRLMELLKVTETFSGAIRMEFGVDKCAVMHVKRGEIMESEGTQLSDSIHLRSLSSAENYRYLGMSESLGINVADMKQSLKERFFGRLKKVLISFLSGGNKVRAFNGWVMPVLIYSFGILKWTQTELDALDRRVRTLLTANRMHHPRSSVMRLYIPRKCGGRGFLNAKTLHNREVCSLREYFFKADVGMHRDVVAVDNGLTPLSMAKENWRKPVVLTTDDRKEVWQSKALHGRFYRALHEPGVDFLASVSWLRFGDLFGETEGFICAIMDEVILTNNYRRHIMKDGTVDVCRACHRPGESIRHIISGCSRLANGEYLHRHNQVARIIHQQLALKYKLVDSEVPYYKYVPDPVLENDHVTLYWDRSIITDRTIIANKPDIVVIDRLARRAMIVDVTIPHDENLVKAEKEKQIKYLDLAHEVVDMWNVSSAIIVPIVVTANGLMAESLDQHLSRLSLGGWIKRLIQKAVLLDTARIVRRFLSLQP

SEQ ID NO: 28515 - protein, 1202 aa, Omphaloscelis lunosa
MLTRSAARSARLPPPDSPLSSASPPPVPSPIVNAVSTPAAVVASSSSDEYFSPPTSPTPVRRQGRGRPPRSLGLRGQPAPSRVPAAGGCVQRMRWTQLMNENVMRAYYGSTEGGTNLTAYRVRMLSLFQELEPTVNVSAQRLSDQVRVIQRNHRLDDIALDRLRSEVLSNHIVSTRAQTAAQESNIDPTPPRFNHGVEEDDRVATVSSQCNDRLRSALEDAFREYRYTPTELRPRLPRLPMHKKNRALVCALDSQLTNFFESSEDLIDTHSILYCAAVAACRLANVKFPNYDGATRPKPVVPAWQCRIERRIDGARVLIGKLYCFREGNTRPRVMRFVRRAFLGTGISPQEYMSRVTERIDFLKQKVCAWASRIRRYKRRVDRYTQNRMFQSDERWVYRAWERPEQNVTDVCRPDDAATSAFWRSIWSVPVCHTEAGWLQDVERVCETIPEMDAVFITPLDVARAVRPLPNWKSPGPDGLHNFWLKWLSSSHTRLASQFQSSLESGLLPQFLTTGVTHLLHKSGNPAEPKNYRPITCLPTVYKLLTSILRTKINTHIDSNSIMSASQNGCRNGSRGTKELLLIDMAISQQVRRSRKDLSTCWIDYKKAYDSVPHTWLMRVLELYKVHTTLRTFLMSCMGQWRTVLRYPGCRQTQGNDEPVWIKRGIFQGDSLSPLWFCLALNPLSTLLEGSGLGYRLRRGGQVISHLLYMDDLKLFAPNKLRLMELLKVTETFSGAIRMEFGVDKCAVMHVKRGEIMESEGTQLSDSIHLRSLSSAENYRYLGMSESLGINVTDMKQSLKERFFGRLKKVLISFLSGGNKVRAFNGWVMPVLMYSFGILKWTQTELDALDRRVRTLLTANRMHHPRSSVMRLYIPRKCGGRGFLNAKTLHNREVCSLREYFFKADVGMHRDVVAVDNGLTPLSMAKENWRKPVVLTTDDRKEIWQSKALHGRFYRALHEPGVDFLASVSWLRFGDLFGETEGFICAIMDEVILTNNYRRHIMKDSTVDVCRACHRPGESIRHIISGCSRLANGEYLHRHNQVARIIHQQLALKYKLVDSEVPYYKYVPDPVLENDHVTLYWDRSIITDRTIIANKPDIVVIDRLARRAMIVDVTIPHDENLVKAEKEKQIKYLDLAHEVVDMWNVSSAIIVPIVVTANGLMAESLDQHLSRLSLGGWIKRLIQKAVLLDTARIVRRFLSLQP

SEQ ID NO: 28516 - protein, 1202 aa, Omphaloscelis lunosa
MLTRSAARSARLPPPDSPLSSASPPPVPSPIVNAVSTPAAVVASSSSDEYFSPPTSPTPVRRKGRGRPPRSLGLRGQPAPSRVPAAGGCVQRMRWTQLMNENVMRAYYGSTEGGTNLTAYRVRMLSLFQELEPTVNVSAQRLSDQVRVIQRNHRLDDIALDRLRSEVLSNHIVSTRAQTAAQESNIDPTPPRFNHGVEEDDRVATVSSQCNDRLRSALEDAFREYRYTPTELRPRLPRLPMHKKNRALVCALDSQLTNFFESSEDLIDTHSILYCAAVAACRLANVKFPNYDGATRPKPVVPAWQCRIERRIDGARVLIGKLYCFREGNTRPRVMRFVRRAFLGTGISPQEYMSRVTERIDFLKHKVCAWASRIRRYKRRVDRYTQNRMFQSDERWVYRAWERPEQNVTDVCRPDDAATSAFWRSIWSVPVCHTEAGWMQDVERVCETIPEMDAVFITPLDVTRAVRPLPNWKSPGPDGLHNFWLKWLSSSHTRLASQFQSSLESGSLPQFLTTGVTHLLHKSSNPAEPKNYRPITCLSTVYKLLTSILRTKINTHIDSNSIMSVSQNGCRNGSRGTKELLLIDMAISQQVRRSRKDLSTCWIDYKKAYDSVPHTWLMRVLELYKVHTTLRTFLMSCMGQWRTVLRYPGCRQTQGNDEPVWIKRGIFQGDSLSPLWFCLALNPLSTLLEGSGLGYRLRRGGQVISHLLYMDDLKLFAPNKLRLMELLKVTETFSGAIRMEFGVDKCAVMHVKRGEIMESEGTQLSDSIHLRSLSSAENYRYLGMSESLGINVADMKQSLKERFFGRLKKVLISFLSGGNKVRAFNGWVMPVLIYSFGILKWTQTELDALDRRVRTLLTANRMHHPRSSVMRLYIPRKCGGRGFLNAKTLHNREVCSLREYFFKADVGMHRDVVAVDNGLTPLSMAKENWRKPVVLTTDDRKEVWQSKALHGRFYRALHEPGVDFLASVSWLRFGDLFGETEGFICAIMDEVILTNNYRRHIMKDGTVDVCRACHRPGESIRHIISGCSRLANGEYLHRHNQVARIIHQQLALKYKLVDSEVPYYKYVPDPVLENDHVTLYWDRSIITDRTIIANKPDIVVIDRLARRAMIVDVTIPHDENLVKAEKEKQIKYLDLAHEVVDMWNVSSAIIVPIVVTANGLMAESLDQHLSRLSLGGWIKRLIQKAVLLDTARIVRRFLSLQP

SEQ ID NO: 28517 - protein, 1202 aa, Sesamia nonagrioides
MLTRAAKRRARPPPPDSSLSTASPPPVSSATVNAVRTPAVVVASSSSDEYFSPPTSPTPVRRQGRGRPPKSLGLRGHPAPSRVPAAGGCVQRMRWTQTMNENVMRAYYGATEGGTNLTAYRERMLSLFQALEPTVNVSAQRLSDQVRVIQRNHRLDDIALDRLRSEVLSNQIAPTLTQTAAQASIIDAVPPRSNRVEEEDDRVETVSSQYNDRLRSALEDAFRDYRSTPTNLRPRLPRLPMHKKNRALVCALDSQLKNFFESSEDLIDTHSILYCAAVAACRLAKVKFPNCEEATRPKLAVPAWQRRIERRIDGTRVLIGKLYCFREGNTRPRVMRFVRQAFSGTGISPREYINNVTERIDFLKQKVCAWASRIRRYKKRVDRYTQNRMFQSDERWVYRAWERPEQNEADECRPDDATTSAFWRGIWSVSVCHTEGDWTQDVEQVCEAIPEMDNILITPLDVATAVRSLPNWKFPGPDGLHNFWLKWLSSSHTCLASQFQSSLESGSLPQFLTTGITHLLHKSGSTAEPKNYRPITCLPTVYKVLTSILKAKINNHLDSNSIMSVFQNGCRSGSRGTKELLLIDMAISQQVRRSRKDLSTCWIDYKKAYDSVPHTWLMRVLELYKINATLRTFLRSCMGQWKTVLRYPGSRQIQGNDEPVWIKRGIFQGDSLSPLWFCLALNPLSTLLEDSGLGYRLKRGGQVISHLLYMDDLKLFAPNKLHLMKLLNVTETFSSGIKMEFGVDKCAVMHVKRGQIMESEGITLPDSIHLRSLSSIESYKYLGMSEALGINDADMKQSLKERFFGRLKKVLNSLLSGGNKVRAFNGWVMPVLMYSFGILKWTQTELDALDRRVRTLLTANRMHHPRSSVMRLYIPRKCGGRGFLNAKTLHNREVFSLREYFLKTVVGMHHDVVTVDKGLTQLSMAKDNWHKPIILTTDDRKMVWQSKELHGRFYRALHGPDVDFLASVSWLRFGDLFGETEGFVCAIMDEVILTNNYRRYIMRDGTIDVCRACHHLGVSIRHIISGCSRLANSEYLHRHNQVARIIHQQLALKYKLVDSEVPYYKYVPDPVLENDHVTLYWDRSIITDRTIVANKPDIVVIDRLARLAMIVDVTIPHDGNLVKAEKEKQMKYLDLAHEVVDMWNVNSAVIVPIVVSANGLIAKSLDQHLLRLSLGSWVKGLIQKAVLLDTARIVRRFLSLEP

SEQ ID NO: 28518 - protein, 1202 aa, Sesamia nonagrioides
MLTRSATRKARPPPPDSLLSSASPPPVSSPIVNAVTTSAAAVALRSSDEYFSPPTSPTPVRRQGRGRPPKSLGLRGHPAPSRVPAVGGCVQRMRWSQTMNENVMRAYYGATEGGTNLTAYRERMLSLFQALEPTVNVSAQRLSDQVRVIQRNHRLDDTALDRLRSEVLSNQIAPTLTQTAALASIIDAVPPRSNRVEEEDDGVETVSSQYNDRLRSTLEDAFREYRFTPTDLRPRLPRLPMHKKNRALVSALDSQLKNVFESSEDLIDTHSILFCGAVAACRLANIKFPNCDEANRPRPAVPAWQHRIERRIDGARVLIGKLYCFREGNTRPRVMRFVRQAFSGTGISPREYISHVTERIDFLKQKVCAWASRIRRYKRRVDRYTQNRMFQSDERWVYRAWERTEQNEADVCRPDDAATSAFWRSIWSVPVCHAEGDWIQDVEQVCEMIPEMDTILITPIDVATAVRSLPNWKSPGPDGLHNFWLKWLSSSHTCLASQFQSSLESGSLPQFLTTGITHLLHKSGSTAEPNNYRPITCLPTVYKVLTSILKAKINKHLDSNSIMSVSQNGCRSGSRGTKELLLIDMAISQQVRRSRKDLSTCWIDYKKAYDSVPHTWLMRVLELYKVNATLRTFLRSCIGQWKTVLRYPGSRRIQGNDEPVWIKRGIFQGDSLSPLWFCLALNPLSTLLEDSGLGYRLRRGGQVISHLLYMDDLKLFAPNKLHLMKLLNVTETFSSGIKMEFGVDKCAVMHVKRGQIMESEGITLPDSIHLRSLSSVESYKYLGMSEALGINDADMKQSLKERFFGRLKKVLKSLLSGGNKVRAFNGWVMPVLMYSFGILKWTQTELDALDRRVRTLLTANRMHHPRSSVMRLYIPRKCGGRGFLNAKTLHNREVCSLREHFLKTVVGMHHDVVTVDKGLTPLSMAKENWHKPIILTTNDRKMIWQSKELHGRFYRALHEPDVDFLASVSWLRFSDLFGETEGFVCAIMDEVILTNNYRRYIMRDGTIDVCRACHHPGESIRHIISGCSRLANGEYLHRHNQVARIIHQQLALKYKLVDSEVPYYKYVPDPVLENDHATLYWDRSIITDRTIVANKPDIVVIDRLARLAMIVDVTIPHDGNLVKAEKEKQIKYLDLAHEVVDMWNVNSAVIVPIVVSANGLIAKSLDQHLLRLSLGSWIKGLIQKAVLLDTARIVRRFLSLEP

SEQ ID NO: 28519 - protein, 1199 aa, Noctua janthe
MITRAAYRRARLTTPDSSLSSASPPPDPGSPVSPAAAVASSSSDEYFSPPTSPTPVRRQGRGRPPKSLGLRGHPAPSRVPAAGGCVQRMRWTQTINENVMRAYYGSTEGGTNLTAYRVRMLSLFQVLEPIVNVSAQRLSDQVRVIQRNHMLDDAALDRLRSEVLSNRIVLTPAQTAVQASTIDATPPRSNPAVVEEDDRVAMVSSQCNDRLRSALEDALREYRSTPTKLRPRLPRLPMHNKNRALVCALDSQLKNIFESSENLVDTHSILYCGAVAACRLANVKFPNDDVAIRPKPAVPTWQRRIECRIDEARVLIGKLHCFREGNTRPRVMRFVRRAFSGTGISPQQYMSRVTERIDFLKQKVYAWANRIRRYKRRVDRYSQNRIFQSDERWVYRAWERPEQNMTDVCRPDDAATSSFWRSIWSVPVCHTEADWMRDVERACEPIPEMEPILITSIDIARAVRPLPNWKSPGPDGLHNFWLKWLSSSHTCLASQFQSSLESGSLPQFLTTGVTHLLHKSGSPAEPKNYRPITCLSTVYKLLTSILRVKINTHIDKNFIMSASQNGCRNRSRGTKELLLIDMAISQQVRRSRKDLSTCWIDYKKAYDSVPHTWLMRVLELYKIDATLRAFLESCMGQWRTVLRYPGCRQIQGNDEPVWIKRGIFQGDSLSPLWFCLALNPLSTLLEDSGLGYRLRRGGQVISHLLYMDDLKLFAPNKLRLMELLKVTETFSNAIRMEFGVDKCAVMYVKRGEIMESEGIQLSDSIHLRSLSSSESYKYLGMSESLGINVTDMKQSLRERFFGRLNKVLNSLLSGGNKVRAFNGWVMPVLMYSFGVLKWTQTELDALDRRVRTLLTANRMHHPRSSVMRLYIPRKCGGRGFLNAKTLYNREICSLREYFFKTEVGMHRDVVAVDKGLTPLSMAKENWRKPVVLTIDDRKEVWQGKELHGRFYRALHGPDVDFLASVSWLRFGDLFGETEGFVCAIMDEVILTNNYRKYIMKDGTVDVCRACHRPGESIRHIISGCSRLANGEYLHRHNQVARIIHQQLALKYKLVESEVPYYKYVPDPVLEKDHVTLYWDRSIITDRTIVANKPDIVVIDRLARRVMIVDVTIPHDENLVKAEKEKQIKYLDLAHEVVDMWNVNSAIIVPIVVTANGLIAKSLDDHLSRLSLGGWIKGLIQKAVLLDTARIVRRFLSLEP

SEQ ID NO: 28520 - protein, 1199 aa, Noctua janthe
MITRAAYRRARLTTPDSSFSSASPPPDPGSPVSPAAAVASSSSDEYFSPPTSPTPVRRQGRGRPPKSLGLRGHPAPSRVPAAGGCVQRMRWTQTINENVMRAYYGSTEGGTNLTAYRVRMLSLFQVLEPIVNVSAQRLSDQVRVIQRNHMLDDAALDRLRSEVLSNRIVLTPAQTAVQASAIDATPPRSNPAVVEEDDRVAMVSSQCNDRMRSALEDALREYRSTPTKLRPRLPRLPMHNKNRALVCALDSQLKNIFESSENLVDTHSILYCGAVAACRLANVKFPNDDVAIRPKLAVPTWQRRIECRIDEARVLIGKLHCFREGNTRPRVMRFVRRAFSGTGISPQEYMSRVTERIDFLKQKVYAWANRIRRYKRRVDRYSQNRIFQSDERWVYRAWERPEQNMTDVCRPDDAATSSFWRSIWSVPVCHTKADWMRDVERACEPIPEMESIIITPIDIARAVRPLPNWKSPGPDRLHNFWLKWLSSSHTCLASQFQSPLESGSLPQFLTTGVTHLLHKSGSPAEPKNYRPITCLSTVYKLLTSILRVKINTHIDKNFIMSASQNGCRNRSRGTKELLLIDMAISQQVRRSRKDLSTCWIDYKKAYDSVPHTWLMRVLELYKIDATLRAFLESCMGQWRTVLRYPGCRQIQGNDEPVWIKRGIFQGDSLSPLWFCLALNSLSTLLEDSGLGYRLRRGGQVISHLLYMDDLKLFAPNKLRLMELLKVTETFSNAIRMEFGVDKCAVMYVKRGEIMESEGIQLSDSIHLRSLSSSESYKYLGMSESLGINVTDMKQSLRERFFGRLNKVLNSLLSGGNKVRAFNGWVMPVLMYSFGVLKWTQTELDALDRRVRTLLTANRMHHPRSSVMRLYIPRKCGGRGFLNAKTLHNREICSLREYFLKTEVGMHRDVVAVDKGLTPLSMAKENWRKPAVLTTDDRKEVWQGKELHGRFYRALHGPDEDFLAPVSWLRFGDLFGETEGFVCAIMDEVMLTNNYRKYIMKDGTVDVCRACHRPGESIRHIISGCSRLANGEYLHRHNQVARIIHQQLALKYKLVESEVPYYKYVPDPVLEKDHVTLYWDRSIITDRTIVANKPDIVVIDRLARRVMIVDVTIPHDENLVKAEKEKQIKYLDLAHEVVDMWNVNSAIIVPIVVTANGLIAKSLDDHLSRLSLGGWIKGLIQKAVLLDTARIVRRFLSLEP

SEQ ID NO: 28521 - protein, 1050 aa, Noctua janthe
MLDDAALDRLRSEVLSNRIVLTPAQTAVQASTIDATPPRSNPAVVEEDDRVAMVSSQCNDRLRSALEDALREYRSTPTKLRPRLPRLPMHNKNRALVCALDSQLKNIFESSENLVDTHSILYCGAVAACRLANVKFPNYDVAIRPKPAVPTWQRRIECRIDEARVLIGKLHCFREGNTRPRVMRFVRRAFSGTGISPQEYMSRVTERIDFLKQKVYAWANRIRRYKRRVDRYSQNRIFQSDERWVYRAWERPEQNMTDVCRPDDAATSSFWRSIWSVPVCHTEADWMRDVERACEPIPEMEPILITSIDITRAVRPLSNWKSPGPDGLHNFWLKWLSSSHTCLASQFQSSLESGSLPQFLTTGVTHLLHKSGSPAEPKNYRPITCLSTVYKLLTSILRVKINTHIDKNFIMSASQNGCRNRSRGTKELLLIDMAISQQVRRSRKDLSTCWIDYKKAYDSVPHTWLMRVLELYKIDSTLRAFLESCMGQWRTVLRYPGCRQIQGNDEPVWIKRGIFQGDSLSPLWFCLALNPLSTLLEDSGLGYRLRRGGQVISHLLYMDDLKLFAPNKLRLMELLKVTETFSNAIRMEFGVDKCAVMYVKRGEIMESEGIQLSDSIHLRSLSSSESYKYLGMSESLGINVTDMKQSLRERFFGRLNKVLNSLLSGGNKVRAFNGWVMPVLMYSFGVLKWTQTELDALDRRVRTLLTANRMHHPRSSVMRLYIPRKCGGRGFLNAKTLHNREICSLREYFLKTEVGMHRDVVAVDKGLTPLSMAKENWRKPVVLTTDDRKEVWQGKELHGRFYRALHGPDVDFLASVSWLRFGDLFGETEGFVCAIMDEVMLTNNYRKYIMKDGTVDVCRACHRPGESIRHIISGCSRLANGEYLHRHNQVARIIHQQLALKYKLVESEVPYYKYVPDPVLEKDHVTLYWDRSIITDRTIVANKPDIVVIDRLARRVMIVDVTIPHDENLVKAEKEKQIKYLDLAHEVVDMWNVNSAIIVPIVVTANGLIAKSLDDHLSRLSLGGWIKGLIQKAVLLDTARIVRRFLSLGP

SEQ ID NO: 28522 - protein, 1200 aa, Mythimna ferrago
MLTRSATRRARHPPTGSLLSSASPPPDPGSPVSPVTAVASSSSDEYFSPPTSPTPVRRPGRGRPPNGLGPRGQPAPSRVPAAGGCVQRMKWTQSINENVMRAYYRATEGGTNLTAYRVRMLSLFQKLEPSVNVTTQRLSDQVRVIQRNHRLDDAALDRLRSEVLSNRIISTPIQTQTAAPRATDTIMPRPNYGDDEADDRVVTVSSQCNDQLRSALEDALREYRSTPIALRPRLPRLPMHKKNRALVCALDSLLENVFESSVNLVDTHSILYCGAIAACRLANVKLPSCDGATRPKPAVPAWQCRIERRIDGARALIGKLYCFREGNTRPRVMRYVRRAFSGTGVSPREYLAHVTERIDFLKQKVCAWANRIRRYKRRVDRYSQNRMFQSDERWVYRDWERPEQSVTDVLRPDVAATNEFWRSIWSVPVCHTEGGWMRDIERVCEAIPEMEKVFISPIDVARAVRPLPNWKSPGPDGLQNFWLKWYSSSHALLASQFQSSLESGSLPQFLTTGVTHLLHKTGSTAEPKNYRPITCLSTVYKLLTSILRTKINNHIENNSIMSASQNGCRNGSRGTKELLLIDMAISQQVRRSRKDLSTCWIDYKKAYDSVPHTWLMRVLELYKIDATLRTFLESCMGEWNTVLRYPGCRSIREDDEPIWIKRGIFQGDSLSPLWFCLALNPLSTLLEDSGLGYRLRRGGQVLSHLLYMDDLKLIAPNKLQLMELLKVTETFSSAIRMEFGVDKCAVMHVKRGEIMESEGIQLSDSIHLRSLSSTETYKYLGMSEALGINVTDMKQSLRERFFSRLKKVLNSLLSGGNKVRAFNGWVMPVLMYSFGILKWTQTELDALDRRVRTLLTANRMHHPRSSVMRLYIPRKCGGRGFLNAKTLHNREVCSLREYFQKTDVGMHRDVVAVDKGLTPLSMAKENWRKPVVLTTDDRREVWKNKELHGRFYRALHEPDVDFGASVAWLRFSNLFGETEGFICAIMDEVILTNNYRRYIMKDGTVDVCRACHRPGESIRHIISGCSRLANGEYLHRHNQVARIIHQQLALKYKLMESEVPYYRYVPDPVLENDHVTLYWDRSIITDRTIIANKPDIVVIDRLARRAMIVDVTIPHDENLVKAEKEKKIKYLDLAHEVVDLWNVDSAVIVPIVVSVNGLIAKSFDDHLSKLALRGWIKGLIQKAVLLDTARIVRRFLSLEP

SEQ ID NO: 28523 - protein, 1199 aa, Noctua pronuba
MITRAASRRARLPTPDSSLSSASPPPDPGSPVLPAAAVASSSSDEYFSPPTSPTPVRRQGRGRPPRSLGLRGHPAPSRVPATGGCVQRMRWTHPINENVMRAYYGSTEGGTNLTAYRVRMLSLFQVLEPTVNVSAQRLSDQVRVIQRNHMLDDAALDRLRSEVLSNPIVLTPSQTVVQASTIDITPPRSNPAVAEEDDRVATVSSQCNDRLRSALEDALREYRYTRTEFRPRLPRLPMHKKNRALVCALDSQLKNLFESSENLVDTHSILYCGAVAACRLANVKFTNSDTATRPKPAVPAWQCRIERRIDGARVLIGKLHCFREGNTRPRVMRFVRRAFSGTGISPQEYMSRVTERIDFLKQKVYAWANRIRRYKRRVDRYSQNRMFQSDERWVYRAWERPEQNMTDVCRPDDATTSSFWSSIWSVPVCHTEADWMRDVERMCEPIPEMEPILITPQDIARAVRPLPNWKSPGPDGLHNFWLKWLSSSHTCLASQFQSSLESGSLPQFLTTGVTHLLHKSGSPAEPKNYRPITCLSTVYKLLTSILRAKINTHIDKNSIMSASQNGCRNGSRGTKELLLIDMAISQQVRRSRKDLSTCWIDYKKAYDSVPHTWLMRVLELYKVDATLRAFLESCMGQWRTVLRYPGCRQIQGNNEPVWIKRGIFQGDSLSPLWFCLALNPLSTLLEDSGLGYRLRRGGQIISHLLYMDDLKLFAPNKLRLMELLKVTETFSSAIRMEFGVDKCAVMYVKRGEIMESEGIQLSDSIHLRSLSSSESYKYLGMSEALGINVTDMKQSLRERFFGRLKKVLNSLLSGGNKVRAFNGWVMPVLMYSFGILKWTQTELDALDRRVRTLLTANRMHHPRSSVMRLYIPRKCGGRGFLNAKTLHNREVCSLREYFLKAEVGMHRDVVAVDKGFTPLSMAKENWRKPVVLTTDDRKEVWQGKELHGRFYRALHGPDVDFLASVSWLRFGDLFGETEGFVCAIMDEVMLTNNYRKYIMKDGTVDVCRACHRPGESIRHIISGCSRLANGEYLHRHNQVARIIHQQLALKYKLVESEVPYYKYVPDPVLEKDHVTLYWDRSIITDRTIVANKPDIVVIDRSARRVMIVDVTIPHDENLVKAEKEKQIKYLDLAHEVVDMWNVNSAVIVPIVVTANGLMAKSFDDHLSKLSLGGWIKGLIQKAVLLDTARIVRRFLSLEP

SEQ ID NO: 28524 - protein, 1199 aa, Noctua pronuba
MITRAASRRARPPTPDSSLSSASPPPDPGSPVLPAAAVASSSSDEYFSPPTSPTPVRRQGRGRPPRSLGLRGHPAPSRVPATGGCVQRMRWTHPINENVMRAYYGSTEGGTNLTAYRVRMLSLFQVLEPTVNVSAQRLSDQVRVIQRNHMLDDAALDRLRSEVLSNPIVLTPSQTVVQASTIDITPPRSNPAVAEEDDRVATVSSQCNDRLRSALEDALREYRYTRTEFRPRLPRLPMHKKNRALVCALDSQLKNLFESSENLVDTHSILYCGDVAACRLANVKFTNSDTATRPKPAVPAWQCRIERRIDGARVLIGKLHCFREGNTRPRVMRFVRRAFSGTGISPQEYMSRVTERIDFLKQKVYAWANRIRRYKRRVDRYSQNRMFQSDERWVYRAWERPEQNMTDVCRPDDATTSSFWSSIWSVPVCHTEADWMRDVERMCEPIPEMEPILITPQDIARAVRPLPNWKSPGPDGLHNFWLKWLSSSHTCLASQFQSSLESGSLPQFLTTGVTHLLHKSGSPAEPKNYRPITCLSTVYKLLTSILRAKINTHIDKNSIMSASQNGCRNGSRGTKELLLIDMAISQQVRRSRKDLSTCWIDYKKAYDSVPHTWLMRVLELYKVDATLRAFLESCMGQWRTVLRYPGCRQIQGNNEPVWIKRGIFQGDSLSPLWFCLALNPLSTLLEDSGLGYRLRRGGQVISHLLYMDDLKLFAPNKLRLMELLKVTETFSSAIRMEFGVDKCAVMYVKRGEIMESEGIQLSDSIHLRSLSSSESYKYLGMSEALGINVTDMKQSLRERFFGRLKKVLNSLLSGGNKVRAFNGWVMPVLMYSFGILKWTQTELDALDRRVRTLLTANRMHHPRSSVMRLYIPRKCGGRGFLNAKTLHNREVCSLREYFLKAEVGMHRDVVAVDKGFTPLSMAKENWRKPVVLTTDDRKEVWQGKELHGRFYRALHGPDVDFLASVSWLRFGDLFGETEGFVCAIMDEVMLTNNYRKYIMKDGTVDVCRACHRPGESIRHIISGCSRLANGEYLHRHNQVARIIHQQLALKYKLVESEVPYYKYVPDPVLEKDHVTLYWDRSIITDRTIVANKPDIVVIDRSARRVMIVDVTIPHDENLVKAEKEKQIKYLDLAHEVVDMWNVNSAVIVPIVVTANGLMAKSFDDHLSKLSLGGWIKGLIQKAVLLDTARIVRRFLSLEP

SEQ ID NO: 28525 - protein, 868 aa, Noctua pronuba
MRFVRRAFSGTGISPQEYMSRVTEHIDFLKQKVYAWANRIRRYKRRVDRYSQNRMFQSDERWVYRAWERPEQNMTDVCRPDDATTSSFWSSIWSVPVCHTEADWMRDVERMCEPIPEMEPILITPQDIARAVRPLPNWKSPGPDGLHNFWLKWLSSSHTCLASQFQSSLESGSLPQFLTTGVTHLLHKSGSPAEPKNYRPITCLSTVYKLLTSILRAKINTHIDKNSIMSASQNGCRNGSRGTKELLLIDMAISQQVRRSRKDLSTCWIDYKKAYDSVPHTWLMRVLELYKVDATLRAFLESCMGQWRTVLRYPGCRQIQGNNEPVWIKRGIFPGDSLSPLWFCLALNPLSTLLEDSGLGYRLRRGGQVISHLLYMDDLKLFAPNKLRLMELLKVTETFSSAIRMEFGVDKCAVMYVKRGEIMESEGIQLSDSIHLRSLSSSESYKYLGMSEALGINVTDMKQSLRERFFGRLKKVLNSLLSGGNKVRAFNGWVMPVLMYSFGILKWTQTELDALDRRVRTLLTANRMHHPRSSVMRLYIPRKCGGRGFLNAKTLHNREVCSLREYFLKAEVGMHRDVVAVDKGFTPLSMAKENWRKPVVLTTDDRKEVWQSKELHGRFYRALHGPDVDFLASVSWLRFGDLFGETEGFVCAIMDEVMLTNNYRKYIMKDGTVDVCRACHRPGESIRHIISGCSRLANGEYLHRHNQVARIIHQQLALKYKLVESEVPYYKYVPDPVLEKDHVTLYWDRSIITDRTIVANKPDIVVIDRSARRVMIVDVTIPHDENLVKAEKEKQIKYLDLAHEVVDMWNVNSAVIVPIVVTANGLMAKSFDDHLSKLSLGGWIKGLIQKAVLLDTARIVRRFLSLEP

SEQ ID NO: 28526 - protein, 888 aa, Ochropleura plecta
MRFVRRAFSGTGISPQEYMSRTTERIDFLKQKVYAWANRIRRYKRRVDRYSQNRMFRSDERWVYRAWERPEQSVTDVCRPDDVATSSFWHSIWSVPVCHTEADWMRDVERVCETIPEMEPILITSLDIASAVRPLPNWKSPGPDGLHNFWLKWLSSSHTRLASQFQSCLESGSLPQFLTTGVTHLLYKSGSPAEPKNYRPITCLSTVYKLLTSILRAKINSHIDNNSIMSASQNGCRNGSRGTKELLLIDMAISQQVRRSRKDLSTCWIDYKKAYDSVPHTWLKRVLELYKIDATLRAFLESCMGQWRTVLRYPGCRQIQGNDEPVWIKRGIFQGDSLSPLWFCLALNPLSTLLEDSGLGCRLRRGGQVISHLLYMDDLKLFAPNKLRLMELLKVTETFSNAIRMEFGVDKCAVMYVKRGEIMESEGIQLSDSIHLRSLSSSESYKYLGMSEALGINVADMKQLLRERFFGRLKKVLKSLLSGGNKVRAFNSWVMPVIMYSFGILKWTQTELDALDRRVRTLLTGNRMHHPRSSVMRLYIPRKCGGRGFLNAKTLHNREVCSLREYFLKTDVGMHRDVVAVDKGLTPLSMAKENWRKPVVLTTDDRKVVWQGKELHGRFYKALHGPDVDFLASVSWLRFGDLFGETEGFVCAIMDEVMLTNNYRKYIMKDGTVDVCRACHRPGESIRHIISGCSRLANSEYLHRHNQVARIIHQQLALKYNLVESEVPYYKYVPDPVLEKDHVTLYWDRSIITDRTIVANKPDIVVINRSARRVMIIDVTIPHDENLVKAEKEKQLKYLDLAHEVVDMWNVNSANYCADCRNGQWLNCQEPRRTSVEALLRWLDQGPDSEGSTPRYGPHCEEVPVSGALTTGSLDPAPVTGGNLFLYF

SEQ ID NO: 28527 - protein, 1207 aa, Ochropleura plecta
MLTRRRAQEQQALPSSPGSSLSSASQPPGRATRVSAVSPVAAVASSSSDEFFSPPSSPPPPPTRQRRGRGRPPAGLGSRGQQAPIRVPAAGGNVSRMRWTSFINANVMRAYYGSTEGGTNLTAYRVRMLSLFQDLEPTINVSAQRLSDQVRVIQRNHLLDDAALDRLRSEVLSNRVILTTPQTAVQASAIDVTQPRSNPAVVEEDDRVATVSSQCNDRLRSALEDALRDYRSTPAELRPRLPRLPMHKKNRALVCALDSQLKNLFESSEDLVDTHSILYCGAVAVCRLANVKFPNCDVATRPKPSVPAWQCMIERRIDEARALIGKLYCFREGNTRPRVMRFVRRAFSGTGISPQEYMSRTTERIDFLKQKVYAWANRIQRYKRRVDRYSQNRMFRSDERWVYRAWERPEQSVTDVCRPDDVATSSFWHSIWSVRVCHTEAGWMRDVERVCETIPEMEPILITSLDIASAVRPLPNWKSPGPDGLHNFWLKWLSSSHTRLASQFQSCLESGSLPQFLTTGVTHLLYKSGSPAEPKNYRPITCLSTVYKLLTSILRAKINSHIVKNSIISASQNGCRNGSRGTKELLLIDMAISQQVRRSRKDLSTCWIDYKKAYDSVPHTWLKRVLELYKIDTTLRTFLESCMGQWRTVLRYPGCRQIQGNDEPVWIKRGIFQGDSLSPLWFCLALNPLSTLLEDSGLGYRLRRGGQVISHLFYMDDLKLFAPNKLRLMELLKVTETFSNAIRMEFGVDKCAVMYVKRGEIMESEGIHLSDSIHLRSLSSSESYKYLGMSEALGINVADMKQLLRERFFGRLKKVLKSLLSGGNKVRAFNSWVMPVLMYSFGILKWTQTELDALDRRVRTLLTANRMHHPRSSVMRLYIPRKCGGRGFLNAKTLHNREVCSLREYFLKTDVGMHRDVVAVDKGLTPLSMAKENWRKPVVLTTDYRKEVWQGKELHGRFYKALHGPDVDFLASVSWLRFGDLFGETEGFVCAIMDEVMLTNNYRKYIMKDGTVDVCRACHRPGESIRHIISGCSRLANGEYLHRHNQVARIIHQQLALKYNLVESEVPYYKYVPDPVLEKDHVTLYWDRSIITDRTIVANKPDIVVIDRSARRVMIIDVTIPHDENLVKAEKEKQLKYLDLAHEVVDMWNVNSAIIVPIVITANGLIAKSLDEHLSKLSLGGWIKGLIQKAVLLNTARIVRRFLSLEP

SEQ ID NO: 28528 - protein, 1199 aa, Hecatera dysodea
MITRAASRRARPPSPDPSLSSASPPPDVEPPVSPAAAVASSSSDEYFSPPTSPTPVRRQGRGRPPRGLGPRSQPAPSRVPATGGCVQRMKWTQSINENVMRAYYGSTEGGTNLTAYRARMLSLFQDLEPTVDVSAQRLSDQVRVIQRNHRLDDAALDRLRSEVLDNPIISTSTQTVVPVPSSGAITSRTINVCDEVDDRIVTVSSQCNDRLRSALEDALREYRSTPTELRPRLPRLPMHKRNRALVCALDSLLQNIFESSENLVDTHSILYCGAVAACRVADVKFTNSDGATRPKTAAPAWQCRIERRIDEARVLIGKLYCFREGNTRPRVMRFVRRAFSGTEISPQEYISRVTERIDFLKQKVCAWANRIRRYKRRVDRYSQNRMFQSDERWVYRSWERPEQSVTDVCRPDDIVTSTFWRSIWSVPVRHTEGDWMRGVERACEAIPQMEKITITPTDVATAVRPLLNWKSPGPDGLHNFWLKWYSSSHAVLASQFQSSLESGSLPQFLTTGVTHLLHKTGSPAEPKNYRPITCLSTVYKLLTSILRVKINEHIESNLIMSSSQNGCRKGSRGTKELLLIDMTISQQVRRTRKDMSTCWIDYKKAYDSVPHTWLMKVLELYKIDATLRTFLESCMRQWKTVLCYPGCRPIQGNDEPVWIKRGIFQGDSLSPLWFCLALNPLSTLLEDSGLGYRLRRGGQAISHLLYMDDLKLFAHNKLRLMELLKITETFSSAIRMEFGVDKCAVMHVKKGEIMESEGVQLSDSIQVRSLSSTETYKYLGMSEALGINVADMKQSLKERFFGRLKKVLNSLLSGGNKVRAFNGWVMPVLMYSFGILKWTQTELDALDRRVRTLLTANRMHHPRSSVMRLYIPRKCGGRGFLNAKTLHNREMCSLREYFLKADVGMHRDVVAVDKGLTPLSMANENWRKPVIHTTDDRKEVWKGKELHGRFYRALYGSDVDFSASVAWLRFGDLFGETEGFVCAIMDEVILTNNYRRHIMKDGTVDVCRACHRPGESIRHIISGCSRLANGEYLHRHNQVARIIHQQLALKYRLVDSEVPYYKYVPDPVLENGHVTLYWDRSIITDRTIVANKPDIVVIDRLARRTMIIDVTIPHDENLVKAEKEKQIKYLDLAHEVVDMWNVDSAVIVPIVVTANGLMAKSFDDHLSKLALHGWLKGLIQKAVLLDTARIVRRFLSLEP

SEQ ID NO: 28529 - protein, 1200 aa, Hecatera dysodea
MMLTRAATLRARHPPPGSPLSSASPPPDIESQVSPTAAVASSSSDEYFSPPTSPTPVRRQGRGRPPRSLGSRGQPAPSRVPAAGGCVQRMRWTQSMNENVMRAYYGSTEGGTNLTAYRVRMLSLFQDLEPAVNVSAQRLSDQVRVIQRSHRLDDAALERLRSEVLNNLIISTQTQTAVQAPVRGANTPQANNDSDEVDDRVVTVSSQYNNRLRSALEDALREYRSTPTELRPRLPRLPMHKKNRALVCALDSLLQNTFVSSENLVDTHSILYCGAVAACRLANVKFPSGDEAIRPKPAAPAWQCRIERRIDEARALIGKLYCFREGNTRPRVMRFVRRAFAGTGISPHEYTSRITERIDFLKQKVCAWANRIRRYKRRVDRYSQNRMFQSDERWVYRTWERPEQSVTDVCRPDDIATTTFWRSIWSVPVRHTEGDWMRDVERVCEAIPQMEKITITPTDIATAVRPLPNWKSPGPDGLHNFWLKWYSSSHAVLASQFQSSLESGSLPQFLTTGITHLLHKTGSPAEPKNYRPITCLSTVYKLLTSILRVKINEHMESNSIMSSSQNGCRKGSRGTKELLLIDMAISQQVRRSRKDLSTCWIDYKKAYDSVPHTWLMKVLELYKIDATLRTFLESCMRQWKTVLRYPGCRPIQGSDEPIWIKRGIFQGDSLSPLWFCLALNPLSTLLEDSGLGYRLRRGGQAISHLLYMDDLKLFAPNNLRLMELLKVTETFSSAIRMEFGVDKCAVMHVKKGEIMESEGIQLSDSIQVRSLSSTETYKYLGMSEALGINGADMKQSLKERFFGRLKKVLNSLLSGGNKVRAFNGWVMPVLMYSFGILKWTQTELDALDRRVRTLLTANRMHHPRSSVMRLYIPRKCGGRGFLNAKTLHNREMCSLREYFLETDVGMHRDVVAVDKGLTPLSMAKENWRKPVIHTTDDRKEVWKGKELHGRFYRALYGSDVDFSASVAWLRFGDLFGETEGFVCAIMDEVILTNNYRRHIMKDGTVDVCRACHRPGESIRHIISGCSRLANSEYLHRHNQVARIIHQQLALKYKLVDSEVPYYKYVPDPVLENGHVTLYWDRSIITDRTIVANKPDIVVIDRLARRTMIIDVSIPHDENLVKAEKEKQIKYLDLAHEVVDMWDMDSAVIVPIIVTANGLMAKSFDDHLSKLALRSWVKGLIQKAVLLDTARIVRRFLSLQP

SEQ ID NO: 28530 - protein, 1111 aa, Hecatera dysodea
MRWTQSMNENVMRAYYGSTEGGTNLTAYRLRMLSLFQDLEPTVNVSAQRLSDQVRVIQRSHRLDDAALERLRSEVLNNLIISTQTQTAVQAPVSGANTPQANNDSDEVDDRVVTVSSQYNNRLRSALEDALREYRSTPTELRPRLPRLPMHKKNRALVCALDSLLQNTFVSSENLVDTHSILYCGAVAACRLANVKFPSGDEAIRPKPAAPAWQCRIERRIDEARALIGKLYCFREGNTRPRVMRFMRRAFAGTGISPHEYTSRITERIDFLKQKVCAWANRIRRYKRRADRYSQNRMFQSDERWVYRTWERPEQSVTDECRPDDIATTTFWRSIWSVPVRHTEGDWMRDVERVCEAIPQMEKITITPTDIATAVRPLPNWKSPGPDGLHNFWLKWYSSSHAVLASQFQSSLESGSLPQFLTTGITHLLHKTGSPAEPKNYRPITCLSTVYKLLTSILRVKINEHIESNSIMSSSQNGCRKGSRGTKELLLIDMAISQQVRRSRKDLSTCWIDYKKAYDSVPHTWLMKVLELYKIDATLRTFLESCMRQWKTVLRYPGCRLIQGSDEPIWIKRGIFQGDSLSPLWFCLALNPLSTLLEDSGLGYRLRRGGQAISHLLYMDDLKLFAPNNLRLMELLKVTETFSSAIRMEFGVDKCAVMHVKKGEIMESEGIQLSDSIQVRSLSSTETYKYLGMSEALGINGADMKQSLKERFFGRLKKVLNSLLSGGNKVRAFNGWVMPVLMYSFGILKWTQTELDALDRRVRTLLTANRMHHPRSSVMRLYIPRKCGGRGFLNAKTLHNREMCSLREYFLETDVGMHRDVVAVDKGLTPLSMAKENWRKPVIHTTDDRKEVWKGKELHGRFYRALYGSDVDFSASVAWLRFGDLFGETEGFVCAIMDEVILTNNYRRHIMKDGTVDVCRACHRPGESIRHIISGCSRLANSEYLHRHNQVARIIHQQLALKYKLVNSEVPYYKYVPDPVLENDHVTLYWDRSIITDRTIVANKPDIVVIDRLARRTMIIDVSIPHDENLVKAEKEKQIKYLDLAHEVVDMWDVDSAVIVPIIVTANGLMAKSFDDHLSKLALRSWVKGLIQKAVLLDTARIVRRFLSLQP

SEQ ID NO: 28531 - protein, 1200 aa, Mythimna impura
MLTRAATRRARPSPLGSSLSSASPPPDLGSPVSPTAAVASSSSDEYFSPPTSPTPVRRPGRGRPPKSLGPRGQPAPSRVPATGGCVQRMKWTQSMNENVMRAYYGSTEGGTNLTAYRVRMLSLFQELEPTVNVTAQRLSDQVRVIQRNHRLDGAALDRLRSEVLSNRIISTPSQTQTEAPQATDAILPRSNHIDDEADDRVVTVSSQCNDRLRSALEDALREYRSTPIALRPRLPRLPMHKKNRALVCALDSLLENVFESSVNLADTHSILYCGAIAACRLANVKLPSCDGATRPKPAAPAWQCRIERRIDEARALIGKLYCFREGNTRPRVMRYVRRAFSGTEISPREYLSRVTERIDFLKQKVCAWANRIRRYKRRVDRYSQNRMFQSDERWVYRAWERPEQNVTDVTRPDAVATNTFWRNIWSVPVCHTEDGWMREVKRVCEAIPEMEKIVISPIDVARAVRPLPNWKSPGPDGLQNFWLKWYSSSHALLASQFQSSLESGSLPQFLTTGVTHLLHKTGSTAEPKNYRPITCLSTVYKLLTSILRTKINKHIDSNSIMSASQNGCRNGSRGTKELLLIDMAISQQVRRSRKDLSTCWIDYKKAYDSVPHTWLMRVLELYKIDATLRTFLESCMGQWNTVLRYPGCRSIRRDDEPIWIKRGIFQGDSLSPLWFCLALNPLSTLLEESGLGYRLRRGGQVLSHLLYMDDLKLIAPNKLRLMELLKVTETFSSAIRMEFGVDKCAVMHVKRGEIMESEGIQLSDSIHFRSLSSTETYKYLGMSEALGINVADMKQSLKERFFGRLKKVLNSLLSGGNKVRAFNGWVMPVLMYSFGILKWTQTELDAVDRRVRTLLTANRMHHPRSSVMRLYIPRKCGGRGFLNAKTLHNREVCSLREYFHKTDVGMHRDVVAVDKGLTPLSMAKENWRKPVVLTTDDRKEVWKSKELHGRFYRALHESDIDFAASVAWLRFSNLFGETEGFICAIMDEVILTNNYRRYIMKDGTVDVCRACHRPGESIRHIISGCSRLANGEYLHRHNQVARIIHQQLALKYNLVDYEVPYYRYVPDPVLENDHVTLYWDRSIITDRTIVANKPDIVVIDRLARRVMIVDVTIPHDENLVKAEKEKQIKYLDLAHEVVDMWNVDSAVIVPIVVTANGLIAKSFDDHLSKLSLRGWIKSLIQKAVLLDTARIVRRFLSLEP

SEQ ID NO: 28532 - protein, 1112 aa, Mythimna impura
MKWTQSMNENVMRAYYGSTEGGTNLTAYRVRMLSLFQELEPTVNVTAQRLSDQVRVIQRNHRLDGAALDRLRSEVLSNRIISTPSQTQTEAPQATDATLPRSNHIDDEADDRVVTVSSQCNDRLRSALEDALREYRSTPIALRPRLPRLPMHKKNRALVCALDSLLENVFESSVNLADTHSILYCGAIAACRLANVKLPSCDGATRPKPAAPAWQCRIERRIDEARALIGKLYCFREGNTRPRVMRYVRRAFSGTEISPREYLSRVTERIDFLKQKVCAWANRIRRYKRRGDRYSQNRMFQSDERWVYRAWERPEQNVTDVTRPDAVATNTFWRNIWSVPVCHTEDGWMREVERVCEAIPEMEKIVISPIDVARAVRPLPNWKSPGPDGLQNFWLKWYSSSHALLASQFQSSLESGSLPQFLTTGVTHLLHKTGSTAEPKNYRPITCLSTVYKLLTSILRTKINKHIDSNSIMSASQNGCRNGSRGTKELLLIDMAISQQVRRSRKDLSTCWIDYKKAYDSVPHTWLMRVLELYKIDATLRTFLESCMGQWNTVLRYPGCRSIRRDDEPIWIKRGIFQGDSLSPLWFCLALNPLSTLLEESGLGYRLRRGGQVLSHLLYMDDLKLIAPNKLRLMELLKVTETFSSAIRMEFGVDKCAVMHVKRGEIMESEGIQLSDSIHFRSLSSTETYKYLGMSEALGINVADMKQSLKERFFGRLKKVLNSLLSGGNKVRAFNGWVMPVLMYSFGILKWTQTELDAVDRRVRTLLTANRMHHPRSSVMRLYIPRKCGGRGFLNAKTLHNREVCSLREYFHKTDVGMHRDVVAVDKGLTPLSMAKENWRKPVVLTTDDRKEVWKSKELHGRFYRALHESDIDFAASVAWLRFSNLFGETEGFICAIMDEVILTNNYRRYIMKDGTVDVCRACHRPGESIRHIISGCSRLANGEYLHRHNQVARIIHQQLALKYNLVDYEVPYYRYVPDPVLENDHVTLYWDRSIITDRTIVANKPDIVVIDRLARRVMIVDVTIPHDENLVKAEKEKQIKYLDLAHEVVDMWNVDSAVIVPIVVTANGLIAKSFDDHLSKLSLRGWIKGLIQKAVLLDTARIVRRFLSLEP

SEQ ID NO: 28533 - protein, 1111 aa, Phlogophora meticulosa
MRWTQSMNENVMRAYYGSTEGGTNLTAYRVRMLSLFQGFEPTVNVSAQRLSDQVRVIQRNHRLDDAALDRLRSEMLSNHIVLTLTQTAVQAPAFNAILPRSNHVSNEADDRVDTVCSQYNDRLRSALEDALREYRSTPTELRPRLPRLPMHRKNRALVCALDSLLKNFFESSEDLVDTHSILYCAAVAACRLANVKFPKNDLAIRPKPAVPAWQSRIERRIDGARVLIGKLYCFREGNTRPRVMRFVRRAFSGTGISPREYMSRIVERIDFLKQKVCAWANRIRRYKRRVDRYSQNRMFQSDERWVYRAWERPEQDVAGEHRPDDVATNAFWRSIWSVPAHHVEAHWMSDYESVCETIPEMEKIIITPEDVATAVRPVPNWKSPGPDGLHNFWLKWLSSSHTRLASQFQSCLESGSLPQFLTTGITHLLYKSGSTTEPKNYRPITCLSTVYKLLTSILRAKITEHIVGNSIMSASQNGCRNGSRGTKELLLIDMAISQQVRRSRKDLSTCWIDYKKAYDSVPHAWLTRVLELYKIDATLRTFLASCMGQWKTVLRYPGCRQIQGNDEPIWIKRGIFQGDSLSPLWFCLALNPLSTLLEDSGLGYRLKRGGQVISHLLYMDDLKLFAPNNLRLMELLKITESFSSAIRMEFGVDKCAVMHVKRGEIVESEGIQLSDSIHLRSLSSSENYKYLGMSEALGINATDMKQSLKERFFGRLKKVLNCLLSGGNKVRAFNGWVMPVLMYSFGILKWTQTELDALDRRVRTLLTANRMHHPRSSVMRLYIPRKCGGRGFLNAKTLHNREVCNLRDYFLKTEVGMHRDVVAVDKGLTPLSMAKENWRKPVVLTTDDRKQVWQSKELHGRFYRALHGPDVDFLASVSWLRFGDLFGETEGFVCAIMDEVILTNNYRKHIMKDGTVYMCRACHRPGESIRHIISGCSRLANSEYLHRHNQVARIIHQQLALRYKLVESEVPYYKYVPDPVLEDDRVTLYWDRSIITDRTIVANKPDIVVIDRLARRAMIVDVTIPHDENLVKAEKEKQIKYLDLAHEVVDMWNVDSAVIVPIVVTANGLLAKSLDDHLSRLSLHGWIKGLIQKAVLLDTARIVRRFLSLQP

SEQ ID NO: 28534 - protein, 1201 aa, Xestia xanthographa
MMLTRAAAARRAHQPTPDSSLSSASPPPDTGSPASPVAAVASSSSDEYFSPPTSPPPVRRARRGRPPKSLGLRDQQAPSRVPATGGCVQRMKWTQSINENVMRAFYGSTEGGTNLTAYRVRMLSLFQDLEPTVNVSAQRLSDQVRVIQRSHRLDDAALDRLRSEVLSNRIVFTPTQTAVQVTAIDAILPRSNPAVVEEDDRVATVSSQCNDRLRSALENALHEYRSTPTELRPRLPRLPMHKKNRALVCALDSQLKNIFESSENLVDTHSILFCGAVAACRVANVKFPNYDVATRPKPAVPAWQHRIERRIDGARVLIGKLYCFREGNTRPRVMRFVRRAFSGTEISPQEYMSRVTERIDFLKQKVYAWANRIRRYKRRVDRYSQNRMFQSDERWVYRAWERPEQNMTDVCRPDDAATSSFWRSIWSVPVCHTEADWMRDVERACEPIPEMEPIFITPLDVARAVRPLPNWKSPGPDGLHNFWLKWFSSSHACLASQFQSSLESGSLPQFLTTGVTHLLHKSDSPAEPKNYRPITCLSTIYKLLTSILRVKINTHIDKNSIMSASQNGCRNGSRGTKELLLIDMAISQQVRRSRKDLSTCWIDYKKAYDSVPHTWLMRVLELYKIDATLRAFLESCMGQWKTVLRYPGCRQIQGSDEPVWIKRGIFQGDSLSPLWFCLALNPLSTLLENSGLGCRLRKDGQVISHLLYMDDLKLFAPNKLRLMELLKVTETFSSAIRMEFGVDKCAVMYVKRGEIMESEGTQLSDSIHLRSLSSTETYKYLGMSEALGINVTDMKQSLRERFFGRLRKVLNSLLSGGNKVRAFNGWVMPVLMYSFGILKWTQTELDALDRRVRTLLTESRMHHPRSSVMRLYIPRKCGGRGFLNAKTLHNREVCSLREYFLKAEVGMHRDVVAVDKGLTPLSMAKENWRKPLVLTTNDRKEVWQGKELHGRFYRALHGPDVDFLASVSWLRFGDLFGETEGFVCAIMDEVMLTNNYRKYIMKDGTVDVCRACHLPGESIRHIISGCSRLANGEYLHRHNQVARIIHQQLALKYKLVESEVPYYKYVPDPVLEKDHVTLYWDRSIITDRTIVANKPDIVMIDRSARRVMIIDVTIPHDENLVKAEKEKQIKYLDLAHEVHDMWNMNSVIIMPIVVTANGLIAKSFDDHLSMLSVGGWIKGLIQKAVLLDTARIVRRFLSLQP

SEQ ID NO: 28535 - protein, 1201 aa, Xestia xanthographa
MMLTRAAAARRAHLPTPDSSLSSASPPPDPRSPVSPVAAVASSSSDEYFSPPTSPPPVRRAGRGRPPTSLGLRGRQAPSRVPATGGCVQRMKWTQSMNENVMRAYYGSTEGGTNLTAYRVRMLSLFQDLEPTVIVSAQRLSDQVRVIQRSHRLDDAALDRLRSEVLSNLIVLTPTQTAVQVSAIDATPPRLNPDVVEEDDGVATVSSQCNDRLRSALENALHEYRSTPTELRPRLPRLPMHKKNRALVCALDSQLKNIFESSENLVDTHSILFCGAVAACRIANVKFPNCDVATRPKPAVPAWQRRIERRIDGARVLIGKLYCFREGNTRPRVMRFVRRAFSGTEISPQEYMSRATERIDFLKQKVYAWANRIRRYKRRVDRYSQNRMFQSDERWVYRAWERPEQNMTDVCRPDDAATSSFWRSIWSVPVCHTEADWMRDVERVCEPIPEMEPIFITPVDVARAVRPLPNWKSPGPDGLHNFWLKWFSSSHTCLASQFQSSLESGSLPQFLTTGVTHLLHKSGSPAEPKNYRPITCLSTIYKLLTSILRVKINTHIDKNSIMSASQNGCRNGSRGTKELLLIDMAISQQVRRSRKDLSTCWIDYKKAYDSVPHTWLMRVLELYKVDTTLRTFLESCMGQWKTVLRYPGCRQIQGSDEPVWIKRGIFQGDSLSPLWFCLALNPLSTLLENSGLGCRLRKDGQVISHLLYMDDLKLFAPNKLRLMELLKVTETFSSAIRMEFGVDKCAVMYVKRGEIMESEGLQLSDSIHLKSLSSSETYKYLGMSEALGINVTDMKQSLRERFFGRLRKVLNSLLSGGNKVRAFNGWVMPVLMYSFGILKWTQTELDALDRRVRTLLTESRMHHPRSSVMRLYIPRKCGGRGFLNAKTLHNREVCSLREYFLKAEVGMHRDVVAVDKGLTPLSMAKENWHRPEVLTTDDRKEVWQGKVLHGRFYRALHGPDVDFIASVSWLRFGDLFGETEGFVCAIMDEVMLTNNYRKYIMKDGTVDVCRACHLPGESIRHIISGCSRLANGEYLHRHNQVARIIHQQLALKYKLVESEVPYYKYVPDPVLENDHVTLYWDRSIITDRTIVANKPDIVMMDRSARRVMIIDVTIPHDENLVKAEKEKQIKYLDLAHEVRGMWNMNSVIIVPIVVSANGLIAKSFDDHLSKLSLGGWIKGLIQKAVLLDTARIVRRFLSLQP

SEQ ID NO: 28536 - protein, 1080 aa, Xestia xanthographa
MLSLIQDLEPTVIVSAQRLSDQVRVIERSHRLDDAALDRLRSEVLSNLIVLTPTQTAVQVSAIDATPPRLNPAVVEEDDGVATVSSQCNDRLRSALENALHEYRSTPTELRPRLPRLPMHKKNRALVCALDSQLKNIFESSENLVDTHSILFCGAVAACRIANVKFPNCDVATRPKPAVPAWQRRIERRIDGARVLIGKLYCFREGNTRPRVMRFVRRAFSGTEISPQEYMSRATERIDFLKQKVYAWANRIRRYKRRVDRYSQNRMFQSDERWVYRAWERPEQNMTDVCRPDDATTSSFWRSIWSVPVCHTEADWMRDVERVCEPIPEMEPICITPLDVARAVRPLPNWKTPGPDGLHNFWLKWFSSSHTCLASQFQSSLESGSLPQFLTTGVTHLLHKLGSPAEPKNYRPITCLSTIYKLLTSILRVKINTHIDKNSIMSASQNGCRNGSRGTKELLLIDMAISQQVRRSRKDLSTCWIDYKKAYDSVPHTWLMRVLELYKVDTTLRTFLESCMGQWKTVLRYPGCRQIQGSDEPVWIKRGIFQGDSLSPLWFCLALNPLSTLLKNSGLGCRLRKDGQVISHLLYMDDLKLFAPNKLRLMELLKVTETFSSAIRMEFGVDKCAVMYVKRGEIMESEGLQLSDSIHLKSLSSSETYKYLGMSEALGINVTDMKQSLRERFFGRLRKVLNSLLSGGNKVRAFNGWVMPVLMYSFGILKWTQTELDALDRRVRTLLSESRMHHPRSSVMRLYIPRKCGGRGFLNAKTLHNREVCSLREYFLKAEVGMHRDVVAVDKGLTPLSMAKENWHRPEVLTTDDRKEVWQGKELHGRFYRALHGPDVDFLASVSWLRFGDLFGETEGFVCAIMDEVMLTNNYRKYIMKDGTVDVCRACHLPGESIRHIISGCSRLANGEYLHRHNQVARIIHQQLALKYKLVESEVPYYKYVPDPVLENDHVTLYWDRYIITDRTIVANKPDIVMMDRSARRVMIIDVTIPHDENLVKAEKEKQIKYLDLAHEVRGMWNMNSVIIVPIVVTANGLIAKSFDDHLSKLSLGGWIKGLIQKAVLLDTARIVRRFLSLQP

SEQ ID NO: 28537 - protein, 1202 aa, Cosmia trapezina
MLTRSAARARPPPPDSSLSSASPPPVSSPTVSAVTTPAAVVASSSSDEYFSPPTSPIPVRRQGRGRPPKSLGLGGQPAPSRVPAAGGCVQRMRWTQSMNENVMRAYYGSTEGGTNLTAYRVRMLSLFQELEPTVNVSAQRLSDQVRVIQRNHRLDDAALDRLRSEILSDRIVSTQAQTAVQDSIIDALPPRSNHVVEEEDDRVATVSSQSNDRLRSALEDAFREYRSTPTELRPRLPRLPMHKKNRALVCALDSHLKDFFESSEDLVDTHSILYCAAVAACRLANVKFPNCDGANRSKPAVPAWQCRIERRIDGARVLIGKLYCFREGNTRPRVMRFVRRAFSGTGISPPEYMSRVTERIDFLKQKVCAWASRIRRYKRRVDRYTQNRMFQSDERWVYRAWERPEQNVTDVCRPDDAATSAFWRSIWSVPVCHAEAGWMQDVERVCETIPEMETVLITPLDVARAVRPFPNWKSPGPDGLHKFWLKWLISSHTCLASQFQSSFESGSLPQFLTTGVTHLLHKSGSPVEPKNYRPITCLSTVYKLLTSILRAKINTHIASNSIISASQNGCRTGSRGTKELLLIDMAISQQVRRSRKDLSTCWIDYKKAYDSVPHTWLLKVLELYKIDATLRTFLESCMGQWRTVLRYPGCQQIRGSDEPVWIKRGIFQGDSLSPLWFCLALNPLSTLLEDSGLGYRLRRGGQVISHLLYMDDLKLFAPNELRLMELLKVTETFSGAIRMEFGVDKCAVMHVKRGEIMESEGIQLTDSIYLRSLSSSETYKYLGMSEALGINVADVKQSLKERFFGRLKKVLISLLSGGNKVRAFNGWVMPVLMYSFGILKWTQTELDALDRRVRTLLTANRMHHPRSSVMRLYIPRKCGGRGFLNAKTLHNREVCSLREYFLKADVGMHRDVVAVDKGLTPLSMAKENWRKSVLLTTDDRRKVWQSKELHGRFYRALHEPGVDFLASVSWLRFSDLFGETEGFVCAIMDEVILTNNYRRYIMKDGTVDVCRACHRPGESIRHIISGCSRLANGEYLHRHNQVARIIHQQLALKYKLVDSEVPYYKYVPDPVLENDHVTLYWDRSIITDRTIVANKPDIVVIDRLARRAMIVDVTIPHDGNLVKAEKEKQIKYLDLAHEVVDMWNVDSAVIVPIVVTANGLIADSLDQHLSRLSLGGWIKGQIQKAVLLDTARIVRRFLSLQP

SEQ ID NO: 28538 - protein, 1199 aa, Mamestra brassicae
MLTRAALQRARPPPPDPSLSSASPPPDIGSPLSPAVAVASSSSDEYFSPPTSPTPVRRQGRGRPPRGLGPRGQPAPSRVPATGGCVQRMRWTQSMNENVMRAYYGSTEGGTKLTAYRVRMLSLFQDLEPTVNVSAQRLSDQVRVIQRNHRLDDAALDRLRSEVLNNLIISTPTQTAVQAPVNGRITPRPNNVSDEVDDRVVTVSSQCNDRLRSALEDALREYRSTPTELRPRLPRLPMHKKNRALVCALDSLLQNIFESSESLVDTHSIMYCGAVAACRIANVKFPGCDEAIRPKPAAPAWQRRIERRIDETRALIGKLYCFREGNTRPRVMRFVRRAFSGTEISPRDFKSRVTERIDFLKQKVCAWASRIRRYKRRVDRYSQNRMFQSDERWVYRAWERPEQSVTDVCRPDDVATSIFWRSIWSVPICHAEGGWMRDVERVCEVIPQMEKITITTLDVAKAVRPLPNWKSPGPDGLHNFWLKWYSSSHALLASQFQSSLDSGSLPQFLTTGVTHLLHKTGSPTEPKNYRPITCLSTVYKLLTSILRAKINEHIESNSIMSASQNGCRKGSRGTKELLLIDMAISQQVRRSRKDLSTCWIDYKKAYDSVPHTWLMKVLELYKIDATLRTFLESCMRQWKTVLRYPGCRPIQGSDEPVWIKRGIFQGDSLSPLWFCLALNPLSTLLEDSGLGYRLRRGGQAISHLLYMDDLKLFAPNNLRLMELLKVTETFSSAIRMEFGVDKCAVMHVKKGEIMESEGIHLSDSIQVRSLSSTETYKYLGMLEALGINGIDMKQSLKERFFGRLKKVLNSLLSGGNKVRAFNGWVMPVLMYTFGILKWTQTELDALDRRVSTLLTANRMHHPRSSVMRLYIPRKCGGRGFLNAKTLHNREMCSLREYFLKADVGMHRDVVAVDKGLTPLSMAKENWHTPVILTTDDRKEVWKGKELHGRFYRALHGSDVDFSASVAWLRFGDLFGETEGFVCAIMDEVILTNNYRRHIMKDGTVDMCRACHRPGESIRHIISGCSRLANGEYLHRHNQVARIVHQQLALKYNLVDSEVPYYKYVPDPILENDHVTLYWDRSIITDRTIVANKPDIVVIDRLARRTMVIDVTIPNDENLVKAEKEKQIKYLDLAHEVVDMWNVESAVIVPIIVTANGLMAKSFDDHLSKLALRSWVKGLIQKAVLLDTARIVRRFLSLEP

SEQ ID NO: 28539 - protein, 1199 aa, Mamestra brassicae
MLTRAALQRARPPPPDPSLSSASPPPDIGSPLSPAVAVASSSSDEYFSPPTSPTPVRRQGRGRPPRGLGPRGQPAPSRVPATGGCVQRMRWTQSMNENVMRAYYGSTEGGTNLTAYRVRMLSLFQDLEPTVNVSAQRLSDQVRVIQRNHRLDDAALDRLRSEVLNNLIISTPTQTAVQAPVNGRITPRPNNVSDEVDDRVVTVSSQCNDRLRSALEDALREYRSTPTELRPRLPRLPMHKKNRVLVCALDSLLQNIFESSESLVDTHSILYCGAVAACRIANVKFPGCDEAIRPKPAAPAWQRRIERRIDETRALIGKLYCFREGNTRPRVMRFVRRAFSGTEIIPRDFTSRVTERIDFLKQKVCAWASRIRRYKRRVDRYSQNRMFQSDERWVYRAWERPEQSVTDVCRPDDVATSIFWRSIWSVPICHAEGGWMRDVERVCEAIPQMEKITITTLDVAKAVRPLPNWKSPGPDGLHNFWLKWYSSSHALLASQFQSSLDSGSLPQFLTTGVTHLLHKTGSPTEPKNYRPITCLSTVYKLLTSILRAKINEHIESNSIMSASQNGCRKGSRGTKELLLIDMAISQQVRRSRKDLSTCWIDYKKAYDSVPHTWLMKVLELYKIDATLRTFLESCMRQWKTVLRYPGCRPIQGSDEPVWIKRGIFQGDSLSPLWFCLALNPLSTLLEDSGLGYRLRRGGQAISHLLYMDDLKLFAPNNLRLMELLKVTETFSSAIRMEFGVDKCAVMHVKKGEIMESEGIHLSDSIQVRSLSSTETYKYLGMLEALGINGTDMKQSLRERFFDRLKKVLNSLLSGGNKVRAFNGWVMPVLMYTFGILKWTQTELDALDRRVRTLLTANRMHHPRSSVMRLYIPRKCGGRGFLNAKTLHNREMCSLRECFLKADVGMHRDVVAVDKGLTPLSMAKENWRTPVILTTDDRKEVWKGKELHGRFYRALHGSDVDFSASVAWLRFGDLFGETEGFVCAIMDEVILTNNYRRHIMKDGTVDMCRACHRPGESIRHIISGCTRLANGEYLHRHNQVARIIHQQLALKYNLVDSEVPYYKYVPDPVLENDHVTLYWDRSIITDRTIVANKPDIEVIDRLARRTMIIDVTIPHDENLVKAEKEKQIKYLDLAHEVVDMWNVESAVIVPIVVTANGLMAKSFDDHLSKLALRSWVKGLIQKAVLLDTARIVRRFLSLEP

SEQ ID NO: 28540 - protein, 1202 aa, Noctua fimbriata
MITRAASRRARLPPPDQSLSSASPPPESSPIVSAVTPAVAVASSSSDEYFSPPTSPTPVRRQGRGRPPRSLGLRGHPAPSRVPAAGGCVQRMRWTHSINENVMRAYYGSTEGGTNLTAYRVGMLSLFQVLEPTINVSAQRLSDQVRVIQRNHMLDDAVLDRLRSEVLSNRIVFTPAQTAVQASVIDATPPRFNPAVVEEDDRVAVVSSQSNDRLRSALEDALREYRSTPTELRPRLPRLPMHNKNRALVCALDSQLKNLFESSENLVDTHSILYCGAVAACRLANVKFPNCDVATRPKPAVPAWQRRIECRIDGARVLIGKLHCFREGNTRPRVMRFVRRAFSGTGISPQEYMSRVTERIDFLKQKVYAWANRIRRYKRRVDRYSQNRMFQSDERWVYRAWERPDQNMTDMCRPDDAATSSFWRSIWSVPVCHTEADWMRDVEQVCEPIPEMEPILITPLDVARAVRPLPNWKSPGPDGLHNFWLKWLSSSHTCLASQFQSSLESGSLPQFLTTGVTHLLHKSGSPAEPKNYRPITCLSTVYKLLTSILRAKINTHIDKNSIMSASQNGCRNGSRATKELLLIDMAISQQVRRSRKDLSTCWIDYKKAYDSVPHTWLMRVLELYKIDATLRAFLESCMGQWRTVLRYPGCRQIQGNDEPVWIKRGIFQGDSLSPLWFCLALNPLSTLLEDSGLGYRLRRGGQVISHLLYMDDLKLFAPNKLQLMELLKVTETFSSAIRMEFGVDKCAVMYVKRGEIMESEGIQLSDSIHLRTLSSTESYKYLGMSEALGINVTDMKQSLKERFFGRLNKVLHSLLSGGNKVRAFNGWVMPVLMYSFGVLKWTQTELDALDRRVRTLLTANRMHHPRSSVMRLYIPRKCGGRGFLNAKSLHNREMCSLREYFLKVEVGMHRDVVAVDKGLTPLSMAKENWRKPEVLTTDDRKEVWQGKELHGRFYRALHGPDVDFLASVSWLRFGDLFGETEGFVCAIMDEVMLTNNYRKYIMKDGTVDVCRACHRPGESIRHIISGCSRLANGEYLHRHNQVARIIHQQLALKYKLVESEVPYYKYVPDPVLEKDHVTLYWDQSIITDRTIVANKPDIVVIDRSARRVMIVDVTIPHDENLVKAEKEKQIKYLDLAHEVVDMWNVNSAIIVPIVVTANGLIAKSLDDHLSKLSLGGWIKGLIQKAVLLDTARIVRRFLSLEP

SEQ ID NO: 28541 - protein, 1183 aa, Noctua fimbriata
MITRAASRRARLPPPDQSLSSASPPPESSPIVSAVTPAVAVASSSSDEYFSPPTSPTPVRRQGRGRPPRSLGLRGHPAPSRVPAAGGCVQRMRWTHSINENVMRAYYGSTEGGTNLTAYRVGMLSLFQVLEPTINVSAQRLSDQVRVIQRNHMLDDAVLDRLRSEVLSNRIVFTPAQTAVQASVIDATPPRFNPAVVEEDDRVAVVSSQCNDRLRSALEDALREYRSTPTELRPRLPRLPMHNKNRALVCALDSQLKNLFESSENLVDTHSILYCGSVAACRLANVKFPNCDVATRPKPAVPAWQCRIECRIDGARVLIVKLHCFREGNTRPRVMRFVRRAFSGTGISPQEYMSRVTERIDFLKQKVYAWANRIRRYKRRVDRYSQNRMFQSDERWVYRAWERPELNMVDVCRPDDATTSSFWRSIWSVPVCHTEADWMRDVERVCEPIPEMEPILITPLDIARAVRPLPNWKSPGPDGLHNFWLKWLSSSHTCLASQFQSSLESGYLPQFLTTGVTHLLHKSGSPAEPKNYRPITCLSTVYKLLKSILRAKINTHIDKNSIMSASQNGCRNGSRGTKELLLIDMAISQQVRRSRKDLSTCWIDYKKAYDSVPHTWLMRVLELYKIDATLRAFLESCMGQWRTVLRYPGCRQIQGNDEPVWIKRGIFQGDSLSPLWFCLALNPLSTLLEDSGLGYRLRRGGQVISHLLYMDDLKLFAPNKLRLMELLKVTETFSSAIRMEFGVDKCAVMYVKQGEIMESEGIQLSDSIHLRTLSSTESYKYLGMSEALGINITDMKQSLKERFFGRLNKVLHSLLSGGNKVRAFNGWVMPVLMYSFGVLKWTQTELDALDRRVRTLLTANRMHHPRSSVMRLYIPRKCGGRGFLNAKSLHNREMCSLREYFLKVEVGMHRDVVAVDKGLTPLSMAKENWRKPEVLTIDDRKEVWQGKELHGRFYRALHGPDVDFLASVSWLRFGDLFGETEGFVCAIMDEVMLTNNYRKYIMKDGTVDVCRACHRPGESIRHIISGCSRLANGEYLHRHNQVARIIHQQLALKYKLVESEVPYYKYVPDPVLEKDHITLYWDQSIISDRSIVANKPDIVVIDRSARRVMVVDVTIPHDENLVKAEKEKQIKYLDLAHEVVDMWNVNSANNNIIIFFFFRTTMIQRVNYVMGSGGVQKKHQSFH

SEQ ID NO: 28542 - protein, 1202 aa, Noctua fimbriata
MITRAAYRRARLPPPDPSLRSASPPPESSPIVSAVTPAVAVASSSSDEYFSPPTSPTPVRRQGRGRPPRSLGLRGHPAPSRVPAAGGCVQRMRWTHSINENVMRAYYGSTEGGTNLTAYRVGMLSLFQVLEPTVNVSAQRLSDQVRVIQRNHMLDDAVLDRLRSEVLSNRIVLTPAQTAVQASVIDATPPRFNPAVVEEDDRVAVVSSQCNDRLRSALEDALREYRSTPTELRPRLPRLPMHNKNRALVCALDSQLENIFESSENLVDTPSILYCGAVAACRLANVKFPNCDVATRPKPAVPAWQRRIERRIDGARVLIGKLHCFREGNTRPRVMRFVRRAFSGTGISPQENMSRVTERIDFLKQKVYAWANRIRRYKRRVDRYSQNRMFQSYERWVYRAWERPELNMTDVCRPDDAATSSFWRSIWSVPVCHTEADWMRDVERVCEPIPEMEPILITRLDIARAVRPLPNWKSPGPDGLHNFWLKWLSSSHTCLASQFQSSLESGSLPQFLTTGVTHLLHKSGSPAEPKNYRPITCLSTVYKLLTSILRAKINTHIDKNSIMSASQNGCRSGSRGTKELLLIDMAISQQVRRSRKDLSTCWIDYKKAYDSVPHTWLMRVLELYKIDATLRAFLESCMGQWRTVLRYPGCGQIQGNDEPVWIKRGIFQGDSLSPLWFCLALNPLSTLLEDSGLGYRLRRGGQVISHLLYMDDLKLFAPNKLQLMELLKVTETFSSAIRMEFGVDKCAVMYVKQGEIMESEGIQLSDSIHLRTLSSTESYKYLGMSEALGINITDMKQSLKERFFGRLNKVLHSLLSGGNKVRAFNGWVMPVLMYSFGVLKWTQTELDALDRRVRTLLTANRMHHPRSSVMRLYIPRKCGGRGFLNAKSLHNREMCSLREYFLKVEVGMHRDVVAVDKGLTPLSMAKENWRKPEVLTTDDRKEVWQGKELHGRFYRALHGPDVDFLASVSWLRFGDLFGETEGFVCAIMDEVMLTNNYRKYIMKDGTVDVCRACHRPGESIRHIISGCSRLANGEYLHRHNQVARIIHQQLALKYKLVESEVPYYKYVPDPVLEKDHVTLYWDQSIITDRTIVANKPDIVVIDRSARRVMIVDVTIPHDENLVKAEKEKQIKYLDLAHEVVDMWNVNSAIIVPIVVTANGLIAKSLDDHLSKLSLGGWIKGLIQKAVLLDTARIVRRFLSLEP

SEQ ID NO: 28543 - protein, 1206 aa, Noctua fimbriata
MITRSRAKQLQEAHTPSPGSSLSSASQPPRRATSVSTVSPVAAVASSSSDEFFSPPSTPPPSPRRRGRGRPPAGLGPRGQPAPNRVPAAGGNVSRMRWTQSINEQVMRANYGATEGGTNLTAYRVGMLSLFQVLEPTVNVSAQRLSDQVRVIQRNHMLDDAVLDRLRSEVLSNRIVLTPAQTAVQASVIDATPPRFNPAVVEEDDRVAVVSSQCNDRLRSALEDALCEYRSTPTELRPRLPRLPMHNKNRALVCALDSQLENIFESSENLVDTHSILYCGAVAACRLANVKFPNCDVATRPKPAVPAWQRRIERRIDGARVLIGKLHCFREGNTRPRVMRFVRRAFSGTGISPQEYMSRVTERIDFLKQKVYAWANRIRRYKRRVDRYSQNRMFQSDERWVYRAWERPELNMTDVCRPDDAATSSFWRSIWSVPVCHTEADWMRDVERVCEPIPEMEPILITPLDIARAVRPLPNWKSPGPDGLHNFWLKWLSSSHTCLASQFQSSLESGSLPQFLTTGVTHLLHKSGSPAEPKNYRPITCLSTVYKLLTSILRAKINTHIDKNSIMSASQNGCRNGSRGTKELLLIDMAISQQVRRSRKDLSTCWIDYKKAYDSVPHTWLMRVLELYKIDATLRAFLESCMGQWRTVLRYPGCRQIQGNDEPVWIKRGIFQGDSLSPLWFCLALNPLSTLLEDSGLGYRLRRGGQVISHLLYMDDLKLFAPNKLRLMELLKVTETFSSAIRMEFGVDKCALMYVKQGEIMESEGIQLSDSIHLRTLSSTESYKYLGMSEALGINVTDMKQSLKERFFGRLNKVLHSLLSGGNKVRAFNGWVMPVLMYSFGVLKWTQTELDALDRRVRTLLTANRMHHPRSSVMRLYIPRKCGGRGFLNAKSLHNREMCSLREYFLKVEVGMHRDVVAVDKGLTPLSMAKENWRKPEVLTTDDRKEVWQGKELHGRFYRALHGPDVDFLASVSWLRFGDLFGETEGFVCAIMDEVMLTNNYRKYIMKDGTVDVCRACHRPGESIRHIISGCSRLANGEYLHRHNQVARIIHQQLALKYKLVESEVPYYKYVSDPVLEKDHVTLYWNQSIITDRTIVANKPDIVVIDRSARRVMIVDVTIPHDENLVKAEKEKQIKYLDLAHEVVDMWNVNSAIIVPIVVTANGLIAKSLDDHLSRLSLGGWIKGLIQKAVLLDTARIVRRFLSLEP

SEQ ID NO: 28544 - protein, 1202 aa, Noctua fimbriata
MITRAASRRARLPPPDQSLSSASPPPESSPIVSAVTPAVAVASSSSDEYFSPPTSPTPVRRQGRGRPPRSLGLRGHPAPSRVPAAGGCVQRMRWTHSINENVMRAYYGSTEGGTNLTAYRVGMLSLFQVLEPTINVSAQRLSDQVRVIQRNHMLDDAVLDRLRSEVLSNRIVFTPAQTAVQASVIDATPPRFNPAVVEEDDRVAVVSSQCNDRLRSALEDALREYRSTPTELRPRLPRLPMHNKNRALVCALDSQLKNLFESSENLVDTHSILYCGAVAACRLANVKFPNCDVATRPKPAVPAWQRRIECRIDGARVLIGKLHCFREGNTRPRVMRFVRRAFSGTGISPQEYMSRVTERIDFLKQKVYAWANRIRRYKRRVDRYSQNRMFQSDERWVYRAWERPDQNMTDMCRPDDAATSSFWRSIWSVPVCHTEADWMRDVEQVCEPIPEMEPILITPLDVARAVRPLPNWKSPGPDGLHNFWLKWLSSSHTCLASQFQSSLESGSLPQFLTTGVTHLLHKSGSPAEPKNYRPITCLSTVYKLLTSILRAKINTHIDKNSIMSASQNGCRNGSRGTKELLLIDMAISQQVRRSRKDLSTCWIDYKKAYDSVPHTWLMRVLELYKIDATLRAFLESCMGQWKTVLRYPGCRQIQGNDEPVWIKRGIFQGDSLSPLWFCLALNPLSTLLEDSGLGYRLRRGGQVISHLLYMDDLKLFAPNKLRLMELLKVTETFSSAIRMEFGVDKCAVMYVKQGEIMESEGIQLSDSIHLRTLSSTESYKYLGMSEALGINVTDMKQSLKERFFGRLNKVLHSLLSGGNKVRAFNGWVMPVLMYSFGVLKWTQTELDALDRRVRTLLTANRMHHPRSSVMRLYIPRKCGGRGFLNAKSLHNREMCSLREYFLKVEVGMHRDVVAVDKGLTPLSMAKENWRKPEVLTTDDRKEVWQGKELHGRFYRALHGPDVDFLASVSWLRFGDLFGETEGFVCAIMDEVMLTNNYRKYIMKDGTVDVCRACHRPGESIRHIISGCSRLANGEYLHRHNQVARIIHQQLALKYKLVESEVPYYKYVPDPVLEKDHVTLYWDQSIITDRTIVANKPDIVVIDRSARRVMIVDVTIPHDENLVKAEKEKQIKYLDLAHEVVDMWHMNSAVIVPIVVTANGLIAKSLDDHLSKLSLGGWIKGLIQKAVLLDTARIVRRFLSLEP

SEQ ID NO: 28545 - protein, 1202 aa, Noctua fimbriata
MITRAAYRRARLPPPDPSLSSASPPPESSPIVSAVTPAVAVASSSSDEYFSPPTSPTPVRRQGRGRPPRSLGLRGHPAPSRVPAAGGCVQRMRWTHSINENVMRAYYGSTEGGTNLTAYRVGMLSLFQVLEPTVNVSAQRLSDQVRVIQRNHMLDDAVLDRLRSEVLSNRIVLTPAQTAVQASVIDATPPRFNPAVVEEDDRVAVVSSQCNDRLRSALEDALREYRSTPTELRPRLPRLPMHNKNRALVCALDSQLENIFESSENLVDTHSILYCGAVAACRLANVKFSNCDVATRPKPAVPAWQRRIEHRIDGARVLIGKLHCFREGNTRPRVMRFVRRAFSGTGISPQEYMSRVTERIDFLKQKVYAWANRIRRYKRRVDRYSQNRMFQSDERWVYRAWERPELNMTDVCRPDDAATSSFWRSIWSVPVCHTEADWMRDVERVCEPIPEMEPILITPLDIARAVRPLPNWKSPGPDGLHNFWLKWLSSSHTCLASQFQSSLESGSLPQFLTTGVTHLLHKSGSPAEPKNYRPITCLSTVYKLLTSILRAKINTHIDKNSIMSASQNGCRNGSRGTKELLLIDMAISQQVRRSRKDLSTCWIDYKKAYDSVPHTWLMRVLELYKIDATLRAFLESCMGQWRTVLRYPGCRQIQGNDEPVWIKRGIFQGDSLSPLWFCLALNPLSTLLEDSGLGYRLRRGGQVISHLLYMDDLKLFAPNKLQLMELLKVTETFSSAIRMEFGVDKCAVMYVKRGEIMESEGIQLSDFIHLRSLSSSESYKYLGMSEALGINVTDMKQSLKERFFGRLNKVLHSLLSGGNKVRAFNGWVMPVLMYSFGVLKWTQTELDALDRRVRTLLTANRMHHPRSSVMRLYIPRKCGGRGFLNAKSLHNREMCSLREYFLKVEVGMHRDVVAVDKGLTPLSMAKENWRKPEVLTTDDRKEVWQGKELHGRFYRALHGPDVDFLASVSWLRFGDLFGETEGFVCAIMDEVMLTNNYRKYIMKDGTVDVCRACHRPGESIRHIISGCSRLANGEYLHRHNQVARIIHQQLALKFKLVESEVPYYKYVPDPVLEKNHVTLYWDQSIITDRTIVANKPDIVVIDRSARRVMIVDVTIPHDENLVKAEKEKQIKYLDLAHEVVDMWNVNSAIIVPIVVTANGLIAKSLDDHLSKLSLGGWIKGLIQKAVLLDTARIVRRFLSLEP

SEQ ID NO: 28546 - protein, 1050 aa, Noctua fimbriata
MLDDAVLDRLRSEVLSNRIVLTPAQTAVQASVIDATPPRFNPAVVEEDDRVAVVSSQCNDRLRSALEDALREYRSTPTELRPRLPRLPMHNKNRALVCALDSQLENIFESSENLVDTHSILYCGAVAACRLANVKFPNCDVATRPKPAVPAWQRRIERRIDGARVLIGKLHCFREGNTRPRVMRFVRRAFSGTGISPQEYMSRVTERIDFLKQKVYAWANRIRRYKRRVDRYSQNRMFQSDERWVYRAWERPELNMTDVCRPDDAATSSFWRSIWSVPVCHTEADWMRDVERVCEPIPEMEPILITPLDIARAVRPLPNWKSPGPDGLHNFWLKWLSSSHTCLASQFQSSLESGSLPQFLTTGVTHLLHKSGSPAEPKNYRPITCLSTVYKLLTSILRAKINTHIDKNSIMSASQNGCRNGSRGTKELLLIDMAISQQVRRSRKDLSTCWIDYKKAYDSVPHTWLMRVLELYKIDATLRAFLESCMGQWRTVLRYPGCRQIQRNDEPVWIKRGIFQGDSLSPLWFCLALNPLSTLLEDSGLGYRLRRGGQVISHLLYMDDLKLFAPNKLQLMELLKVTETFSSAIRMEFGVDKCAVMYVKQGEIMESEGIQLSDSIHLRTLSSTESYKYLGMSEALGINVTDMKQSLKERFFGRLNKVLHSLLSGGNKVRAFNGWVMPVLMYSFGVLKWTQTELDALDRRVRTLLTANRMHHPRSSVMRLYIPRKCGGRGFLNAKSLHNREMCSLREYFLKVEVGMHRDVVAVDKGLTPLSMAKENWRKPEVLTTDDRKEVWQGKELHGRFYRALHGPDVDFLASVSWLRFGDLFGETEGFVCAIMDEVMLTNNYRKYIMKDGTVDVCRACHRPGESIRHIISGCSRLANGEYLHRHNQVARIIHQQLALKYKLVESEVPYYKYVPDPVLEKNHVTLYWDQSIITDRTIVANKPDIVVIDRSARRVMIVDVTIPHDENLVKAEKEKQIKYLDLAHEVVDMWHVNSAIIVPIVVTANGLIAKSLDDHLSKLSLGGWIKGLIQKAVLLDTARIVRRFLSLEP

SEQ ID NO: 28547 - protein, 1202 aa, Noctua fimbriata
MITRAAYRRARLPPPDPSLSSASPPPESSPIVSAVTPAVAVASSSSDEYFSPPTSPTPVRRQGRGRPPRSLGLRGHPAPSRVPAAGGCVQRMRWTHSINENVMRAYYGSTEGGTNLTAYRVGMLSLFQVLEPTVNVSAQRLSDQVRVIQRNHMLDDAVLDRLRSEVLSNRIVLTPAQTAVQASVIDATPPRFNPAVVEEDDRVAVVSSQCNDRLRSALEDALREYRSTPTELRPRLPRLPMHNKNRALVCALDSQLKNLFESSENLVDTHSILYCGAIAACRLANVKFPNCDVATRPKPAVPAWQRRIERRIDGARVLIGKLHCFREGNTRPRVMRFVRRAFSGTGISPQEYMSRVTERIDFLKQKVYAWANRIRRYKRRVDRYSQNRMFQSDERWVYRAWERPELNMTDVCRPDDAATSSFWRSIWSVPVCHTEADWMRDVERVCEPIPEMEPILITRLDIARAVRPLPNWKSPGPDGLHNFWLKWLSSSHTCLASQFQSSLESGSLPQFLTTGVTHLLHKSGSPAEPKNYRPITCLSTVYKLLTSILRAKINTHIDKNSIMSASQNGCRSGSRGTKELLLIDMAISQQVRRSRKDLSTCWIDYKKAYDSVPHTWLMRVLELYKIDATLRAFLESCMGQWRTVLRHPGCGQIQGNDEPVWIKRGIFQGDSLSPLWFCLALNPLSTLLEDSGLGYRLRRGGQVISHLLYMDDLKLFAPNKLQLMELLKVTETFSSAIRMEFGVDKCAVMYVKQGEIMESEGIQLSDSIHLRTLSSTESYKYLGMSEALGINVTDMKQSLKERFFGRLNKVLHSLLSGGNKVRAFNGWVMPVLMYSFGVLKWTQTELDALDRRVRTLLTANRMHHPRSSVMRLYIPRKCGGRGFLNAKSLHNREMCSLREYFFKVEVGMHRDVVAVDKGLTPLSMAKENWRKPEVLTTDDRKEVWQGKELHGRFYRALHGPDVDFLASVSWLRFGDLFGETEGFVCAIMDEVMLTNNYRKYIMKDGTVDVCRACHRPGESIRHIISGCSRLANGEYLHRHNQVARIIHQQLALKYKLVESEVPYYKYVPDPVLEKDHVTLYWDQSIITDRTIVANKPDIVVIDRSARRVMIVDVTIPHDENLVKAEKEKQIKYLDLAHEVVDMWHMDSAVIVPIVVTANGLIAKSFDDHLSKLSLGGWIKGLIQKAVLLDTARIVRRFLSLEP

SEQ ID NO: 28548 - protein, 1080 aa, Noctua fimbriata
MLSLFQVLEPTINVSAQRLSDQVRVIQRNHMLDDAVLDRLRSEVLSNRIVFTPVQTAVQASVIDATPPRFNPAVVEEDDRVAVVSSQCNDRLRSALEDALREYRSTPTELRPRLPRLPMHNKNRALVCALDSQLKNLFESSENLVDTHSILYCGAVAACRLANVKFPNCDVATRPKPAVPAWQRRIECRIDGARVLIGKLHCFREGNTRPRVMRFVRRAFSGTGISPQEYMSRVTERIDFLKQKVYAWANRIRRYKRRVDRYSQNRMFQSDERWVYRAWERPDQNMTDMCRPDDAATSSFWRSIWSVPVCHTEADWMRDVEQVCEPIPEMEPILITPLDVARAVRPLPNWKSPGPDGLHNFWLKWLSSSHTCLASQFQSSLESGSLPQFLTTGVTHLLHKSGSPAEPKNYRPITCLSTVYKLLTSILRAKINTHIDKNSIMSASQNGCRNGSRATKELLLIDMAISQQVRRSRKDLSTCWIDYKKAYDSVPHTWLMRVLELYKIDATLRAFLESCMGQWRTVLRYPGCRQIQGNDEPVWIKRGIFQGDSLSPLWFCLALNPLSTLLEDSGLGYRLRRGGQVISHLLYMDDLKLFAPNKLQLMELLKVTETFSSAIRMEFGVDKCAVMYVKQGEIMKSEGIQLSDSIHLRTLSSTESYKYLGMSEALGINVTDMKQSLKERFFGRLNKVLHSLLSGGNKVRAFNGWVMPVLMYSFGVLKWTQTELDALDRRVRTLLTANRMHHPRSSVMRLYIPRKCGGRGFLNAKSLHNREMCSLREYFLKVEVGMHRDVVAVDKGLTPLSMAKENWRKPEVLTTDDRKEVWQGKELHGRFYRALHGPDVDFLASVSWLRFGDLFGETEGFVCAIMDEVMLTNNYRKYIMKDGTVDVCRACHRPGESIRHIISGCSRPANGEYLHRHNQVARIIHQQLALKYKLVESEVPYYKYVPDPVLEKDHVTLYWDQSIITDRTIVANKPDIVVIDRSARRVMIVDVTIPHDENLVKAEKEKQIKYLDLAHEVVDMWNVNSAIIVPIVVTANGLIAKSLDDHLSKLSLGGWIKGLIQKAVLLDTARIVRRFLSLEP

SEQ ID NO: 28549 - protein, 962 aa, Atethmia centrago
MHKKNRALVCALDSLLKDFFESSEDLVDTHSILYCAAVAACRLANVKFPNCDGATRPKPAVPAWQCRIERRIDGARVLIGKLYCFREGNTRPRVMRFVRRAFSGTGISPREYMSRVTERIDFLKQKVCAWASRIRRYKRRVDRCTQNRIFQSDERWVYRSWERPEQNETDVCRPDDATTTAFWRSIWSVPVCHAEADWMRDVERVCETIPEMEVVIITPSDIARAVRPLPNWKSPGPDGLHNFWLKWLTSSHTCLASQFQSSLESGSLPQFLTTGITHLLHKSGSPAEPKNYRPITCLSTVYKLLTSILRAKINTHIDSNSIMSASQNGCRNGSRGTKELLLIDMAISQQVRRFRKDLSTCWIDYKKAYDSVPHTWLMRVLELYKIDTTLRTFLESCMGQWRTVLRYPGCRQIQGNDEPVWIKRGIFQGDSLSPLWFCLALNPLSTLLEDSGLGYQLRRGGQVISHLLYMDDLKIFAPNKLQLMELLKVTETFSSAIRMEFGVDKCAVMHVKRGEIMESEGIQLSDSIHLRSLSSPESYKYLGMSEALGINVTDMKQSLKERFFGRLKKVLISPLSGGNKVRAFNGWVMPVLMYSFGILKWTQTELDALDRRVRTLLTANRMHHPRSSVMRLYIPRKCGGRGFLNAKTLHNREICSLREYFLKTEVGMHRDVVAVDKGLTPLSMAKENWCKPVILTTDDRKEIWQNKELHGRFYRALHEPDVDFLASVSWLRFGDLFGETEGFVCAIMDEVILTNNYRRHIMKDGTVDVCRACHRPGESIRHIISGCSRLANGEYLHRHNQVARIIHQQLALKYKLVNSEVPYYKYAPDPVLENDHVTLYWDRSIITDRTIVANKPDIVVIDRLARRAMIVDVTIPHDENLVKAEKEKQIKYLDLAHEVVDMWNVDSAVIVPIVVTANGLMAESLNHHLSRLSLGGWIKGLIQKAVLLDTARIVRRFLSLES

SEQ ID NO: 28550 - protein, 1202 aa, Atethmia centrago
MLTRSAARARPPPPDSSLSSASPPPVPSPTVSAVTTPAAVVALSSSDEYFSPPTSPTPVRRQGRGRPPKSLGLRGQLAPSRVPAAGGCVQRMRWTQSMNENVMRAYYGSTEGGTNLTAYRVRMLSLFQELEPTVNVSAQRLSDQVRVIQRNHRLDDAALDRLRSEVLSNHIVSTPAQTATHAPIIDAFPPRSNHDVEEEDDRVATVSSQCNVRLRSALEDAFREYRSTPTELRPRLPRLPMHKKNRALVCALDSLLKDFFESSEDLVDTHSILYCAAVAACRLANVKFPNCDEATRPKPAVPAWQYRIERRIDGARVLISKLYCFREGNTRPRVMRFVRRAFSGTGISPREYMSRVTERIDFLKQKVCAWASRIRRYKRRVDRYTQNRMFQSDERWVYRAWERPEQNETDMCRPDDATTTAFWRSIWSEPVCHAEADWMRDVERVCETIPEMEVVVITPSDIARAVRPLPNWKSPGPDGLHNFWLKWLTSSHTYLASQFQSSLESGSLPQFLTTGITHLLHKSGSPAEPKNYRPITCLSTVYKLLTSILRAKINTHIDSNSIMSASQNGCRNGSRGTKELLLIDMAISQQVRRSRKDLSTCWIDYKKAYDSVPHTWLMKVLELYKIDTTLRTFLESCMGQWRTVLRYPGCRRFQGNDEPVWIKRGIFQGDSLSPLWFCLALNPLSTLLEDSGLGYRLRRGGQVISHLLYMDDLKIFAPNKLRLMELLKVTETFSGAIRMEFGVDKCAVMHVKRGEIMESEGIQLSDSIHLRSLSSPESYKYLGMSEALGINVTDMKQLLKERFFGRLKKVLISLLSGGNKVRAFNGWVMPVLMYSFGILKWTQTELDALDRRVRTLLTANRMHHPRSSVMRLYIPRKCGGRGFLNAKTLHNREICSLREYFLKAEVGMHRDVVAVDKGLTPLSMAKENWCKPVVLTTDDRKEIWQNKELHGRFYRALHEPDVDFLASVSWLRFGDLFGETEGFVCAIMDEVILTNNYRRHIMKDGTVDVCRACHRPGESIRHIISGCSRLANGEYLHRHNQMARIIHQQLALKYKLVNSEVPYYKYVPDPVLENDHVTLYWDRSIITDRTIVANKPDIVVIDRLARRAMIVDVTIPHDDNLVKAEKEKQIKYLDLAHEVVDMWNVNSAVIVPIVVTANGLMAESLNHHLSRLSLGGWIKGLIQKAVLLDTARIVRRFLSLEP

SEQ ID NO: 28551 - protein, 962 aa, Atethmia centrago
MHKKNRALVCALDSLLKDFFESSEDLVDTHSILYCAAVAACRLANVKFPNCDGATRPKPAVPAWQCRIERRIDGARVLIGKLYCFREGNTRPRVMRFVRRAFSGTGISPREYMSRVTERIDFLKQKVCAWASRIRRYKRRVDRCTQNRMFQSDERWVYRSWEQPEQNETDVCRPDDATTTAFWRSIWSVPVCHAEADWMRDVERVCETIPEMEVVVITPSDIARAVRPLPNWKSPGPDGLHNFWLKWLTSSHTCLASQFQSSLESGSLPQFLTTGITHLLHKSGSPAEPKNYRPITCLSTVYKLLTSILRAKINTHIDSNSIMSASQNGCRNGSRGTKELLLIDMAISQQVRRFRKDLSTCWIDYKEAYDSVPHTWLMRVLELYKIDTTLRTFLESCMGQWRTVLRYPGCRQIQGNDEPVWIKRGIFQGDSLSPLWFCLALNPLSTLLEDSGLGYRLRRGGQVISHLLYMDDLKIFAPNKLQLMELLKVTETFSSAIRMEFGVDKCAVMHVKRGEIMESEGIQLSDSIHLRSLSSPESYKYLGMSEALGINVTDMKQSLKERFFGRLKKVLISPLSGGNKVRAFNGWVMPVLMYSFGILKWTQTELDALDRRVRTLLTANRMHHPRSSVMRLYIPRKCGGRGFLNAKTLHNRDICSLREYFLKTEVGMHRDVVAVDKGLTPLSMAKENWCKPVILTTDDRKEIWQNKELHGRFYRALHEPDVDFLASVSWLRFGDLFGETEGFVCAIMDEVILTNNYRRHIMKDGTVDVCRACHRPGESIRHIISGCSRLANGEYLHRHNQVARIIHQQLALKYKLVNSEVPYYKYAPDPVLENDHVTLYWDRSIITDRTIVANKPDIVVIDRLARRAMIVDVTIPHDENLVKAEKEKQIKYLDLAHEVVDMWNVDSAVIVPIVVTANGLMAESLNHHLSRLSLGGWIKGLIQKAVLLDTARIVRRFLSLES

SEQ ID NO: 28552 - protein, 1111 aa, Atethmia centrago
MRWTQSMNENVMRAYYGSTEGGTNLTAYRVRMLSLFQKLEPTVNVSAQRLSDQVRVIQRNHRLDDAALDRLRSEVLSNHIVSTPAQTATHAPIINAIPPRSNHDVEEEDDRVATVSSQCNVRLRSALEDAFREYRSTPTELRPRLPRLPMHKKNRALVCTLDSLLKDFFESSEDLVDTHSILYCAAVAACRLANVKFPNCDGATRPKPAVPAWQCRIERRIDGARVLIGKLYCFREGNTRPRVMRFVRRAFSGTGISPREYMSRVTERIDFLKQKVCAWASRIRRYKRRVDRYTQNRMFQSDERWIYRAWERPEQNETDVCRPDDATTTAFWRSIWSVPVCHAEADWMRDVERVCETIPEMDVVIITPSDIDRAVRPLPNWKSPGPDGLHNFWLKWLTSSHTCLASQFQSSLESGSLPQFLTTGITHLLHKSGSPAEPKNYRPITCLSTVYKLLTSILRAKINTHIDSNSIMSASQNGCRNGSRGTKELLLIDMAISQQVRRFRKDLSTCWIDYKKAYDSVPHTWLMRVLEFYKIDTTLRTFLESCMGQWRTVLRYPGCRQIQGNDEPVWIKRGIFQGDSLSPLWFCLALNPLSTLLEDSGLGYRLRRGGQVISHLLYMDDLKIFAPNKLQLMELLKVTETFSSAIRMEFGVDKCAVMHVKRGEIMESEGIQLSDSIHLRSLSSPESYKYLGMSEALGINVTDMKQSLKERFFGRLKKVLISPLSGGNKVRAFNGWVMPVLMYSFGILKWTQTELDALDRRVRTLLTANRMHHPRSSVMRLYIPRKCGGRGFLNAKTLHNREICSLREYFLKTEVGMHRDVVAVDKGLTPLSMAKENWCKPVILTTDDRKEIWQNKELHGRFYRALHEPDVDFLASVSWLRFGDLFGETEGFVCAIMDEVILTNNYRRHIMKDGTVDVCRACHRPGESIRHIISGCSRLANGEYLHRHNQVARIIHQQLALKYKLVNSEVPYYKYAPDPVLENDHVTLYWDRSIITDRTIVANKPDIVVIDRLARRAMIVDVTIPHDENLVKAEKEKQIKYLDLAHEVVDMWNVDSAVIVPIVVTPNGLMAESLNHHLSRLSLGGWIKGLIQKAVLLDTARIVIRFLSLES

SEQ ID NO: 28553 - protein, 997 aa, Atethmia centrago
MKWTQSMNENVMRAYYGSTEGGTNLTAYRVRMLSLFQELEPAVNVSAQRLSDQVRVIQRNRRLDDAALDRLRSEVLSNHIISTPAQTAVHTPIIDVIPPRSNHGVEEEDDRAATVSSQCNVRLRSALEDAFREYRSTPTELRPRLPRLPMHKKNRALMCALDSQLKVFFESSEDLVDTHSILYCAAVAACRLANVKFPNSDEATRPKPAVPAWQCRIERRIDGARVLIGKLYCFREGNTRPRVMRFVRRAFSGTGISPREYMSHITERIDFLKQKVCAWASRIRRYKRRVDRYTQNRMFQSDERWVYRAWERPKQNETDVCRPDDATTTAFWRSIWSVPVCHVEADWMRDVERVCETIPEMEVVIITPSDIARAVRPLPNWKSPGPDGLHNFWLKWLTSSHTCLASQFQSSLESGSLPQFMTTGITHLLHKSGSPAEPKNYRPITCLSTVYKLLTSILRAKINTHIDSNSIMSASQNGCRNGSRGTKELLLIDMAISQQVRRSRKDLSTCWIDYKKAYDSVPHTWLMRVLELYKIDMTLRTFLESCMGQWRTVLRYPGCRQIQGNDESVWIKRGIFQGDSLSPLWFCLALNPLSMQLEDSGLGYRLRRGGQVISHLLYMDDLKIFAPNKLQLMELLKVTETFSSAIRMEFGVDKCAVMHVKRGKIMESEGIRLSDSIHLRSLSSPESYKYLGMSEALGINVTDMKQSLKERFFGRLKKVLISLLSGGNKVRAFNGWVMPVLMYSFGILKWTQTELDALDRRVRTLLTANRMHHPRSSVMRLYVPRKCGGRGFLNAKTLHNREICSLREYFLKTEVGMHRDVVAVDKGLTPLSMAKENWCKPVVLTTDDRKEIWQNKELHGRFYRALHEPDVDFLASVSWLRFGDLFGETEGFVCAIMDEVILTNNYRRHIMKDGTVDVCRACHRPGESIRHIISGCSRLANGEYLHRHNQVARIIHQQLALKYKLVNSEVPYYKYVPDPVLENDHVTLYWDRSIITY

SEQ ID NO: 28554 - protein, 1203 aa, Atethmia centrago
MLTRAASKRARPPPPDSSLSSASPPPVSSPTVSAVITPAAVVASSSSDEYFSPPTSPTPVRRQGRDRPPKSLGLRGHPAPSRVPAAGGCVQRMRWTQSMNENVMRAYYGSTEGGTNLTAYRVRMLSLFQELEPTVNVSAQRLSDQVRVIQRNRRLDDATLDRLRSEVLSNYIISTPAQTVVHTPIIDVIPPRSNHGVEEEDDRAATVSSQCNVRLRSALEDAFREYRSTPTELRPRLPRLPMHKKNRALMCALDSQLKVFFESSEDLVDTHSILYCAAVAACRLANVKFPNSDGATRPKPAVPAWQCRIERRIDKARVLIGKLYCFREGNTRPRVMRFVRRAFSGTGISPREYMSHITERIDFLKQKVCAWASRIRRYKRRVDRYTQNRMFQSDERWVYRAWERPKQNVTDVCRPDDATTTAFWRSIWSVPVCHVEADWMRDVERVCETIPEMEVVIITPSDIARAVRPLPNWKSPGPDGLHNFWLKWLTSSHTCLASQFQSSLESGSLPQFMTTGITHLLHKSGSPAEPKNYRPITCLSTVYKLLTSILRAKINTHIDSNSIMSASQNGCRNGSRGTKELLLIDMAISQQVRRSRKDLSTCWIDYKKAYDSVPHTWLMRVLELYKIDTTLRTFLESCMGQWRTVLRYPGCRQIQGNDEPVWIKRGIFQGDSLSPLWFCLALNPLSMQLEDSGLGYRLRRGGQVISHLLYMDDLKIFAPNKLQLMKLLKVTETFSSAIRMEFGVDKCAVMHVKRGEIMESEGIQLSDSIHLRSLSSPESYKYLGMSEALGINVTDMKQSLKERFFGRLKKVLISLLSGGNKVRAFNSWVMPVLTYSFGILKWTQTELDALDRRVRTLLTANRMHHPRSSVMRLYIPRKCGGRGFLNAKTLHNREICSLREYFLKTEVGMHRDVVAVDKGLTPLSMAKENWCKPVVLTTDDRKEIWQSKELHGRFYRALHEPDVDLLASVSWLRFGDLFGETEGFVCAIMDEVILTNNYRRHIMKDGTVDVCRACHRPGESIRHIISGCSRLANGEYLHRHNQVARIIHQQLALKYKLVNSEVPYYKYVPDPVLENDHVTLYWDRSIITDRTIVANKPDIVVIDRLARRAMIVDVTIPHDDNLVKAEKEKQIKYLDLAHEVVDMWNVNSAVIVPIVVTANGLMARSLNHHLSRLALDGWIKGLIQKAVLLDTARIVRRFLSLEP

SEQ ID NO: 28555 - protein, 1202 aa, Atethmia centrago
MLTRSATRTRPPPPDPSLSSASPPPVPSATVSAMSTPTVAVASSSSDEYFSPPSSPTPVRRQGRSRPPKSLGLRGHPAPSRVPAAGGCVQRMKWTQSMNENVMRAYYGSTEGGTNLTAYRVKMLSLFQELEPAVNVSAQRLSDQVRVIQRNRRLDDAALDRLRSEVLSNHIISTPAQTAVHTPIIDVIPPRSNHGVEEEDDRAATVSSQCNVRLRSALEDAFREYRSTPTELRPRLPRLPMHKKNRALMCALDSQLKVFFESSEDLVDTHSILYCAAVAACRLANVKFPNSDGATRPKPAVPAWQCRIERRIDGARVLIGKLYCFREGNTRPRVMRFVRRAFSGTGISPREYMSHITERIDFLKQKVCAWASRIRRYKRRVDRYTQNRMFQSDERWVYRAWERPKQNETDVCRPDDATTTAFWRSIWSVPVCHVEADWMRDVERVCETIPEMEVVIITPSDIARAVRPLPNWKSPGPDGLHNFWLKWLTSSHTCLASQFQSSLESGSLPQFMTTGITHLLHKSGSPAEPKNYRPITCLSTVYKLLTSILRAKINTHIDSNSIMSASQNGCRNGSRGTKELLLIDMAISQQVRRSRKDLSTCWIDYKKAYDSVPHTWLMRVLELYKIDMTLRTFLESCMGQWRTVLRYPGCRQIQGNDESVWIKRGIFQGDSLSPLWFCLALNPLSMQLEDSGLGYRLRRGGQVISHLLYMDDLKIFAPNKLQLMELLKVTETFSSAIRMEFGVDKCAVMHVKRGEIMESEGIRLSDSIHLRSLSSPESYKYLGMSEALGINVTDMKQSLKERFFGRLKKVLISLLSGGNKVRAFNGWVMPVLMYSFGILKWTQTELDALDRRVRTLLTANRMHHPRSSVMRLYIPRKCGGRGFLNAKTLHNREICSLREYFLKTEVDMHRDVVAVDKGLTPLSMAKENWCKPVVLTTDDRKEIWQNKELHGRFYRALHEPDVDFLASVSWLRFGDLFGETEGFVCAIMDEVILTNNYRRHIMKDGTVDVCRACHRPGESIRHIISGCSRLANGEYLHRHNQVARIIHQQLALKYKLVNSEVPYYKYVPDPVLENDHVTLYWDRSIITDRTIVANKPDIVVIDRLARRAMIVDVTIPHDDNLVKAEKEKQIKYLDLAHEVVDMWNVNSAVIVPIVVTANGLMARSLNHHLSRLTLDGWIKGLIQKAVLLDTARIVRRFLSLES

SEQ ID NO: 28556 - protein, 962 aa, Atethmia centrago
MHKKNRALVCTLDSLLKDFFESSEDLVDTHSILYCAAVAACRLANVKFPNCDGATRPKPAVPAWQCRIERRIDGARVLIGKLYCFREGNTRPRVMRFVRRAFSGTGISPREYMSRVTERIDFLKQKVCAWASRIRRYKRRVDRYTQNRMFQSDERWVYRAWERPEQNETDVCRPDDATTTAFWGSIWSVPVCHAEADWMRDVERVCETIPEMDVVIITPSDIARAVRPLPNWKSPGPDGLHNFWLKWLTSSHTCLASQFQSSLESGSLPQFLTTGITHLLHKSGSPAEPKNYRPITCLSTVYKLLTSILRAKINTHIDSNSIMSASQNGCRNGSRGTKELLLIDMAISQQVRRFRKDLSTCWIDYKKAYDSVPHTWLMRVLEFYKIDTTLRTFLESCMGQWRTVLRYPGCRQIQGNDEPVWIKRGIFQGDSLSPLWFCLALNPLSTLLEDSGLGYRLRRGGQVISHLLYMDDLKIFAPNKLQLMELLKVTETFSSAIRMEFGVDKCAVMHVKRWEIMKSEGIQLSDSIHLRSLSSPESYKYLGMSEALGINVTDMKQSLKERFFGRLKKVLISPLSGGNKVRAFNGWVMPVLMYSFGILKWTQTELDALDRRVRTLLTANRMHHPRSSVMRLYIPRKCGGRGFLNAKTLHNREICSLREYFLKTEVGMHRDVVAVDKGLTPLSMAKENWCKPVILTTDDRKEIWQNKELHGRFYRALHEPDVDFLASVSWLRFGDLFGETEGFVCAIMDEVILTNNYRRHIMKDGTVDVCRACHRPGESIRHIISGCSRLANGEYLHRHNQVARIIHQQLALKYKLVNSEVPYYKYAPDPVLENDHVTLYWDRSIITDRTIVANKPDIVVIDRLARRAMIVDVTIPHDENLVKAEKEKQIKYLDLAHEVVDMWNVDSAVIVPIVVTANGLMAESLNHHLSRLSLGGWIKGLIQKAVLLDTARIVRRFLSLES

SEQ ID NO: 28557 - protein, 1105 aa, Atethmia centrago
MNENVMRAYYGSTEGGINLTAYRARMLSLFQELEPTVNVSAQRLSDQVRVIQRNHRLDDAALDRLLSEVLSNHIVSTPAQTATHAPIIDAIPPRSNHDVEEEDDRVATVSSQCNVRLRSALEDAFREYRSTPTELRPRLPRLPMHKKNRALVCALDSLLKDFFESSEDLVDTHSILYCAAVAACRLANVKFPNCDEATRPKPAVPAWQCRIERRIDGARVLISKLYCFREGNTRPRVMRFVRRAFSGTGISPREYMSRVTERIDFLKQKVCAWASRIRRYKRRVDRYTQNRMFQSDERWVYRAWERPEQNETDMCRPDDATTTAFWRSIWSEPVCHAEADWMRDVERVCETIPEMEVVVITPSDIARAVRPLPNWKSPGPDGLHNFWLKWLTSSHTCLASQFQSSLESGSLPQFLTTGITHLLHKSGSPAEPKNYRPITCLSTVYKLLTSILRAKINTHIDSNSIMSASQNGCRNGSRGTKELLLIDMAISQQVRRSRKDLSTCWIDYKKAYDSVPHTWLMKVLELYKIDTTLRTFLESCMGQWRTVLRYPGCRRIQGNDEPVWIKRGIFQGDSLSPLWFCLALNPLSTLLEDSGLGYRLRRGGQVISHLLYMDDLKIFAPNKLRLMELLKVTETFSGAIRMEFGVDKCAVMHVKRGEIMESEGIQLSDSIHLRSLSSPESYKYLGMSEALGINVTDMKQLLKERFFGRLKKVLISLLSGGNKVRAFNGWVMPVLMYSFGILKWTQTELDALDRRVRTLLTANRMHHPRSSVMRLYIPRKCGGRGFLNAKTLHNREICSLREYFLKAEVGMHRDVVAVDKGLTPLSMAKENWCKPVVLTTDDRKEIWQNKELHGRFYRALHEPDVDFLASVSWLRFGDLFGETEGFVCAIMDEVILTNNYRRHIMKDGTVDVCRACHRPGESIRHIISGCSRLANGEYLHRHNQVARIIHQQLALKYKLVNSEVPYYKYVPDPVLENDHVTLYWDRSIITDRTIVANKPDIVVIDRLARRAMIVDVTIPHDDSLVKAEKEKQIKYLDLAHEVVDMWNVNSAVIVPIVVTANGLMAESLNHHLSRLSLGGWIKGLIQKAVLLDTARIVRRFLSLEP

SEQ ID NO: 28558 - protein, 1151 aa, Mesoligia furuncula
MNTIKNKNNNIKIIGRPPNSLGLRGHPAPSRVPATGGCVQRMRWTQSMNENVMRAYYGSTEGGINLTAYRDRMLSLFQELEPTVNVSAQRLSDQVRVIQRNHRLDDIALDRLRSEVLSNHIVSTSAQTAAQVSTVDAIPPRFDRVEEEDDRVDTVSSQCNVRLRSALEDALREYRSTPTELRPRLPRLPMHKKNRALVCALDSQLKNFFESSEDLVDTHSVLYCAAVAACRLANVKFSSCDGATRPKPAVPAWQRRIERRIDGARVLIGKLYCFREGNTRPRVMRFVRRAFSGTGISPREYMSRVTERIDFLKQKVCAWASRIRRYKRRVDRYTQNRMFQSDERWVYRAWERPEQNVTDVCRPDDAATSAFWCSIWSVPVCHTEAGWMQDVERVCESVPEMEKVLITPSDVARAVRPLSNWKSPGPDGLHNFWLKWLISSHTCLASQFQSSLESGSLPQFLTTGVTHLLHKSGSPAEPKNYRPITCLSTVYKLLTSILRAKINKHIESNSIMSASQNGCRNGSRGTKELLLIDMAISQQVRRSRKDLSTCWIDYKKAYDSVPHTWLMRVLELYKIDATLRTFLESCMGQWKTVLRYPGCRQIQGNDEPVWIKRGIFQGDSLSPLWFCLALNPLSTLLEDSGLGYRLRRGGQVISHLLYMDDLKLFAPNKLRLMELLKVTKTFSSAIKMEFGVDKCAVMHVKRGEIMESEGIQLSDSISLRSLSSSESYKYLGMSEALGINDADMKQSLKERFFCRLKKVLISLLSGGNKVRAFNGWVMPVLMYSFGILKWTQTELDALDRRVRTLLTANRMHHPRSSVMRLYIPRKCGGRGFLNAKTLHNREVCSLREYFLKAEVGMHRDVVAVDKGLTPLSMAKENWRKPVVLSTDDRKRVWQSKELHGRFYRALHEPGVDFIASVSWLRFGDLFGETEGFVCAIMDEVILTNNYRRHIMKDGTVDVCRACHRPGESIRHIISGCSRLANGEYLHRHNQVARIIHQQLALKYKLVDSEVPYYKYVPDPVLENDHVTLYWDRSIITDRTIVANKPDIVVIDRLARRTMIVDVTIPHDGNLVKAEKEKQIKYLDLAHEVVDMWNVSSAIIVPIVVSANGLMAESLDQHLSRLSLGGWIKGLIQKAVLLDTARIVRRFLSLEP

SEQ ID NO: 28559 - protein, 814 aa, Mesoligia furuncula
MFQSDERWVYRAWERPEQNVTDVCRPDDAATSAFWCSIWSVPVCHTEAGWMQDVERVCESVPEMEKVLITPSDVARAVRPLSNWKSPGPDGLHNFWLKWLISSHTCLASQFQSSLESGSLPQFLTTGVTHLLHKSGSPAEPKNYRPITCLSTVYKLLTSILRAKINKHIESNSIMSASQNGCRNGSRGTKELLLIDMAISQQVRRSRKDLSTCWIDYKKAYDSVPHTWLMRVLELYKIDATLRTFLESCMGQWKTVLRYPGCRQIQGNDELVWIKRGIFQGDSLSPLWFCLALNPLSTLLEDSGLGYRLRRGGQVISHLLYMDDLKLFAPNKLRLMELLKVTKSFSSAIKMEFGVDKCAVMHVKRGEIMESEGIQLSDSISLRSLSSSESYKYLGMSEALGINDADMKQSLKERFFCRLKKVLISLLSGGNKVRAFNGWVMPVLMYSFGILKWTQTELNALDRRVRTLLTANRMHHPRSSVMRLYIPRKCGGRGFLNAKTLHNREVCSLREYFLKAEVGMHRDVVAVDKGLTPLSMAKENWRKPVVLSTDDRKRVWQSKELHGRFYRALHEPGVDFIASVSWLRFGDLFGETEGFVCAIMDEVILTNNYRRHIMKDGTVDVCRACHRPGESIRHIISGCSRLANGEYLHRHNQVARIIHQQLALKYKLVDSEVPYYKYVPDPVLENDHVTLYWDRSIITDRTIVANKPDIVVTDRLARRTMIVDVTIPHDGNLVKAEKEKQIKYLDLAHEVVDMWNVSSAIIVPIVVSANGLMTESLDQHLSRLSLGGWIKGLIQKAVLLDTARIVRRFLSLEP

SEQ ID NO: 28560 - protein, 1201 aa, Mesoligia furuncula
MLTRSAARRAHLPPPDSSLSPAPPPPEPSPIESAVTPAVAVASSSSDEYFSPPTSPTPVRRQGRGRPPNSLGLRGHPAPSRVPTTGGCVQRMRWTQSMNENVMRAYYGSTEGGINLTAYRDRMLSLFQELEPTVNVSAQRLSDQVRVIQRNHRLDDIALDRLRSEVLSNHIVSTSAQTAAQVSTVDAIPPRFNRVEEEDDRVDTVSSQCNVRLRSALEDALREYRSTPTELRPRLPRLPMHKKNRALVCALDSQLKNFFESSEDLVDTHSILYCAAVAACRLANVKFSSCDGATRPKPAVPAWQRRIERRIDGARVLIGKLYCFREGNTRPRVMRFVRRAFSGTGISPREYMSRVTERIDFLKQKVCAWASRIRRYKRRVDRYTQNRMFQSDERWVYRAWERPEQNVTDVYRPDDAATSAFWCSIWSVPVCHTEAGWMQDVERVCESVPEMEKVLITPSDVARAVRPLSNWKSPGPDGLHNFWLKWLISSHTCLASQFQSSLESGSLPQFLTTGVTHLLHKSGSPAEPKNYRPITCLSTVYKLLTSILRAKINKHIESNSIMSASQNGCRNGSRGTKELLLIDMAISQQVRRSRKDLSTCWIDYKKAYDSVPHTWLMRVLELYKIDATLRTFLESCMGQWKTVLRYPGCRQIQGNDEPVWIKRGIFQGDSLSPLWFCLALNPLSTLLEDSGLGYRLRRGGQVISHLLYMDDLKLFAPNKLRLMELLKVTKTFSSAIKMEFGVDKCAVMHVKRGEIMESEGIQLSDSISLRSLSSSESYKYLGMSEALGINDADMKQSLKERFFCRLKKVLISLLSGGNKVRAFNGWVMPVLMYSFGILKWTQTELDALDRRVRTLLTANRMHHPRSSVMRLYIPRKCGGRGFLNAKTLHNREVCSLREYFLKAEVGMHRDVVAVDKGLTPLSMAKENWRKPVVLSTDDRKRVWQSKELHGRFYRALHEPGVDFIASVSWLRFGDLFGETEGFVCAIMDEVILTNNYRRHIMKDGTVDVCRACHRPGESIRHIISGCSRLANGEYLHRHNQVARIIHQQFALKYKLVDSEVPYYKYVPDPVLENDHVTLYWDRSIITDRTIVANKPDIVVIDRLARRTMIVDITIPHDGNLVKAEKEKQIKYLDLAHEVVDMWNVSSAIIVPIVVSANGLMAESLDQHLSRLSLGGWIKGLIQKAVLLDTARIVRRFLSLEP

SEQ ID NO: 28561 - protein, 962 aa, Xestia c-nigrum
MHKKNRALVCALDSQLKNVFESSEDLVDTHSFLFCGAVAACRLANVKFPNCDLATRPKPAVPAWQRRIERRIDGARVLIGKLHCFREGNTRPRVMRFVRRAFSGTEISPQEYMSRVTERIDFLKQKVYAWASRIRRYKRRVDRYSQNRMFQSDERWVYRAWERPQQNMTDVCRPDDAATSSFWRSIWSVPVCHSEADWMRDVERVCEPIQTMEPILISPLDIARAVRPLPNWKSPGPDGLHNFWLKWFSSSHTCLASQFQSSLESGSLPQFLTTGITHLLHKSGSPAEPKNYRPITCLSTVYKLLTSILRTKINTHVDSNSIMSASQNGCRNGSRGTKELLLIDMAISQQVRRARKDLSTCWIDYKKAYDSVPHSWLKRVLELYKIDATLRTFLESCMGQWRTVLRYPGCRQIQGNDEPVWIKRGIFQGDSLSPLWFCLALNPVSTLLENSGLGYQLRKDGQVISHLLYMDDLKLFAPNKLQLMELLKVTETFSSAIGMEFGVDKCAVMYVKRGKIMGSEGLQLSDSIHLRSLSSSESYKYLGMSEALGINVTDMKQSLKERFFGRLKKVLNSLLSGGNKVRAFNGWVMPVLMYSFGILKWTQTELDALDRRVRTLLTENRMHHPRSSVMRLYIPRKCGGRGFLNAKTLHNREVCSLREYFLKVDVGMQRDVVAVDKGLTPLSMAKENWRKPVVLTTDDRKKEWQGKELHGRFYRALHGPDVDFLASVSWLRFGDLFGETEGFVCAIMDEVMLTNNYRKYIMKDGTVDVCRACHCPGESIRHIISGCSRLANGEYLHRHNQVARIIHQQLALKFKLVESEVPYYKYVPDPVLVKDHVTLYWDQSIITDRTIVANKPDIVVIDRSARRVMIIDVTIPHDENLVKAEKEKQMKYLDLAHVVRDMWNMNSVIIVPIVVTANGLIAKSLDEHLSKLSLGGWIKGLIQKAVLLDTARIVRRFLSLQP

SEQ ID NO: 28562 - protein, 962 aa, Xestia c-nigrum
MHKKNKALVCALDSQLSNCFDSSKDLADTHSILYCGAVAACRVAHVKFPNNDRTTRPKLAVPAWQCRIERRIGEARVLIGKLICFREGNTRPRVMRFVRRAFSGTDISFRDYLARITERIDFLKQKICAWASRIRRYKRRVERYTQNRSFQSDERWVYRAWERPDQGVTNTRLPDDDAMCSFWRSIWSVPVSHTEGDWIRKVEQVCDQIQEMGAIIISPQDVACAVRPLPNWKSPGPDGLHNFWIKWFQRSHACLASQFQSALESGSLPQFMTTGITHLLHKSGSTAEPINYRPITCLPTVYKVLTSILRAKINKHIESNSIMSTSQNGCRNGSRGTKELLLIDMAISQQVRRSRKNLSTCWIDYKKAYDSVPHTWLMRVLELYKINATLRAFLESCMGQWKTVLRYPGCRQIQGNDEPVWIKRGIFQGDSLSPLWFCLALNPLSTLLENSGLGYRLRKEGQVISHLLYMDDLKLFAPNKLQLLELLKVTETFSNAIRMEFGVDKCAVMYVKRGEIMESEGLQLSDSIHLRSLSSSESYKYLGMSEALGINVTDMKQSLRERFFGRLKKVLNSLLSGGNKVRAFNGWVMPVLMYSFGILKWTQMELDALDRRVRTLLTANRMHHPRSSMMRLCIPRKCGGRGFLNVKNLHNREVCSLREYFLEADVGMHRDVVLVDKGLTPLSLANGNWRKPKVLDTNDRREEWQGKELHGRFYRALHGPDVDFLASVSWLRFGDLFGETEGFICAIMDEVMMTKNYRKYIVKDGTVDICRACHRPGESIRHIISGCSSLANGEYLHRHNLVARIIHQQLALKYNLVESEVPYYKYAPDPVLVNGNITLYWDRPITTDRTVVANRPDIVVIDRLERRTMIVDITVPHDENLVKAEQDKKNKYLDLAREVVDMWDVSTAIIVPIVVSANGLIAKSLDQHLRRLSLGSWIKGLIQKAVLLDTARIVRRFLSQEP

SEQ ID NO: 28563 - protein, 1080 aa, Xestia c-nigrum
MLSLFQDLEPTVNASAQRLSDQVRVIQRNHLLDGAALDRLRSEVLSNRIILTPAQTAVQASSIDVNPPRSNPAVVEEDDRVATVSSQCNDRLRSALEDALHEYRSTSAELRPRLPRLPMHKKNRALVCALDSQLKNVFESSEDLVDTHSILFCGAVAACRLANVKFPNCDLATRPKPAVPAWQRRIERRIDGARVLIGKLHCFREGNTRPRVMRFVRRAFSGTEISPQEYMSRVTERIDFLKQKVYAWASRIRRYKRRVDRYSQNRMFQSDERWVYRAWERPQQNMTDVCRPDDAATSSFWRSIWSVPVCHSEADWMRDVERVCEPIQTMEPILITPLDIARAVRPLSNWKSPGPDGLHNFWLKWFSSSHTCLASQFQSSLESGSLPQFLTTGITHLLHKSGSPAEPKNYRPITCLSTVYKLLTSILRTKINTHVDSNSIMSASQNGCRNGSRGTKELLLIDMAISQQVRRARKDLSTCWIDYKKAYDSVPHSWLKRVLELYKIDATLRTFLESCMGQWRTVLRYPGCRQIQGNDEPVWIKRGIFQGDSLSPLWFCLALNPVSTLLENSGLGYRLRKDGQVISHLLYMDDLKLFAPNKLQLMELLKVTETFSSAIGMGFGVDKCAVMYVKRGKIMGSEGLQLSDSIHLRSLSSSESYKYLGMSEALGINVTDMKQSLKERFFGRLKKVLNSLLSGGNKVRAFNGWVMPVLMYSFGTLKWTQTELDALDRRVRTLLTENRMHHPRSSVMRLYIPRKFGGRGFLNAKTLHNREVCSLREYFLKADVGMHRDVVAVDKGLTPLSMAKENWRKPVVLTTDDRKKEWQGKELHGRFYRALHGPDVDFLASVSWLRFGDLFGETEGFVCAIMDEVMLTNNYRKYIMKDGTVDVCRACHCPGESIRHIISGCSRLANGEYLHRHNQVARIIHQQLALKFKLVESEVPYYKYVPDPVLVKDHVTLYWDQSIITDRTIVANKPDIVVIDRSARRVMIIDVTIPHDENLVKAEKEKQMKYLDLAHEVRDMWNMNSVIIVPIVVTANGLIAKSLDEHLSKLSLGGWIKGLIQKAVLLDTARIVRRFLSLQP

SEQ ID NO: 28564 - protein, 1111 aa, Omphaloscelis lunosa
MRWTQSINENVMRAYYGSTEGGTNLTAYRVRMLSLFQELEPTVNVSAQRLSDQVRVIQRNHRLDDTALDRLRSEVLSNHIVSTRAQTAAQASNIDATPPQFNHGVEEEDDRVATVSSQYNNRLRSALEDAFREYRYTPTELRPRLPRLPMHNKNRALVCALDSQLTNFFESSEDLIDTHSILYCAAVAACRLANVKFPNCDGATRPKPVVPAWQCRIERRIDGARVLIGKLYCFREGNTRPRVMRFVRRAFSGTGISPQDYMSRVTERIDFLKQKVCAWASRIRQYKRRVDRYTQNRMFQSDERWVYRAWERPEQNVTDVCRPDDATTSAFWRSIWSVPVCHTEAGWMQDVERVCETIPVMDAVFITPLDVTRAVRLLPNWKSPGPDGLHNFWLKWLSSSHTRLASQFQSSLESGSLPQFLTTGVTHLLHKSGNPAEPKNYRPITCLSTVYKLLTSILRTKINTHIDSNSIMSASQNGCRNGSRGTKELLLIDMAISQQVRRSRKDLSTCWIDYKKAYDSVPHTWLMRVLELYKVDTTLRTFLISCMGQWKTVLRYPGCRQTQGNDEPVWIKRGIFQGDSLSPLWVCLALNPLSTLLEDSGLGYRLRRGGQVISHLLYMDDLKLFAPKKLRLMELLKVTEKFSGAIRMEFGVDKCAVMHVKRGEIMESEGIQLSDSIHLRSLSSAENYRYLGMSESLDINVADMKQSLKERFFGRLKKVLISFLSGGNKVRAFNGWVMPVLMYSFGILKWTQTELDALDRRVRTLLTANRMHHPHSSVMRLYIPRKCGGRGFLNANTLHNREVCSLREYFFKADVGMHRDVVAVDNGLTPLSMAKENWRKPVVLTTDDRKEVWQSKALHGRFFRALHEPGVDFLASVSWLRFGDLFGETEGFICAIMDEVILTNNYRRYIMKDGTVDVCRACHRPGESIRHIISGCSRLANGEYLHRHNQVARIIHQQLAFKYKLVDSEVPYYMYVPDPVLENDHVTLYWNRSIITDRTIVANKPDIVVIDRLARHAMIVDVTIPHDENLVKAEKEKQIKYLDLAHEVVDMWNVSSAIIVPIVVTANGLMAKSLNQHLSRLSLDGWIKRLIQKAVLLDTARIVRRFLSLQP

SEQ ID NO: 28565 - protein, 1203 aa, Omphaloscelis lunosa
MLTRSAARSARLPPPDSPLSSASPPPVPSPIVNAVSTPAAVVASSSSDEYFSPPTSPTPVRRQGRGRPPKSLGLRGRPAPSRVPAAGGCVQRMRWTQSMNENVMRAYYGSTEGGTNLTAYRVRMLSLFQELEPTVNVSAQRLSDQVRVIQRNHRLDDTALDRLRSEVLSNHIVSAREQTAAEASNIDPTPPRFNHGVEEEDDRVATVSSQCNNRLRSALEDAFREYRYTPTELRPRLPRLPMHKKNRALMCALDSQLTNFFESSEDLIDTHSILYCAAVAACRLANVKFPNCDGATRPKPAVPAWQCRIERRIDGARVLIGKLYCFREGNTRPRVMRFVRRAFSGTEISPQDYMSRVTERIDFLKQKVCAWASRIRRYKRRVDRYTQNRMFQSDERWVYRAWERPEQNVTDVCRPDDAATSAFWRSIWSVPVCHTEAGWMQDVERVCETIPEMDAVFITPLDVARAVRPLPNWKSPGPDGLHNFWLKWLSSSHTCLASQFQSSLESGSLPQFLTTGVTHLLHKSGNPAEPKNYRPITCLSTVYKLLTSILRTKINTHIDSNSIMSVSQNGCRNGSRGTKELLLIDMAISQQVRRSRKDLSTCWIDYKKAYDSVPHTWLMRVLELYKVDTTLRTFLMSCMGQWRTVLRYPGCRRTQGNDEPVWIKRGIFQGDSLSPLWFCLALNPLSTLLEDSGLGYRLRRGGQVISHLLYMDDLKLFAPNKLRLMELLKVTETFSGAIRMEFGVDKCAVMHVKRGEIMESEGIQLSDSIHLRPLSSAENYRYLGMSESLGINVADMKQSLKERFFGRLKKVLISFLSGGNKVRAFNGWVMPVLMYSFGILKWTQTELDALDRRVRTLLTANRMHHPRSSVMRLYIPRKCGGRGFLNAKTLHNREVCSLREYFFKADVGMHRDVVAVDNGLTPLSMAKENWRKPVVLTTDDRKEIWQSKALHGRFYRALHEPSVDFLASVSWLRFGDLFGETEGFICAIMDEVILTNNYRRHIMKDGTVDVCRACHRPGESIRHIISGCSRLANGEYLHRHNQVARIIHQQLALKYKLVDSEVPYYKYVPDPVLENDHATLYWDRSIITDRTIVANKPDIVVIDRLARHAMIVDVTIPHDENLVKAEKEKQIKYLDLAHEVVGMWNVSSAIIVPIVVTANDLMAKSLDHHLSRLSLGGWIKRLIQKAVLLDTARIVRRFLSLQP

SEQ ID NO: 28566 - protein, 1202 aa, Sesamia nonagrioides
MLTRSVTRKARPPPPDSLLSSASPPPVSSPIVNAVTTSAAAVASSSSDEYFSPPTSPTPVRRQGRGRPPKSLGLRGHPAPSRVPAVGGCVQRMRWSQTMNENVMRAYYGATEGGTNLTAYRERMLSLFQALEPTVNVSAQRLSDQVRVIQRNHRLDDTALDRLRSEVLSNQIAPTLTQTAALASIIDAVPPRSNRVEEEDDGVETVSSQYNDRLRSTLEDAFREYRFTPTDLRPRLPRLPMHKKNRALVSALDSQLKNVFESSEDLIDTHSILFCGAVAACRLANIKFPNCDEANRPRPAVPAWQHRIERRIDGARVLIGKLYCFREGNTRPRVMRFVRQAFSGTGISPREYISHVTERIDFLKQKVCAWASRIRRYKRRVDRYTQNRMFQSDERWVYRAWERTEQNEADVCRPDDAATSAFWRSIWSVPVCHAEGDWIQDVEQVCEMIPEMDTILITPIDVATAVRSLPNWKSPGPDGLHNFWLKWLSSSHTCLASQFQSSLESGSLPQFLTTGITHLLHKSGSTAEPNNYRPITCLPTVYKVLTSILKAKINKHLDSNSIMSVSQNGCRSGSRGTKELLLIDMAISQQVRRSRKDLSTCWIDYKKAYDSVPHTWLMRVLELYKVNATLRTFLRSCMGQWKTVLRYPGSRRIQGNDEPVWIKRGIFQGDSLSPLWFCLALNPLSRLLEDSGLGYRLRRGGQVISHLLYMDDLKLFAPNKLHLMKLLNVTETFSSGIKMEFGVDKCAVMHVKRGQIMESEGITLPDPIHLRSLSSVESYKYLGMSEALGINDADMKQSLKERFFGRLKKVLKSLLSGGNKVRAFNGWVMPVLMYSFGILKWTQTELDALDRRVRTLLTANRMHHPRSSVMRLYIPRKCGGRGFLNAKTLHNREVCSLREHFLKTVVGMHHDVVTVDKGLTPLSMAKENWHKPIILTTNDRKLIWQSKELHGRFYRALHEPDVDFLASVSWLRFSDLFGETEGFVCAIMDEVILTNNYRRYIMRDGTIDVCRACHHPGESIRHIISGCSRLANGEYLHRHNQVARIIHQQLALKYKLVDSEVPYYKYVPDPVLENDHATLYWDRSIITDRTIVANKPDIVVIDRLARLAMIVDVTIPHDGNLVKAEKEKQIKYLDLAHEVVDMWNVNSAVIVPIVVSANGLIAKSLDQHLLRLSLGSWIKGLIQKAVLLDTARIVRRFLSLEP

SEQ ID NO: 28567 - protein, 962 aa, Apamea monoglypha
MHKKNRALVCALDSQLKNFFESSEDLVDTHSILYCAAVAACRLANVKFPNCDGATRPKPAVPAWQYRIERRIDGARVLIGKLYCFREGNTRPRVMRFVRQAFSGTGISPREYISNVTERIDFLKQKVCAWASRIRRYKRRVDRYTQNRMFQSDERWVYRAWERPEQNVTDVCRPDDANTNAFWRSIWSVPVYHAEGGWMQDIERVCETIPEMDPVLITPLDVARAVRPLPNWKSPGPDGLHNFWLKWLISSHSRLASQFQSSLESGSLPQFLTTGVTHLLHKSGSPAEPKNYRPITCLSTVYKLLTSILRAKINTHIDNNSIMSASQNGCRNGSRGTKELLLIDMAISQQVRRSRKDLSTCWIDYKKAYDSVPHAWLMRVLELYKIDATLRTFLESCMGQWRTVLRYPGCRQIQGNDEPVWIKRGIFQGDSLSPLWFCLALNPLSTLLEDSGLGYRLKRGGQVISHLLYMDDLKLFAPNKLRLLELLKVTETFSSAIRMEFGVDKCAVMHVKRGEIMESEGIQLSDSIHLRSLSSSESYKYLGMSEALGINVADMKQTLRERFFGRLKKVLVSLLSGGNKVRAFNSWVMPVLMYSFGILKWTQTELDALDRRVRTLLTANRMHHPRSSVMRLYIPRKCGGRGFLNAKTLHNREVCNLREYFIKAEVGMHRDVVAVDKGLTPLSMAKENWRKPVILTTDDRKEVWQSKELHGRFYRVLHEPGVDFLASVSWLRFGDLFGETEGFVCAIMDEVVLTNNYRRHIMKDGTVDVCRACHRPGESIRHIISGCSRLANGEYLHRHNQVARIIHQQLALKYKLVDSEVPYYKYVPDPVLENDHVTLYWDRSIITDRTIVANKPDIVVIDRLARRTMIVDVTIPHDGNLVKAEKEKQIKYLDLAHEVVDMWNVSSAIIVPIVVSANGLMAESLDQHLSRLSLGGWIKGLIQKAVLLDTARIVRRFLSLEP

SEQ ID NO: 28568 - protein, 883 aa, Mythimna ferrago
MRFVRRAFLGTGISPQGYMSRVTERIDFLKQKVCAWASRIRRYKRRVDRYSQNRMFQGDERWVYRAWERPEHSVIDECRPDDLATITFWRNIWSVPVSHTEGGWMRDVERVCEAIPEMEKVTITPEDVAKAVRPLPNWKSPGPDGLQNFWLKWYSSSHAPLASQFQSILESGSLPEYLTTGVTHLLHKTGNPVDPKNYRPITCLSTVYKLLTSILRAKINIHIENNQIISPSQNGCRNGSRGTKELLLIDMAISQQTRRSRRDLSTCWIDYKKAYDSVPHTWLMRVLELYKIDITLRTFLESCMRQWKTVLRYPGCRPIQGNDEPIRIKRGIFQGDSLSPLWFCLALNPLSTLLEDSGLGYRLRRGGQVISHLLYMDDLKLFAPSNLQLMEILKVTETFSSAIRMEFGVDKCAGMHVKRGEIMESEGIQLPDSIHLRSLSSTETYRYLGMSEALGINNADMKQSLKERFFGRLKKVLNSLLSGGNKVRAFNGWVMPVLMYSFGILKWTQTELDALDRRVRTLLTANRMHHLRSLVMRLYIPRKCGGRGFLNAKTLHNREVCSLREYFLKTDVGMHRDVVAVDKGLTPLSMAKEDWHKPVIMTTDNRKEIWKGKELHGRFFRALHEPDVDFLASVAWLRFSDLFGETEGFVCAIMDEVILTNNYRRYIMKDGTVDVCRACHRPGESIRHIISGCSRLANGEYLHRHNQVARIIHQQLALKYNLVDLEVPYYKYVPDPVLENDHVTLYWDRSIITDRTIVANKPDIVVIDRLARRAMIVDITIPHDENLVKAEKEKQIKYLDLAHEIVDMWNVDSAIIVPIVVTANGLIAKSFDDHLVTANGLIAKSFDDHLSKLSLRGWIKGQIQKAVLLDTARIVRKFLSLEP

SEQ ID NO: 28569 - protein, 1200 aa, Mythimna ferrago
MLTRAAARRARHPPPGSSLSSASPPPDSGSPVSPTAAVASSSSDEYFFPPTSPTPVRRPGRGRPPKSMGPRGQPAPSRVPAAGGCVQRMRWTQSMNENVMRAYYGSTEGGTNLTAYRERMLSLFQDLEPTVNVSAQRLSDQVRVIQRNHRLDDAALDRLRSEILSNQIVSTSTQTQTAATPTTNAISPRSDHNNDDADDRVVTVSSQCNERLRSALEDALCEYMSTPTELRPRLPRLPMHKKNRALVCALDSLLKNIFESSENLVDTHSILYCGAVAACRLAKIKFPNIDGTIRPKTAVPAWQCRIERRIDEARVLIGKLHCFREGNTRPRVMRFVRRAFLGTGISPQGYMSRVTERIDFLKQKVCAWASRIRRYKRRVDRYSQNRMFQSDERWVYRAWERPEHSVTDGCRPDDLATITFWRNIWSVPVSHTEGGWMRDVERVCEAIPEMEKVTITPEDVARAVRPLPNWKSPGPDGLQNFWLKWYSSSHAPLASQFQSILESGSLPEYLITGVTHLLHKTGNPVDPKNYRPITCLSTVYKLLTSILRAKINIHIENNQIISPSQNGCRNGSRGTKELLLIDMAISQQTRRSRKDLSTCWIDYKKAYDSVPHTWLMRVLELYKIDITLRTFLESCMRQWKTVLRYPGCRPIQGNDEPIWIKRGIFQGDSLSPLWFCLALNPLSTLLEDSGLGYRLRRGGQVISHLLYMDDLKLFAPSNLQLMELLKVTETFSSAIRMEFGVDKCAGMHVKRGEIMESEGIQLPDSIHLRSLSSTETYRYLGMSEALGINNADMKQSLKERFFGRLKKVLNSLLSGGNKVRAFNGWVMPVLMYSFGILKWTQTELDALDRRVRTLLTANRMHHPRSSVMRLYIPRKCGGRGFLNAKTLHNREVCSLREYFLKTDVGMHRDVVAVDKGLTPLSMAKEDWHKPVIMTTDNRKEIWKGKELHGRFFRALHEPDVDFLASVAWLRFSDLFGETEGFVCAIMDEVILTNNYRRYIMKDGTVDVCRACHRPGESIRHIISGCSRLANGEYLHRHNQVARIIHQQLALKYNLVDLEVPYYKYVPDPVLENDHVTLYWDRSIITDRTIVANKPDIVVIDRLARRAIIVDITIPHDENLVKAEKEKQMKYLDLAHEVVDMWNVDSAIIVPIVVTANGLIAKSFDDHLSKLSLRGWIKGQIQKAVLLDTARIVRKFLSLEP

SEQ ID NO: 28570 - protein, 977 aa, Mythimna ferrago
MSTPTELRPRLPRLPMHKKNRALVCALDSLLKNIFESSENLIDTHSILYCGAVAACRLANIKFPNIDGTIRPKSAVPAWQCRIERRIDEARVLIGKLHCFREGNTRPRVMRFVRQAFLGTGISPQGYMSRVTERIDFLKQKVCAWASRIRRYKRRVDRYSQNRMFQSDERWVYRAWERPEHSVIDGCRPDDFATITFWRNIWSVPVSHAEGGWMRDVERVCEAIPEMEKVTITPEDVAKAVRPLPNWKSPGPDGLQNFWLKWYSSSHALLASQFQSILESGSLPEYLTTGITHLLHKTGNPVDPKNYRPITCLSTVYKLLTSILRAKINIHIENHQIISPSQNGCRNGSRGTKELLLIDMAISQQTRRSRKDLSTCWIDYKKAYDSVPHTWLMRVLELYKIDITLRTFLESCMRQWKTVLRYPGCRPIQGNDEPIWIKRGIFQGDSLSPLWFCLALNPLSTLLEDSGLGYRLRRGGQVISHLLYMDDLKLFAPNTLQLMELLKVTETFSSAIRMEFGVDKCAGMHVKRGEIMKSEGIQLPDSVHLRSLSSTETYKYLGMSEALGINNADMKQSLKERFFGRLKKVLNSLLSGGNKVRAFNGWVMPVLMYSFGILKWTQTELDALDRRVRTLLTANRMHHPRSSVMRLYIPRKCGGRGFLNAKTLHNREVCSLREYFLKTDVGMHRDVVAVDKGLTPLSMAKEDWHKPVIMTTDNRKEIWKGKELHGRFFRALHEPDVDFLASVAWLRFSDLFGETEGFVCAIMDEVILTNNYRRYIMKDGTVDVCRACHRPGESIRHIISGCSRLANGEYLHRHNQVARIIHQQLALKYNLVDLEVPYYKYVPDPVLENDHVTLYWDRSIITDKTIVANKPDIVVIDRSARRAMIVDITIPHDENLVKAEKEKQMKYLDLAHEVVDMWSVDSAVIVPIVVTANGLISKSFDDHLSKLSLRGWIKGQIQKAVLLDTARIVRKFLSLEP

SEQ ID NO: 28571 - protein, 1207 aa, Ochropleura plecta
MLTRRRAQEQQALPSSPGSSLSSASQPPGRATRVSAVSPVAAVASSSSDEFFSPPSSPPPPPTRQRRGRGRPPAGLGSRGQQAPIRVPAAGGNVSRMRWTSFINANVMRAYYGSTEGGTNLTAYRVRMLSLFQDLEPTINVSAQRLSDQVRVIQRNHLLDDAALDRLRSEVLSNRVILTTPQTAVQASAIDVTQPRSNPAVVEEDDRVATVSSQCNDRLRSALEDALRDYRSTPAELRPRLPRLPMHKKNRALVCALDSQLKNLFESSEDLVDTHSILYCGAVAVCRLANVKFPNCDVATRPKPSVPAWQCRIERRIDEARALIGKLYCFREGNTRPRVMRFVRRAFSGTGISPQEYMSRTTERIDFLKQKVYAWANRIQRYKRRVDRYSQNRMFRSDERWVYRAWERPEQSVTDVCRPDDVATSSFWHSIWSVRVCHTEAGWMRDVERVCETIPEMEPILITSLDIASAVRPLPNWKSPGPDGLHNFWLKWLSSSHTRLASQFQSCLESGSLPQFLTTGVTHLLYKSGSPAEPKNYRPITCLSTVYKLLTSILRAKINSHIVKNSIISASQNGCRNGSRGTKELLLIDMAISQQVRRSRKDLSTCWIDYKKAYDSVPHTWLKRVLELYKIDTTLRTFLESCMGQWRTVLRYPGCRQIQGNDEPVWIKRGIFQGDSLSPLWFCLALNPLSTLLEDSGLGYRLRRGGQVISHLFYMDDLKLFAPNKLRLMELLKVTETFSNAIRMEFGVDKCAVMYVKRGEIMESEGIHLSDSIHLRSLSSSESYKYLGMSEALGINVADMKQLLRERFFGRLKKVLKSLLSGGNKVRAFNSWVMPVLMYSFGILKWTQTELDALDRRVRTLLTANRMHHPRSSVMRLYIPRKCGGRGFLNAKTLHNREVCSLREYFLKTDVGMHRDVVAVDKGLTPLSMAKENWRKPVVLTTDYRKEVWQGKELHGRFYKALHGPDVDFLASVSWLRFGDLFGETEGFVCAIMDEVMLTNNYRKYIMKDGTVDVCRACHRPGESIRHIISGCSRLANGEYLHRHNQVARIIHQQLALKYNLVESELPYYKYVPDPVLEKDHVTLYWDRSIITDRTIVANKPDIVVIDRSARRVMIIDVTIPHDENLVKAEKEKQLKYLDLAHEVVDMWNVNSAIIVPIVITANGLIAKSLDEHLSKLSLGGWIKGLIQKAVLLNTARIVRRFLSLEP

SEQ ID NO: 28572 - protein, 962 aa, Ochropleura plecta
MHKKNRALVCALDSQLKNLFESSEDLVDMHSILYCGAVAVCRLANVKLPNCDVATRPKPSVPAWQCRIERRIDEARALIGKLYCFREGNTRPRVMRFVRRAFSGTGISPQEYMSRTTERIDFLKQKVYAWANRIKRYKRRVDRYSQNHMFRSDERWVYRAWERPEQSVTDVCRPDDVATSSFWHSIWSVRVCHTEAGWMRDVERVCETIPEMEPILITSLDIASAVRPLPNWKSPGPDGLHNFWLKWLSSSHTRLASQFQSCLESGSLPQFLTTGVTHLLYKSGSPAEPKNYRPITCLSTVYKLLTSILRAKINSHIVKNSIISASQNGCSNGSRGTKELLLIDMAISQQVRRSRKDLSTCWIDYKKAYDSVPHTWLKRVLELYKIDTTLRTFLESCMGQWRTVLRYPGCRQIQGNDEPVWIKRGIFQGDSLSPLWFCLALNPLSTLLEDSGLGYRLRRGGQVISHLFYMDDLKLFAPNKLRLMELLKVTETFSNAIRMEFGVDKCAVMYVKRGEIMESEGIHLSDSIHLRSLSSSESYKYLGMSEALGINVADMKQLLRERFFGRLKKVLKSLLSGGNKVRAFNSWVMTVLMYSFGILKWTQTELDALDRRVRTLLTANRMHHPRSSVMRLYIPRKCGGRGFLNAKTLHNREVCSLREYFLKTDVGMHRDVVAVDKGLTPLSMAKENWRKPVVLTTDYRKEVWQGKELHGRFYKALHGPDVDFLASVSWLRFGDLFGETEGFVCAIMDEVMLTNNYRKYIMKDGTVDVCRACHRPGESIRHIISGCSRLANGEYLHRHNQVARIIHQQLALKYNLVESEVPYYKYVPDPVLEKDHVTLYWDRSIITDRTIVANKPDIVVIDRSARRVMIIDVTIPHDENLVKAEKEKQLKYLDLAHEVVDMWNVNSAIIVPIVITANGLIAKSLDEHLSKLSLGGWIKGLIQKAVLLNTARIVRRFLSLEP

SEQ ID NO: 28573 - protein, 1169 aa, Phlogophora meticulosa
MITRAATRRARPPSPDSPLSSASPPPDLGSPVTPAVAAASSSSDEYFSPPTSPTPVRRQGRGRPPKSLGSRGQPAPSQVPATGGCVQRMRWTQSMNENVMRAYYGSTEGGTNLTAYRVRMLSLFQGFEPTVNVSAQRLSDQVRVIQRNHRLDDAALDRLRSEMLSNHIVLTSTQTAVQAPAFNVILPRSNHVSNEADDRVDTVCSQYNDRLRSALEDALREYRSTPTELRPRLPRLPMHRKNRALVCALDSLLKNFFESSEDLVDTHSILYCAAVAACRLANVKFPKNDLAIRPKPAVPAWQSRIERRIDGARVLIGKLYCFREGNTRPRVMRFVRRAFSGTGISPREYMSRIVERIDFLKQKVCAWANRIRRYKRRVDRYSQNRMFQSDERWVYRAWERPEQDVAGEHRPDDVATNAFWRSIWSVPAHHVEAHWMSDYESVCETIPEMEKIIITPEDVATAVRPVPNWKSPGPDGLHNFWLKWLSSSHTRLASQFQSCLESGSLPQFLTTGITHLLYKSGSTTEPKNYRPITCLSTVYKLLTSILRAKITEHIVGNSIMSASQNGCRNGSRGTKELLLIDMAISQQVRRSRKDLSTCWIDYKKAYDSVPHAWLTRVLELYKIDATLRTFLASCMGQWKTVLRYPGCRQIQGNDEPIWIKRGIFQGDSLSPLWFCLALNPLSTLLEDSGLGYRLKRGGQVISHLLYMDDLKLFAPNNLRLMELLKITESFSSAIRMEFGVDKCAVMHVKRGEIVESEGIQLSDSIHLRSLSSSENYKYLGMSEALGINATDMKQSLKERFFGRLKKVLNCLLSGGNKVRAFNGWVMPVLMYSFGILKWTQTELDALDRRVRTLLTANRMHHPRSSVMRLYIPRKCGGRGLLNAKTLHNREVCNLRDYFLKTEVGMHRDVVAVDKGLTPLSMAKENWRKPVVLTTDDRKQVWQSKELHGRFYRALHGPDVDFLASVSWLRFGDLFGETEGFVCAIMDEVILTNNYRKHIMKDGTVDMCRACHRPGESIRHIISGCSRLANGEYLHRHNQVARIIHQQLALRYKLVESEVPYYKYVPDPVLQDDHVTLYWDRSIITDRTIVANKPDIVVIDRLARRAMIVDVTIPHDENLVKAEKEKQIKYLDLAHEVVDMWNVDSAVIVPIVVTANGLLAKSLDDHLSRL

SEQ ID NO: 28574 - protein, 1199 aa, Phlogophora meticulosa
MLTRAAKRRARPPSPDSPLSSASPPPDLGSPVTPTVAAASSSSDEYFSPPTSPTPVRRQGRGRPPKSLGSRGQPAPSQVPATGGCVQRMRWTQSMNENVMRAYYGSTEGGTNLTAYRARMLSLFQVLEPTVNVSAQRLSDQVRVIQRNHRLDDTALDRLRSEVLNNHIVLTSTQTAVQASIINATPSPSNHVSEEADDRVVTVSSQCNEKLRSALEDALREYRSTPTELRPRLPRLPMHKKNRALVCNLDSLLKDLFESSGDLVDTHSILYCAAVAACRLANVKFPNNDVAIRPKPAVPAWQSRIERRIDGARVLIGKLYCFREGNTRPRVMRFVRRAFAGTGISPREYMSRIVERIDFLKQKVYAWANRIRRYKRRVDRYSQNRMFQSDERWVYRAWERPEQDVADVHRPDDTTTNTFWRNIWSVPVCHTEAHWIRDVERVCETITEMEKIIITPLDVATAVRPLPNWKAPGPDGLHNFWLKWLGSSHTRLASQFQSCLESGSLPQFLTTGITHLLYKSGSTTEPKNYRPITCLSTVYKLLTSILRAKIAEHIVGNSIMSASQNGCRNGSRGTKELLLIDMAISQQVRRSHKDLSTCWIDYKKAYDSVPHAWLMRVLELYKIDATLRTFLESCMGQWRTVLRYPGCRQIQGNDEPIWIKRGIFQGDSLSPLWFCLALNPLSTLLEDSGLGYRLRRGGQVISHLLYMDDLKLFASNNLQLMELLKITESFSSTIRMEFGVDKCAVMHVKRGEIVESEGIQLPDSIQLRSLSSSDNYKYLGMSEALGINVTDMKQSLKERFFGRLKKVLNSLLSGGNKVRAFNGWVMPVLMYSFGILKWTQTELDALDRRVRTLLTANRMHHPRSSVMRLYIPRKCGGRGFLNAKTLYNREVCNLRDYFLKTEVGMHRDVVAVDKGLTPLSMAKENWRKPVVLTTDDRKQVWQSKELHGRFYRALHGPDVDFIASVSWLRFGDLFGETEGFVCAIMDEVILTNNYRKHIMKDGTVDMCRACHRPGESIRHIISGCSRLANGEYLHRHNQVARIIHQQLALRYKLVESEVPYYKYVPDPVLEDDHVTLYWDRSIITDRTIVANKPDIVVIDRLARRAMIVDVTIPHDENLVKAEKEKQIKYLDLAHEVVDMWNVDSAVIVPIVVTANGLLAKSLDDHLSRLSLHGWIKGLIQKAVLLDTARIVRRFLSLQP

SEQ ID NO: 28575 - protein, 1201 aa, Xestia xanthographa
MMLTRAAAARRARLPTPDSSLSSASPPPDPGSPVSPVAAVASSSSDEYFSPPTSPPLVRRAGRGRPPKGLGLRGQQAPSRVPATGGCVQRMKWTQAMNENVMRAYYGSTEGGTNLTAYRARMLSLFQDLEPTVNVSAQRLSDQVRVIQRNHRLDDAALDRLRSEELSNLIILTPTQTAVQVSAINITLPRSNPAVVEEDDRVATVSSQCNDRLRSALEDALREYRSTPTELRPRLPRLPMHKKNRALVCALDSQLKNIFKSSEDLVDTHSILFCGAVAACRLANVKFPNCDVATRPKPAVPAWQRRIERRIDEARVLIGKLYCFREGNTRPRVMRFVRWAFSGTEISPQEYMSRVTERIDFLKQKVYAWANRIRRYKRRVDRYSQNRMFQSDERWVYRAWERSEQNMTNVCRPDDVATSSFWRSIWSVPVCHTEADWMRDVERVCEPIPEMEPIFITPLDVARAVRPLPNWKSPGPDGLHNFWLKWFSSSHTCLASQFQSSLESGSLPQFLTTGVTHLLHKSGSPAEPKNYRPITCLSTIYKLLTSILRVKINTHIDKNSIMSASQNGCRNGSRGTKELLLIDMAISQQVRRSRKDLSTCWIDYKKAYDSVPHTWLMRVLELYKIDTTLRTFLESCMGQWRTVLRYPGCRQIQGSDEPVWIKRGIFQGDSLSPLWFCLALNPLSTLLENSGLGCRLRKDGQVISHLLYMDDLKLFAPNKLRLMELLKVTETFSSAIRMEFGVDKCAVMYVKRGEIMESEGLQLSDPIHLRSLSSSETYKYLGMSEALGINITDMKQSLKERFFGRLRKVLNSLLSGGNKVRAFNGWVMPVLMYSFGILKWTQTELDALDRRVRTLLTESRMHHPRSSVMRLYIPRKCGGRGFLNAKTLHNREVCSLREYFLKAEVGMHRDVVAVDKGLTPLSMAKENWHKPEVLTTDDRKEVWQGKELHGRFYRALHGPDVDFLASVSWLRFGDLFGETEGFVCAIMDEVMLTNNYRKYIMKDGTVDVCRACHLPGESIRHIISGCSRLANGEYLHRHNQVARIIHQQLALKYKLVESEVPYYKYVPDPVLEKDHVTLYWDRSIITDRTIVANKPDIVMIDRSARRVMIIDVTIPHDENLVKAEKEKQIKYLDLAHEVRDMWNMNSVIIVPIVVTANGLIAKSFDDHLSKLSLGGWIKGLIQKAVLLDTARIVRRFLSLQP

SEQ ID NO: 28576 - protein, 1199 aa, Xestia xanthographa
MITRAAARRAHLPTPDSSLSSASPPPDPGSPVSPVAAVASSSSDEYFSPPTSPPPVRRAGRGRPPKSLGLRGQQTPNRVPATGGCVQRMKWTQSMNENVMRAYYGSTEGGTNLTAYRVRMLSLFQGLEPTVNVSAQRLSDQVRVIQRSHRLDDAALDRLRSEVLSNLVVLTPTQTAVQVSAIDATPPRLNPVVVEEDDGVATVSSQCNDRLRSALENALHEYQSTPTELRPRLPRLPMHKKNRALVCALDSQLKNIFESSENLVDTHSILFCGAVAACRLANVKFPNCDVANRPKPAVPAWQRRIERRIDGARVLIGKLYCFREGNTRPRVMRFVRRAFSGTEISPQEYMSRVTERIDFLKQKVYAWANRIRRYKRRVDRYSQNRMFQSDERWVYRAWERPEQNMTDVCRPDDAATSSFWRSIWSVPVCHTEADWMRDVERVCEPIPEMEPIFITPLDVARAVRPLPNWKSPGPDGLHNFWLKWFSSSHTCLASQFQSSLESGSLPQFLTTGVTHLLHKSGSPAEPKNYRPITCLSTIYKLLTSILRVKINTHIDKNSIMSASQNGCRNGSRGTKELLLIDMAISQQVRRSRKDLSTCWIDYKKAYDSVPHTWLMRVLELYKIDTTLRTFLESCMGQWRTVLRYPGCRQIQGSDDPVWIKRGIFQGDSLSPLWFCLALNPLSILLENSGLGCRLRKDGQVISHLLYMDDLKLFASNKLRLMELLKVTETFSNAIRMEFGVDKCAVMYVKRGEIMESEGLQLSDSIQLRSLSSSETYKYLGMSEALGINITDMKQSLKERFFSRLRKVLNSLLSGGNKVRAFNGWVMPVLMYSFGILKWTQTELDALDRRVRTLLTESRMHHPRSSVMRLYIPRKCGGRGFLNAKTLHNREVCSLREYFLKAEVGMHRDVVAVDKGLTPLSMAKENWHKPEVLTTDDRKEVWQGKELHGRFYRALHGPDVDFLASVSWLRFGDLFGETEGFVCAIMDEVMLTNNYRKYIMKDGTVDMCRACHLPGESIRHIISGCSRLANGEYLHRHNQVARIIHQQLALKYKLVESEVPYYKYVPDPVLESDHVTLYWDRSIITDRTIVANKPDIVMIDRSARRVMIIDVTIPHDENLVKAEKEKQIKYLDLAHEVRDMWNMNSVIIVPIVVTANGLIAKSFDDHLSKLSLGGWIMGLIQKAVVLDTARIVRRFLSLQP

SEQ ID NO: 28577 - protein, 1202 aa, Cosmia trapezina
MLTRSAARARPPPPDSSLSSASPPPVSNPTVGAVMTPAAAVASSSSDEYFSPPTSPTPVRRQGRGRPPRSLGLRGQPAPSRVPAAGGCVQRMRWTQSMNENVMRAYYGSTEGGTNLTAYRVRMLSLFQELEPTVTVSAQRISDQVRVIQRNHRLDDAALDRLRSEVLSNHIISNPTQTAVQPSIIDALPPRSNHVVEEEDDRVATVSSQYNDRLRDALEDAFCEYRSTPTELRPRLPRLPMHKKNRALMCALDSLLKDFFESSENLVDTHSILYCAAVAACRLANVKFPNCDGATRPKPAVPAWQCRIERRIDGARVLIGKLYCFRQGNTRPRVMRFVRRAFSGTGISPPEYMSRVTERIDFLKQKVCAWASRIRRYKRRVDRYTQNRMFQSDERWVYRAWERPEQNVTDVCRPDDAATSAFWRSIWSVPVCHAEAGWMKDVERVCEAIPEMEPVLITPLDVARAVRPLPNWKSPGPDGLHNFWLKWLISSHTRLASQFQSSLESGSLPQFLTTGVTHLLHKSGSPAEPKNYRPITCLSTIYKLLTSILRAKINMHINSNSIMSTSQNGCRNGSRGTKELLLIDMAISQQVRRSRKDLSTCWIDYKKAYDSVSHAWLMRVLEWYKIDATLRTFLESCMGQWRTVLRYPGCRRIQGHDEPVRIKRGIFQGDSLSPLWFCLALNPLSTLLEDSGLGYRLRRGGQVISHLLYMDDLKLFAPNKLRLMELLKVTETFSSAIRMEFGVDKCAVMHVKRGEIMESEGIQLSDSIHLRSLSSSETYKYLGMSEALGINVADMKQSLRERFFGRLKKVLISLLSGGNKVRAFNGWVMPVLMYSFGILKWTQTELDALDRRVRTLLTANRMHHPRSSVMRLYIPRKCGGRGFLNARTLHNREVCSLREYFLKSDVGMHRDVVAVDKGLTPLSMAKENWRKPVVLTTDDRKNVWQSKELLGRFYRALHEPGVDFLASVSWLRFGDLFGETEGFVCAIMDEVILTNNYRRYIMKDGTVDVCRACHRPGESIRHIISGCSRLANGEYLHRHNQVARIIHQQLALKYKLVDSEVPYYKYVPDPVLENDHVTLYWDRSIITDRTIVANKPDIVVIDRLARRAMIVDVTIPHDGNLVKAEKEKQIKYLDLAHEVVDMWNVDSAVIVPIVVTANGLIADSLDQHLSRLSLGGWIKGQIQKAVLLDTARIVRRFLSLQP

SEQ ID NO: 28578 - protein, 1111 aa, Mamestra brassicae
MRWTQSMNENVMRAYYGSTEGGTNLTAYRVRMLSLFQDLEPTVNVSAQRLSDQVRVIQHNCRLDDAALERLRSEVLSNLIISTPTQTVVQAPASGAITPRPNNGSDEVDDRVVTVSSQCNDRLRSALEDALREYRLTPTELRPRLPRLPMHKKNRALVCALDSLLQNIFESSESLVDTHSILFCGAVAACRIANVKFPSCDEAIRPKPAAPAWQCRIERRIDEARALIGKLYCFREGNTRPRVMRFVRRAFSGTGISPREYTFRVTERIDFLKQKVCAWANRIRRYKRRVDRYSQNRMFQSDERWVYRAWERPEQSVTDVYRPDDVATSTFWRSNWSVPICHAEGGWMRDVERVCEAIPQMEKITITTLDIAKAVRPLPNWKSPGPDGLHNFWLKWYSSSHALLASQFQSSLESGSLPQFLTTGITHLLHKTGSPAEPKNYRPITCLSTVYKLLTSILRAKINEHIESNSIMSASQNGCRKGSRGTKELLLIDMAISQQVRRSRKDLSTCWIDYKKAYDSVPHTWLMKVLELYKIDATLRTFLESCMRQWKTVLRYPGCQPIQGSDEPVWIKWGIFQGDSLSPLWFCLALNPLSTLLEDSGLGYRLRRGGQAISHLLYMDDLKLFAPNNLRLMELLKVTETFSSAIRMEFGVDKCAVMHVKKGEIMESEGIQLSDSIQVRSLSSTESYKYLGMSEALGINGTDMKQSLRERFFGRLKKVLNSLLSGGNKVRAFNGWVMPVLMYTFGILKWTQTELDALDRRVRTLLTANRMHHPRSSVMRLYIPRKCGGRGFLNAKTLHNREMCSLREYFLKADVGMHRDVVAVDKGLTPLSMAKENWRKPVILTTDDRKEVWKGKELHGRFYRALYGSDVDFSASVAWLRFGDLFGETEGFVCAIMDEVILTNNYRKHIMKDGTVDVCRACHRPGESIRHIISGCSRLANGEYLHRHNQVARIIHQQLALKYKLVDSEVPYYKYVPDPVLENDHVTLYWDRSIITDRTIVANKPDIVVIDRLARRTMIIDVIIPHDENLVKAEKEKQIKYLDLAHEVVDMWNVDSAVIVPIVITANGLMAKSFDDHLSKLALRGWIKGLIQKAVLLDTARIVRRFLSLEP

SEQ ID NO: 28579 - protein, 1199 aa, Mamestra brassicae
MLTRAALQRARPPPPDPSLSSASPPPDIGSPLSPAVAVASSSSDEYFSPPTSPTPVRRQGRGRPPRGLGPRGQPAPSRVPATGGCVQRMRWTQSMNENVMRAYYGSTEGGTNLTAYRVRMLSLFQDLEPTVNVSAQRLSDQVRVIQRNHRLDDAALDRLRSEVLNNLIISTPTQTAVQAPVNGRITPRPNNVSDEVDDRVVTVSSQCNDRLRSALEDALREYRSTPTELRPRLPRLPMHKKNRALVCALDSLLQNIFESSESLVDTHSILYCGAVAACRIANVKFPGYDEAIRPKPAAPAWQRRIERRIDETRALIGKLYCFREGNTRPRVMRFVRRAFSGTEISPRDFTSRVTERIDFLKQKVCAWASRIRRYKRRVDRYSQNRMFQSDKRWVYRVWERPEQSVTDVCRPDDVATSIFWRSIWSVPICHAEGGWMRDVERVCEAIPQMEKITITTLDVAKAVRPLPNWKSPGPDGLHNFWLKWYSSSHALLASQFQSSLDSGSLPQFLTTGVTHLLHKTGSPTEPKNYRPITCLSTVYKLLTSILRAKINEHIESNSIMSASQNGCRKGSRGTKELLLIDMAISQQFRRSRKDLSTCWIDYKKAYDSVPHTWLMKVLELYKIDATLRTFLESCMRQWKIVLRYPGCRPIQGSDEPVWIKPGIFQGDSLSPLWFCLALNPLSTLLEDSGLGYRLRRGGQAISHLLYMDDLKLFAPNNLRLMELLKVTEAFSSAIRMEFGVDKCAVMHVKKGEIMESEGIHLSDSIQVRSLSSTETYKYLGMLEALGINGTDMKQSLKERFFGRLKKVLNSLLSGGNKVRAFNGWVMPVLMYTFGILKWTQTELDALDRRVRTLLTANRMHHPRSSVMRLYIPRKCGGRGFLNAKTLHNREMCSLREYFLKADVGMHRDVVAVDKGLTPLSMAKENWRTPVILTTDDRKEVWKGKELHGRFYRALHGSDVDFSASVAWLRFGDLFGETEGFVCAIMDEVILTNNYRRHIMKDGTVDMCRACHRPGESIRHIISGCSRLANGEYLHRHNQVARIIHQQLALKYNLVDSEVPYYKYVPDPVLENDHVTLYWDRSIITDRTIVANKPDIVVIDRLARRTMIIDVTIPHDENLVKAEKEKQIKYLDLAHEVVDMWNVESAVIVPIVVTANGLMAKSFDDHLSKLALRSWVKGLIQKAVLLDTARIVRRFLSLEP

SEQ ID NO: 28580 - protein, 1199 aa, Mamestra brassicae
MITRAAARRAHPPPPGSSLSSASPTPDIGSQVSPVVAVASSSSDEYFSPPTSPTPVRRQGRGRPPRSLGSRGQPALSRVPAAGGCVQRMRWTQSMNENVMRAYYGSTEGGTNLTAYRVRMLSLFQDLEPTVNVSAQRLSDQVRVIQHNCRLDDAALERLRSEVLSNLIISTPTQTVVQAPASGAITPRPNNGSDEVDDRVVTVSSQCNDRLRSALEDALREYRLTPTELRPRLPRLPMHKKNRALVCALDSLLQNIFESSESLVDTHSILFCGAVAACRIANVKFPSCDEAIRPKPAAPAWQCRIERRIDEARALIGKLYCFREGNTRPRVMRFVRRAFSGTGISPREYTFRVTERIDFLKQKVCAWANRIRRYKRRVDRYSQNRMFQSDERWVYRAWERPEQSVTDVYRPDDVATSTFWRSIWSVPICHAEGGWMRDVERVCEAIPQMEKITITTLDIAKAVRPLPNWKSPGPDGLHNFWLKWYSSSHALLASQFQSSLESGSLPQFLTTGITHLLHKTGSPAEPKNYRPITCLSTVYKLLTSILRAKINEHIESNSIMSGSQNGCRKGSRGTKELLLIDMAISQQVRRSRKDLSTCWIDYKKAYDSVPHTWLMKVLELYKIDATLRTFLESCMRQWKTALRYPGCQPIQGSDEPVWIKRGIFQGDSLSPLWFCLALNPLSTLLEDSGLGYRLRRGGQAISHLLYMDDLKLFAPNNLRLMELLKVTETFSSAIRMEFGVDKCAVMHVKKGEIMESEGIQLSDSIQVRSLSSTESYKYLGMSEALGINGTDMKQSLRERFFGRLKKVLNSLLSGGNKVRAFNGWVMPVLMYTFGILKWTQTELDALDRRVRTLLTANRMHHPRSSVMRLYIPRKCGGRGFLNAKTLHNREMCSLREYFLKADVGMHRDVVAVDKGLTPLSMAKENWRKPVILTTDDRKEVWKGKELHGRFYRALYGSDVDFSASVAWLRFGDLFGETEGFVCAIMDEVILTNNYRKHIMKDGTVDVCRACHRPGESIRHIISGCSRLANGEYLHRHNQVARIIHQQLALKYKLVDSEVPYYKYVPDPVLENDQVTLYWDRSIITDRTIVANKPDIVVIDRLARRTMIIDVTIPHDENLVKAEKEKQIKYLDLAHEVVDMWNVDSAVIVPIVITANGLMAKSFDDHLSKLALRGWIKGLIQKAVLLDTARIVRRFLSLEP

SEQ ID NO: 28581 - protein, 1199 aa, Mamestra brassicae
MLTRAALQRARPPPPDPSLSSASPPPDIGSPLSPAVAVASSSSDEYFSPPTSPTPVRRQGRGRPPRGLGPRGQPAPSRVPATGGCVQRMRWTQSMNENVMRAYYGSTEGGTNLTAYRVRMLSLFQDLEPTVNVSAQRLSDQVRVIQRNHRLDDAALDRLRSEVLNNLIISTPTQTAVQAPVNGRITPRPNNVSDEVDDRVVTVSSQCNDRLRSALEDALREYRSTPTELRPRLPRLPMHKKNRALVCALDSLLQNIFESSESLVDTHSILYCGAVAACRIANVKFPGCDEAIRPKPAAPAWQRRIERRIDETRALIGKLYCFREGNTRPRVMRFVRRAFSGTEISPRDFTSRVTERIDFLKQKVCAWASRIRRYKRRVDRYSQNRMFQSDERWVYRAWERPEQSVTDVCRPDDVATSIFWRSIWSVPICHAEGGWMRDVERVCEAIPQMEKITITTLDVAKAVRPLPNWKSPGPDGLHNFWLKWYSSSHALLASQFQSSLDSGSLPQFLTTGVTHLLHKTGSPAEPKNYRPITCLSTVYKLLTSILRAKINEHIESNSIMSASQNGCRKGSRGTKELLLIDMAISLQVRRSRKDLSTCWIDYKKAYDSVPHTWLMKVLELYKIDATLRTFLESCMRQWKTVLRYPGCRPIQGSDEPVWIKRGIFQGDSLSPLWFCLALNPLSTLLEDSGLGYRLRRGGQAISHLLYMDDLKLFAPNNLRLMELLKVTETFSSAIRMEFGVDKCAVMHVKKGEIMESEGIHLSDSIQVRSLSSTETYKYLGMLEALGINGTDMKQSLRERFFGRLKKVLNSLLSGGNKVRAFNGWVMPVLMYTFGILKWTQTELDALDRRVRTLLTANRMHHPRSSVMRLYIPRKCGGRGFLNAKTLHNREMCSLREYFLKADVGMHRDVVAVDKGLTPLSMAKENWRTPVILTTDDRKEVWKGKELHGRFYRALHGSDVDFSASVAWLRFGDLFGETEGFVCAIMDEVILTNNYRRHIMKDGTVDMCRACHRPGESIRHIISGCSRLANGEYLHRHNQVARIIHQQLALKYNLVDSEVPYYKYVPDPVLENDHVTLYWDRSIITDRTIVANKPDIVVIDRLARRTMIIDVTIPHDENLVKAEKEKQIKYLDLAHEVVDMWNVESAVIVPIVVTANGLMAKSFDDHLSKLALRSWVKGLIQKAVLLDTARIVRRFLSLEP

SEQ ID NO: 28582 - protein, 1199 aa, Mamestra brassicae
MITRAAARRAHPPPPGSSLSSASPTPDIGSQVSPVVAVASSSSDEYFSPPTSPTPVRRQGRGRPPRSLGSRGQPALSRVPAAGGCVQRMRWTQSMNENVMRAYYGSTEGGTNLTAYRVRMLSLFQDLEPTVNVSAQRLSDQVRVIQHNCRLDDAALERLRSEVLSNLIISTPTQTVVQAPASGAITPRPNNGSDEVDDRVVTVSSQCNDRLRSALEDALREYRLTPTELRPRLPRLPMHKKNRALVCALDSLLQNIFESSESLVDTHSILFCGAVAACRIANVKFPSCDEAIRPKPAAPAWQCRIERRIDEARALIGKLYCFREGNTRPRVMRFVRRAFSGTGISPREYTFRVTERIDFLKQKVCAWANRIRRYKRRVDRYSQNRMFQSDERWVYRAWERPEQSVTDVYRPDDVATSTFWRSIWSVPICHAEGGWMRDVERVCEAIPQMEKITITTLDIAKAVRPLPNWKSPGPDGLHNFWLKWYSSSHALLASQFQSSLESGSLPQFLTTGITHLLHKTGSPAEPKNYRPITCLSTVYKLLTSILRAKINEHIESNSIMSASQNGCRKGSRGTKELLLIDMAISQQVRRSRKDLSTCWIDYKKAYDSVPHTWLMKVLELYKIDATLRTFLESCMRQWKTVLRYPGCQPIQGSDEPVWIKRGIFQGDSLSPLRFCLALNPLSTLLEDSGLGYRLRRGGQAISHLLYMDDLKLFAPNNLRLMELLKVTETFSSAIRMEFGVDKCAVMHVKKGEIMESEGIQLSDSIQVRSLSSTESYKYLGMSEALGINGTDMKQSLRERFFGRLKKVLNSLLSGGNKVRAFNGWVMPVLMYTFGILKWTQTELDALDRRVRTLLTANRMHHPRSSVMRLYIPRKCGGRGFLNAKTLHNREMCSLREYFLKADVGMHRDVVAVDKGLTPLSMAKENWRKPVILTTDDRKEVWKGKELHGRFYRALYGSDVDFSASVAWLRFGDLFGETEGFVCAIMDEVILTNNYRKHIMKDGTVDVCRACHRPGESIRHIISGCSRLANGEYLHRHNQVARIIHQQLALKYKLVDSEVPYYKYVPDPVLENDHVTLYWDRSIITDRTIVANKPDIVVIDRLARRTMIIDVTIPHDENLVKAEKEKQIKYLDLAHEVVDMWNVDSAVIVPIVITVNGLMAKSFDDHLSKLALRGWIKGLIQKAVLLDTARIVRRFLSLEP

SEQ ID NO: 28583 - protein, 1199 aa, Mamestra brassicae
MITRAAARRAHPPPPGSSLSSASPTPDIGSQVSPVVAVASSSSDEYFSPPTSPTPVRRQGRGRPPRSLGSRGQPALSRVPAAGGCVQRMRWTQSMNENVMRAYYGSTEGGTNLTAYRVRMLSLFQDLEPTVNVSAQRLSDQVRVIQHNCRLDDAALERLRSEVLSNLIISTPTQTVVQAPASGAITPRPNNGSDEVDDRVVTVSSQCNDRLRSALEDALREYRLTPTELRPRLPRLPMHKKNRALVCALDSLLQNIFESSESLVDTHSILFCGAVAACRIANVKFPSCDEAIRPKPAAPAWQCRIERRIDEARALIGKLYCFREGNTRPRVMRFVRRAFSGTGISPREYTFRVTERIDFLKQKVCAWANRIRRYKRRVDRYSQNRMFQSDERWVYRAWERPEQSVTDVYRPDDVATSTFWRSIWSVPICHAEGGWMRDVERVCEAIPQMEKITITTLDIAKAVRPLPNWKSPGPDGLHNFWLKWYSSSHALLASQFQSSLESGSLPQFLTTGITHLLHKTGSPAEPKNYRPITCLSTVYKLLTSILRAKINEHIESNSIMSASQNRCRKGSRGTKELLLIDMAISQQVRRSRKDLSTCWIDYKKAYDSVPHTWLMKVLELYKIDATLRTFLESCMRQWKTVLRYPGCQPIQGSDEPVWIKRGIFQGDSLSPLWFCLALNPLSTLLEDSGLGYRLRRGGQAISHLLYMDDLKLFAPNNLRLMELLKVTETFSSAIRMEFGVDKCAVMHVKKGEIMESEGIQLSDSIQVRSLSSTESYKYLGMSEALGINGTDMKQSLRERFFGRLKKVLNSLLSGGNKVRAFNGWVMPVLMYTFGILKWTQTELDALDRRVRTLLTANRMHHPRSSVMKLYIPRKCGGRGFLNAKTLHNREMCSLREYFLKADVGMHRDVVAVDKGLTPLSMAKENWRKPVILTTDDRKEVWKGKELHGRFYRALYGSDVDFSASVAWLRFGDLVGETEGFVCAIMDEVILTNNYRKHIMKDGTVDVCRACHRPGESIRHIISGCSRLANGEYLHRHNQVARIIHQQLALKYKLVDSEVPYYKYVPDPVLENDHVTLYWDRSIITDRTIVANKPDIVVIDRLARRTMIIDVTIPHDENLVKAEKEKQIKYLDLAHEVVDMWNVDSAVIVPIVITANGLMAKSFDDHLSKLALRGWIKGLIQKAVLLDTARIVRRFLSLEP

SEQ ID NO: 28584 - protein, 968 aa, Noctua fimbriata
MRFVNIDPLLPNLGPDYHGYPCIIKIGRWCVPWTRNSILYCGAVAACRLANVKFSNCDVATRPKPAVPAWQRRIERRIDGARVLIGKLHCFREGNTRPRVMRFVRRAFSGTGISPQEYMSRVTERIDFLKQKVYAWANRIRRYKRRVDRYSQNRMFQSDERWVYRAWERPELNMTDVCRPDDAATSSFWRSIWSVPVCHTEADWMRDVERVCEPIPEMEPILITPLDIARAVRPLPNWKSPGPDGLHNFWLKWLSSSHTCLASQFQSSLESGSLPQFLTTGVTHLLHKSGSPAEPKNYRPITCLSTVYKLLTSILRAKINTHIDKNSIMSASQNGCRNGSRGTKELLLIDMAISQQVRRSRKDLSTCWIDYKKAYDSVPHTWLMRVLELYKIDATLRAFLESCMGQWRTVLRYPGCRQIQGNDEPVWIKRGIFQGDSLSPLWFCLALNPLSTLLEDSGLGYRLRRGGQVISHLLYMDDLKLFAPNKLQLMELLKVTETFSSAIRMEFGVDKCAVMYVKRGEIMESEGIQLSDFIHLRSLSSSESYKYLGMSEALGINVTDMKQSLKERFFGRLNKVLHSLLSGGNKVRAFNGWVMPVLMYSFGVLKWTQTELDALDRRVRTLLTANRMHHPRSSVMRLYIPRKCGGRGFLNAKSLHNREMCSLREYFLKVEVGMHRDVVAVDKGLTPLSMAKENWRKPEVLTTDDRKEVWQGKELHGRFYRALHGPDVDFLASVSWLRFGDLFGETEGFVCAIMDEVMLTNNYRKYIMKDGTVDVCRACHRPGESIRHIISGCSRLANGEYLHRHNQVARIIHQQLALKYKLVESEVPYYKYVPDPVLEKNHVTLYWDQSIITDRTIVANKPDIVVIDRSARRVMIVDVTIPHDENLVKAEKEKQIKYLDLAHEVVDMWHVNSAIIVPIVVTANGLIAKSLDDHLSKLSLGGWIKGLIQKAVLLDTARIVRRFLSLEP

SEQ ID NO: 28585 - protein, 1202 aa, Noctua fimbriata
MITRAASRRARLPPPDQSLSSASPPPESSPIVSAVTPAVAVASSSSDEYFSPPTSPTPVRRQGRGRPPRSLGLRGHPAPSRVPAAGGCVQRMRWTHSINENVMRAYYGSTEGGTNLTAYRVGMLSLFQVLEPTINVSAQRLSDQVRVIQRNHMLDDAVLDRLRSEVLRNRIVFTPAQTAVQASVIDATPPRFNPAVVEEDDRVAVVSSQCNDRLRSALEDALREYRSTPTELRPRLPRLPMHNKNRALVCALDSQLKNLFESSENLVDTHSILYCGAVAACRLANVKFPNCDVATRPKPAVPAWQRRIECRIDGARVLIGKLHCFREGNTRPRVMRFVRQAFSGTGISPQEYMSRVTERIDFLKQKVYAWANRIRRYKRQVDRYSQNRMFQSDERWVYRAWERPDQNMTDLCRPDDAATSSFWRSIWSVPVCHTEADWMRDVEQVCEPIPEMEPILITPLDVASAVRPLPNWKSPGPDGLHNFWLKWLSSSHTCLASQFQSSLESGSLPQFLTTGVTHLLHKSGSPAEPKNYRPITCLSTVYKLLTSILRAKINTHIDKNSIMSASQNGCRNGSRATKELLLIDMAISQQVRRSRKDLSTCWIDYKKAYDSVPHTWLMRVLELYKIDATLRAFLESCMGQWRTVLRYPGCRQIQGNDEPVWIKRGIFQGDSLSPLWFCLALNPLSTLLEDSGLGYRLRRGGQVISHLLYMDDLKLFAPNKLQLMELLQVTETFSSAIRMEFGVDKCAVMYVKQGEIMESEGIQLSDSIHLRTLSSTESYKYLGMSEALGINVIDMKQSLKERFFGRLNKVLHSLLSGGNKVRAFNGWVMPVLMYSFGVLKWTQTELDALDRRVRTLLTANRMHHPRSSVMRLYIPRKCGGRGFLNAKSLHNREMCSLREYFLKVEVGMHRDVVAVDKGLTPLSMAKENWRKPEVLTTDDRKEVWQGKELHGRFYRALHGPDVDFLASVSWLRFGDLFGETEGFVCAIMDEVMLTNNYRKYIMKDGTVDVCRACHRPGESIRHIISGCSRLANGEYLHRHNQVARIIHQQLALKYKLVESEVPYYKYVPDPVLEKDHVTLYWDQSIITDRTIVANKPDIVVIDRSARRVMIVDVTIPHDENLVKAEKEKQIKYLDLAHEVVDMWNVNSAIIVPIVVTANGLIAKSLDDHLSKLSLGGWIKGLIQKAVLLDTARIVRRFLSLEP

SEQ ID NO: 28586 - protein, 1204 aa, Noctua fimbriata
MITRSRAKQLQEAHTPSPGSSLSSASQPPRRATSVSTVSPVAAVASSSSDEFFSPPSTPPPRRRGRGRPPAGLGPRGQPAPNRVPAAGGNVSRMRWTQSINEQVMRAYYGATEGGTNLTAYRVGMLSLFQVLEPTVNVSAQRLSDQVRVIQRNHMLDDAVLDRLRSEVLSNRIVLTPAQTAVQASVIDATPPRFNPAVVEEDDRVAVVSSQCNDRLRSALEDALREYRSTPTELRPRLPRLPMHNKNRALVCALDSQLENIFESSENLVDTHSILYCGAVAACRLANVKFPNCDVVTRPKPAVPAWQRRIERRIDGARVLIGKLHCFREGNTRPCVMRFVRRAFSGTGISPQEYMSRVTERIDFLKQKVYAWANRIRRYKRRVDRYSQNRMFQSDERWVYRAWERPELNMTDVCRPDDAATSSFWRSIWSVPVCHTEADWMRDVERVCEPIPEMEPILITPLDIARAVRPLPNWKSPGPDGLHNFWLKWLSSSHTCLASQFQSSLESGSLPQFLTTGVTHLLHKSGSPAEPKNYRPITCLSTVYKLLTSILRAKINTHIDKNSIMSASQNGCRNGSRGTKELLLIDMAISQQVRRSRKDLSTCWIDYKKAYDSVPHTWLMRVLELYKIDATLRAFLESCMGQWRTVLRYPGCRQIQRNDEPVWIKRGIFQGDSLSPLWFCLALNPLSTLLEDSGLGYRLRRGGQVISHLLYMDDLKLFAPNKLQLMELLKVTETFSSAIRMEFGVDKCAVMYVKQGEIMESEGIQLSDSIHLRTLSSTESYKYLGMSEALGINVTDMKQSLKERFFGRLNKVLHSLLSGGNKVRAFNGWVMPVLMYSFGVLKWTQTELDALDRRVRTLLTANRMHHPRSSVMRLYIPRKCGGRGFLNAKSLHNREMCSLREYFLKVEVGMHRDVVAVDKGLTPLSMAKENWRKPEVLTTDDRKEVWQGKELHGRFYRALHGPDVDFLASVSWLRFGDLFGETEGFVCAIMDEVMLTNNYRKYIMKDGTVDVCRACHRPGESIRHIISGCSRLANGEYLHRHNQVARIIHQQLALKYKLVESEVPYYKYVPDPVLEKNHVTLYWDQSIITDRTIVANKPDIVVIDRSARRVMIVDVTIPHDENLVKAEKEKQIKYLDLAHEVVDMWHVNSAIIVPIVVTANGLIAKSLDDHLSKLSLGGWIKGLIQKAVLLDTARIVRRFLSLEP

SEQ ID NO: 28587 - protein, 1111 aa, Noctua fimbriata
MRWTQSINEQVMRAYYGATEGGTNLTAYRVGMLSLFQVLEPTVNVSAQRLSDQVRVIQRNHMLDDAVLDRLRSEVLSNRIVLTTAQTAVQASVIDATPPRFNPAVVEEDDRVAVVSSQCNDRLRSALEDALREYRSTPTELRPRLPRLPMHNKNRALVCALDSQLENIFESSENLVDTHSILYCGAVAACRLANVKFPNCDVATRPKPAVPAWQRRIERRIDGARVLIGKLHCFREGNTRPRVMRFVRRAFSGTGSSPQEYMSRVTERINFLKQKVYAWANRIRRYKRRVDRYSQNRMFQSDERWVYRAWERPELNMTDVCRPDDAASSSFWRSIWSVPVCHTEADWMRDVERVCEPIPEMEPILITPLDIARAVRPLPNWKSPGPDGLHNFWLKWLSSSHTCLASQFQSSLESGSLPQFLTTGVTHLLHKSGSPAEPKNYRPITCLSTVYKLLTSILRAKINTHIDKNSIMSASQNGCRNGSRGTKELLLIDMAISQQVRRSRKDLSTCWIDYKKAYDSVPHTWLMRVLELYKIDATLRAFLESCMGQWRTVLRYPGCRQIQGNDEPVWIKRGIFQGDSLSPLWFCLALNPLSTLLEDSGLGYRLRRGGQVISHLLYMDDLKLFAPNKLQLMELLKVTETFSSAIRMEFGVDKCAVMYVKRGEIMESEGIQLSDFIHLRSLSSSESYKYLGMSEALGINVTDMKQSLKERFFGRLNKVLHSLLSGGNKVRAFNGWVMPVLMYSFGVLKWTQTELDALDRRVRTLLTANRMHHPRSSVMRLYIPRKCGGRGFLNAKSLHNREMCSLREYFLKVEVGMHRDVVAVDKGLTPLSMAKENWRKPEVLTTDDRKEVWQGKELHGRFYRALHGPNVDFLASVSWLRFGDLFGETEGFVCAIMDEVMLTNNYRKYIMKDGTVDVCRACHRPGESIRHIISGCSRLANGEYLHRHNQVARIIHQQLALKYKLVESEVPYYKYVPDPVLEKNHVTLYWDQSIITDRTIVANKPDIVVIDRSARRVMIVDVTIPHDENLVKAEKEKQIKYLDLAHEVVDMWHVNSAIIVPIVVTANGLIAKSLDDHLSKLSLGGWIKGLIQKAVLLDTARIVRRFLSLEP

SEQ ID NO: 28588 - protein, 1202 aa, Noctua fimbriata
MLTRAAARRARLPPPDPSLSSASPPPESSPIVSAVTPAVAVASSSSDEYFSPPTSPTPVRRQGRGRPPRSLGLRGHPAPSRVPAAGGCVQRMRWTHSINENVMRAYYGSTEGGTNLTAYRVGMLSLFQVLEPTVNVSAQRLSDQVRVIQRNHMLDDAVLDRLRSEVLSNRIVLTPAQTAVQASVIDATPPRFNPAVVEEDDRVAVVSSQCNDRLRSALEDALRKYRSTPTELRPRLPRLPMHNKNRALVCALDSQLKNIFESSENLVDTHSILYCGAVAACRLANVKFPNCDVATRPKPAVPAWQRRIERRIDGARVHIGKLHCFREGNTRPRVMRFVRRAFSGTGISPQEYMSRVTERIDFLKQKVYAWANRIRRYKRRVDRYSQNRMFQSDERWVYRAWERPELNMTDVCRPDDATTSSFWRSIWSVPVCHTEADWMRDVERVCEPIPEMEPILITPLDIARAVRPLPNWKSPGPDGLHNFWLKWLSSSHTCLASQFQSSLESGSLPQFLTTGVTHLLHKSGSPAEPKNYRPITCLSTVYKLLTSILRAKINTHIDKNSIMSASQNGCRNGSRATKELLLIDMAISQQVRRSRKDLSTCWIDYKKAYDSVPHTWLMRVLELYKIDATLRAFLESCMGQWRTVLRYPGCRQIQGNDEPVWIKRGIFQGDSLSPLWFCLALNPLSTLLEDSGLGYRLRSGGQVISHLLYMDDLKLFAPNKLRLMELLKVTETFSSAIRMEFGVDKCAVMYVKQGEIMESEGIQLSDSIHLRTLSSTESYKYLGMSEALGINVTDMKQSLKERFFGRLNKVLHSLLSGGNKVRAFNGWVMPVLMYSFGVLKWTQTELDALDRKVRTLLTANRMHHPRSSVMRLYIPRKCGGRGFLNAKSLHNREMCSLREHFLKVEVGMHRDVVAVDKGLTPLSMAKENWRKPEVLTTDDRKEVWQGKELHGRFYRALHGPDVDFLASVSWLRFGDLFGETEGFVCAIMDEVMLTNNYRKYIMKDGTVDVCRACHRPGESIRHIISGCSRLANGEYLHRHNQVARIIHQQLALKYKLVESEVPYYKYVPDPVLEKDHVTLYWDQSIITDRTIVANKPDIVVIDRSARRVMIVDVTIPHDDNLVKAEKEKQIKYLDLAHEVVDMWNVNSAIIVPIVVTANGLIAKSLDDHLSRLSLGGWIKGLIQKAVLLDTARIVRRFLSLEP

SEQ ID NO: 28589 - protein, 1050 aa, Noctua fimbriata
MLDDAVLDRLRSEVLSNRIVLTAAQTAVQASVIDATPPRFNPAVVEEDDRVAVVSSQCNDRLRSALEDALREYRSTPTELRPRLPRLPMHNKNRALVCALDSQLENIFESSENLVDTHSILYCGAVAACRLANVKFSNCDVATRPKPAVPAWQRRIERRIDGARVLTGKLHCFREGNTRPRVMRFVRRAFSGTGISPQEYMSRVTERIDFLKQKVYAWANRIRRYKRRVDRYSQNRMFQSDERWVYRAWERPELNMTDVCRPDDAATSSFWRSIWSVPVCHTEADWMRDVERVCEPIPEMEPILITPLDIARAVRPLPNWKSPGPDGLHNFWLKWLSSSHTCLASQFQSSLESGSLPQFLTTGVTHLLHKSGSPAEPKNYRPITCLSTVYKLLTSILRAKINTHIDKNSIMSASQNGCRNGSRGTKELLLIDMAISQQVRRSRKDLSTCWIDYKKAYDSVPHTWLMRVLELYKIDATLRAFLESCMGQWRTVLRYPGCRQIQGNDEPVWIKRGIFQGDSLSPLWFCLALNPLSTLLEDSGLGYRLRRGGQVISHLLYMDDLKLFAPNKLQLMELLKVTETFSSAIRMEFGVDKCAVMYVKRGEIMESEGIQLSDFIHLRSLSSSESYKYLGMSEALGINVTDMKQSLKERFFGRLNKVLHSLLSGGNKVRAFNGWVMPVLMYSFGVLKWTQTELDALDRRVRTLLTANRMHHPRSSVMRLYIPRKCGGRGFLNAKSLHNREMCSLREYFLKVEVGMHRDVVAVDKGLTPLSMAKENWRKPEVLTTDDRKEVWQGKELHGRFYRALHGPDVDFLASVSWLRFGDLFGETEGFVCAIMDEVMLTNNYRKYIMKDGTVDVCRACHRPGESIRNIISGCSRLANGEYLHRHNQVARIIHQQLALKYKLVESEVPYYKYVPDPVLEKNHVTLYWDQSIITDRTIVANKPDIVVIDRSARRVMIVDVTIPHDENLVKAEKEKQIKYLDLAHEVVDMWNVNSAIIVPIVVTANGLIAKSLDDHLSKLSLGGWIKGLIQKAVLLDTARIVRRFLSLEP

SEQ ID NO: 28590 - protein, 1202 aa, Noctua fimbriata
MLTRAAARRARLPPPDPSLSSASPPPESSHIVSAVTPAVAVASSSSDEYFSPPTSPTPVRRQGRGRPPRSLGLRGHPAPSRVPAAGGCVQRMRWTHSINENVMRAYYGSTEGGTNLTAYRVGMLSLFQVLEPTVNVSAQRLSDQVRVIQRNHMLDDAVLDRLRSEVLSNRIVLTPAQTAVQASVIDATPPRFNPAVVEEDDRVAVVSSQCNDRLRSALEDALREYRSTPTELRPRLPRLPMHNKNRALVCALDSQLENIFESSENLVDTHSILYCGAVAACRLANVKFPNCDVATRPKPAVPAWQRRIERRIDGARVLIGKLHCFREGNTRPRVMRFVRRAFSGTGISPQEYMSRATERIDFLKQKVYAWANRIRRYKRRVDRYSQNRMFQSDERWVYRAWERPELNMTDVCRPDDAATSSFWRSIWSVPVCHTEADWMCDVERVCEPIPEMEPILITPLDIARAVRPLPNWKSPGPDGLHNFWLKWLSSSHTCLASQFQSSLESGSLPQFLTTGVTHLLHKSGSPAEPKNYRPITCLSTVYKLLTSILRAKINTHIDKNSIMSASQNGCRNGSRGTKELLLIDMAISQQVRRSRKDLSTCWIDYKKAYDSVPHTWLMRVLELYKIDATLRAFLESCMGQWRTVLRYPGCRQIQGNDEPVWIKRGIFQGDSLSPLWFCLALNPLSTLLEDSGLGYRLRRGGQVISHLLYMDDLKLFAPNELRLMELLKVTETFSSAIRMEFGVDKCAVMYVKQGEIMESEGIQLSDSIHLRTLSSTESYKYLGMSEALGINVTDMKQSLKERFFGRLNKVLHSLLSGGNKVRAFNGWVMPVLMYSFGVLKWTQTELDALDRRVRTLLTANRMHHPRSSVMRLYIPRKCGGRGFLNAKSLHNREMCSLREYFLKVEVGMHRDVVAVDKGLTPLSMAKENWRKPEVLTTDDRKEVWQGKELHGRFYRALHGPDVDFLASVSWLRFGDLFGETEGFVCAIMDEVMLTNNYRKYIMKDGTVDVCRACHRPGESIRHIISGCSRLANGEYLHRHNQVARIIHQQLALKYKLVESEVPYYKYVPDPVLEKDHVTLYWDQSIITDRTIVANKPDIVVIDRSARRVMIVDVTIPHDENLVKAEKEKQIKYLDLAHEVVDMWNVNSAIIVPIVVTANGLIAKSLDDHLSRLSLGGWIKGLIQKAVLLDTARILRRFLSLEP

SEQ ID NO: 28591 - protein, 1202 aa, Noctua fimbriata
MITRAAYRRARLPPPDPSLSSASPPPESSPIVSAVTPAVAVASSSSDEYFSPPTSPTPVRRQGRGRPPRSLGLRGHPAPSRVPAAGGCVQRMRWTHSINENVMRAYYGSTEGGTNLTAYRVGMLSLFQVLEPTVNVSAQRLSDQVRVIQRNHMLDDAVLDRLRSEVLSNRIVLTPAQTAVQASVIDATPPRFNPAVVEEDDRVAVVSSQCNDRLRSALEDALREYRSTPTELRPRLPRLPMHNKNRALVCALDSQLENIFESSENLVDTHSILYCGAVAACRLANVKFSNCDVATRPKPAVPAWQRRIERRIDGARVLIGKLHCFREGNTRPRVMRFVRRAFSGTGISPQEYMSRVTERIDFLKQKVYAWANRIRRYKRRVDRYSQNRMFQSDERWVYRAWERPELNMTDVCRPDDAATSSFWRSIWSVPVCHTEADWMRDVERVCEPIPEMEPILITPLDIARAVRPLPNWKSPGPDGLHNFWLKWLSSSHTCLASQFQSSLESGSLPQFLTTGVTHLLHKSGSPAEPKNYRPITCLSTVYKLLTSILRAKINTHIDKNSIMSASQNGCRNGSRGTKELLLIDMAISQQVRRSRKDLSTCWIDYKKAYDSVPHTWLMRVLELYKIDATLRAFLESCMGQWRTVLRYPGCRQIQGNDEPVWIKRGIFQGDSLSPLWFCLALNPLSTLLEDSGLGYRLRRGGQVISHLLYMDDLKLFAPNKLQLMELLKVTETFSSAIRMEFGVDKCAVMYVKRGEIMESEGIQLSDFIHLRSLSSSESYKYLGMSEALGINVTDMKQSLKERFFGRLNKVLHSLLSGGNKVRAFNGWVMPVLMYSFGVLKWTQTELDALDRRVRTLLTANRMHHPRSSVMRLYIPRKCGGRGFLNAKSLHNREMCSLREYFLKVEVGMHRDVVAVDKGLTPLSMAKENWRKPEVLTTDDRKEVWQGKELHGRFYRALHGPDVDFLASVSWLRFGDLFGETEGFVCAIMDEVMLTNNYRKYIMKDGTVDVCRACHRPGESIRHIISGCSRLANGEYLHRHNQVARIIHQQLALKYKLVESEVPYYKYVPDPVLEKNHVTLYWDQSIITDRTIVANKPDIVVIDRSARRVMIVDVTIPHDENLVKAEKEKQIKYLDLAHEVVDMWHVNSAIIVPIVVTANGLIAKSLDDHLSKLSLGGWIKGLIQKAVLLDTARIVRRFLSLEP

SEQ ID NO: 28592 - protein, 1111 aa, Atethmia centrago
MRWTQSMNENVMRAYYGSTEGGTNLTAYRVRMLSLFQGLEPTVNVSAQRLSDQVRVIQRNHRLDDAALDRLRSEVLSNHIVSTPAQTATHAPIIDAIPPRSNHDVEEEDDRVATVSSQCNVRLRSALEDAFCEYRSTPTELRPRLPRLPMHKKNRALVCALDSLLKDFFESSEDLVDTHSILYCAAVAACRLANVKFPNCDEATRPKPAVPAWQCRIERRIDGARVLISKLYCFREGNTRPRVMRFVRRAFSGTGISPREYMSRVTERIDFLKQKVCAWASRIRRYKRRLDRYTQNRMFQSDERWVYRAWERPEQNETDVCRPDDATTTAFWRSIWSEPVCHAEADWMRDVERVCETITEMEVVVITPSDIARAVRPLPNWKSPGPDGLHNFWLKWLTSSHTCLASQFQSSLESGSLPQFLTTGNTHLLHNSGSPAEPKNYRPITCFSTVYKLLTSILRAKINTHIDSNSIMSASQNGCRNGSRGTKELLLIDMAISQQVRRSRKDLSTCWIDYKKAYDSVPHTWLMRVLELYKIDTTLRIFLESCMGQWRTVLRYPGCRRIQGNDEPVWIKRGIFQGDSLSPLWFCLALNPLSTLLEDSGLGYRLRRGGQVISHLLYMDDLKIFAPNKLRLMELLKVTETFSGAIKMEFGVDKCAVMHVKRGEIMESEGIQLSDSIHLRSLSSPESYKYLGMSEALGINVTDMKQLLKERFFGRLKKVLISLLSGGNKVRAFNGWVMPVLMYSFGILKWTQTELDALDRRVRTLLTANRMHHPRSSVMRLYIPRKCGGRGFLNAKTLHNREICSLREYFLKAEVGMHRDVVAVDKGLTPLSMAKLNWCKPVVLTTDDRKEIWQNKELHGRFYRALHEPDVDFLASVSWLRFGDLFGETEGFVCAIMDEVILTNNYRRHIMKDGTVDVCRACHRPGESIRHIISGCSRLANGEYLHRHNQVARIIHQQLALKYKLVNSEVPYYKYVPDPVLENDHVTLYWDRSIITDRTIVANKPDIVVIDRLVRRAMIVDITIPHNDNLVKAEKEKQIKYLDLAHEVVDMWNVNSAVIVPIVVTANGLMAESLNHHLSRLSLGGWIKGLIQKAVLLDTARIVRRFLSLEP

SEQ ID NO: 28593 - protein, 868 aa, Atethmia centrago
MRFVRRAFSGTGISPREYMSRVTERIDFLKQKVCAWASRIRRYKRRVDRYTQNRMFQSDERWVYRAWERPEQNETDVCRPDDATTTAFWRSIWSVPVCHAEADWMRDVERVCETIPEMDVVIITPSDIARAVRPLPNWKSPGPDGLHNFWLKWLTSSHTCLASQFQSSLESGSLPQFLTTGITHLLHKSGSPAEPKNYRPITCLSTVYKLLTSILRAKINTHIDSNSIMSASQNGCRNGSRGTKELLLIDMAISQQVRRFRKDLSTCWIDYKKAYDSVPHTWLMRVLEFYKIDTTLRTFLESCMGQWRTVLRYPGCRQIQGNDEPVWIKRGIFQGDSLSPLWFCLALNPLSTLLEDSGLGYRLRRGGQVISHLLYMDDLKIFAPNKLQLMELLKVTETFSSAIRMEFGVDKCAVMHVKRGEIMESEGIQLSDSIHLRSLSSPESYKYLGMSEALGINVTDMKQSLKERFFGRLKKVLISPLSGGNKVRAFNGWVMPVLMYSFGILKWTQTELDALDRRVRTLLTANRMHHPRSSVMRLYIPRKCGGRGFLNAKTLHNRDICSLREYFLKTEVGMHRDVVAVDKGLTPLSMAKENWCKPVILTTDDRKEIWQNKELHGRFYRALHEPDVDFLASVSWLRFGDLFGETEGFVCAIMDEVILTNNYRRHIMKDGTVDVCRACHRPGESIRHIISGCSRLANGEYLHRHNQVARIIHQQLALKYKLVNSEVPYYKYAPDPVLENDHVTLYWDRSIITDRTIVANKPDIVVIDRLARRAMIVDVTIPHDENLVKAEKEKQIKYLDLAHEVVDMWNVDSAVIVPIVVTANGLMAESLNHHLSRLSLGGWIKGLIQKAVLLDTARIVRRFLSLES

SEQ ID NO: 28594 - protein, 962 aa, Mesoligia furuncula
MHKKNRALVCALDSQLKNFFESSVDLVDTHSILYCAAVAACRLANVKFPSCDGATRPKPAVPAWQRRIERRIDGARVLIGKLYCFREGNTRPRVMRFVRRAFSGTGISPREYMSRVTERIDFLKQKVCAWASRIRRYKRRVDRYTQNRMFQSDERWVYRAWERPEQNVTDVCRPDDAATSAFWCSIWSVPVCHTEAGWMQDVERVCESVPEMETVLITPSDVARAVRPLSNWKSPGPDGLHNFWLKWLISSHTCLASQFQSSLESGSLPQFLTTGVTHLLHKSGSPAEPKNYRPITCLSTVYKLLTSILRAKINKHIESNSIMSTSQNGCRNGSRGTKELLLIDMAISQQVRRSRKDLSTCWIDYKKAYDSVPHTWLMRVLELYKIDATLRTFLESCMGQWKTVLRYPGCRQIQGNDEPVWIKRGIFQGDSLSPLWFCLALNPLSTLLEDSGLGYRLRRGGQVISHLLYMDDLKLFAPNKLRLMELLKVTKTFSSAIRMEFGVDKCAVMHVKRGEIMESEGIQLSDSISLRSLSSPESYKYLGMSEALGINDADMKQSLKERFFCRLKKVLISLLSGGNKVRAFNGWVMPVLMYSFGILKWTQTELDALDRRVRTLLTANRMHHPRSSVMRLYIPRKCGGRGFLNAKTLHNREVCSLREYFLKTEVGMHRDVVAVDKGLTPLSMAKENWRKPVVLSTDDRKKVWQSKELHGRFYRALHEPGVDFIASVSWLRFGDLFGETEGFVCAIMDEVILTNNYRRHIMKDGTVDVCRACHRPGESIRHIISGCSRLANGEYLHRHNQVARIIHQQLALKYKLVDSEVPYYKYVPDPVLENDHVTLYWDRSIITDRTIVANKPDIVVIDRLARRTMIVDVTIPHDGNLVKAEKEKKIKYLDLAHEVVDMWNVSSAVIVPIVVSANGLMAESLDQHLSRLSLGGWIKGLIQKAVLLDTARIVRRFLSLEP

SEQ ID NO: 28595 - protein, 980 aa, Mesoligia furuncula
MHYASIGPLQPNLGPVYHGYPCTKKIGRWCVPWTRSSRISSRDLVDTHSILYCAAVAACRLANVKFPSCDGATRPKPAVPAWQRRIERRIDGARVLIGKLYCFREGNTRPRVMRFVRRAFSGTGISPREYMSRLTERIDFLKQKVCAWASRIRRYKRRVDRYTQNRMFQSDERWVYRAWERPEQNVTDVCRPDDAATSAFWCSIWSVPVCHTEAGWMQDVERVCESIPQMEKVLITPSDVARAVRPLPNWKSPGPDGLHNFWLKWLISSHTCLASQFQSSLESGSLPPFLTTGVTHLLHKSGSPAEPKNYRPITCLSTVYKLLTSILRAKINTHIEINSIMSASQNGCRNGSRGTKELLLIDMAISQQVRRSRKDLSTCWIDYKKAYDSVPHTWLMRVLELYKIDATLRTFLESCMGQWKTVLRYPGCRQIQGNDEPVWIKRGIFQGDSLSPLWFCLALNPLSTLLEDSGLGYRLRRGGQVISHLLYMDDLKLFAPNKLRLMELLKVTETFSSAIRMQFGVDKCAVMHVKRGEIMESEGIQLSDSISLRSLSSSESYMYLGMSEALGINDADMKQSLKERFFCRLKKVLISLLSGGNKVRAFNGWVMPVLMYSFGILKLTQTELDALDRRVRTLLTANRMHHPRSSVMRLYIPRKCGGRGFLNAKTLHNREVCSLREYFLKAEVGMHRDVVAVDKGLTPLSMAKENWRKPVVLSTDDRKKVWQSKELHGRFYRALHEPGVDFIASVSWLRFGDLFGETEGFVCAIMDEVILTNNYRRHIMKDGTVDVCRACHRPGESIRHIISGCSRLANGEYLHRHNQVARIIHQQLALKYKLVDSEVPYYKYVPDPVLENDHVTLYWDRSIITDRTIVANKPDIVVIDRLARRTMIVDVTIPHDGNLVKAEKEKEIKYLDLAHEVVDMWNVSSAIIVPIVVSANGLMAESLDQHLSRLSLGGWIKGLIQKAVLLDTARIVRRFLSLEP

SEQ ID NO: 28596 - protein, 1017 aa, Mesoligia furuncula
MPSRRARFNHVEEEDDRVDTVSSQCNVRLRSALEDALREYRSTPTELRPRLPRLPMHKKNRALVCALDSQLKNFFESSEDLVDTHSILYCAAVAACRLANVKFPSCDGATRPKPAVPAWQRRIERRIDGARVLIGKLYCFREGNTRPRVMRFVRRAFSGTGISPRGYMSRLTERIDFLKQKVCAWASRIRRYKRRVDRYTQNRMFQSDERWVYRAWERPEQNVTDVCRPDDAATSAFWCSIWSVPVCHTEAGWMQDVERVCESIPQMEKVLITPSDVARAVRPLPNWKSPGPDGLHNFWLKWLISSHTCLASQFQSSLESGSLPQFLTTGVTHLLHKSGSPAEPKNYRPITCLSTVYKLLTSILRAKINMHIESNSIMSASQNGCRNGSRGTKELLLIDMAISQQVRRSRKDLSTCWIDYKKAYDSVPHTWLMRVLELYKIDATLRTFLESCMGQWKTVLRYPGCRQIQGNDEPVWIKRGIFQGDSLSPLWFCLALNPLSTLLEDSGLGYRLRRGGQVISHLLYMDDLKLFAPNKLRLMELLKVTETFSSAIRMQFGVDKCAVMHVKRGKIKVSEGIQLSDSISLRSLSSSESYKYLGMSEALGINDADMKQSLKERFFCRLKKVLISLLSGGNKVRAFNGWVMPVLMYSFGILKWTQTELDALDRRVRTLLTANRMHHPRSSVMRLYIPRKCGGRGFLNAKTLHNREVCSLREYFLKAEVGMHRDVVAVDKGLTPLSMAKENWRKPVVLSTDDRKKVWQSKELHGRFYRALHEPGVDFIASVSWLRFGDLFGETEGFVCAIMDEVILTNNYRRHIMKDGTVDMCRACHRPGESIRHIISGCSRLANGEYLHRHNQVARIIHQQLALKYKLVDSEVPYYKYVPDPVLENDHVTLYWDRSIITDRTIVANKPDIVVIDRLARRTMIVDVTIPHDGNLVKAEKEKEIKYQDLAHEVVDMWNVSSAIIVPIVVSANGLMAESLDQHLSRLSLGGWIKGLIQKAVLLDTARIVRRFLSLEP

SEQ ID NO: 28597 - protein, 1200 aa, Xestia c-nigrum
MITRAASRRRARPPTPDSSLSSASPPPDPGSPVPPVAAVASSSSDEYFSPPTSPTPVRRAGRGRPPRSLGLRGQQAPSRVPATGGCVQRMRWTQSMNENVMRAYYGSTEGGINLTAYRDRMLSLFQDLEPAVNVSAQRLSDQVRVIQRSHRLDDTTLDRLRSEVLSNLITITPTQTAVHMSVVNATLPRSNPVVVEEDDRVALVSSQCNDRLRSALDNALREYRSISAELRPRLPRLPMHKKNRALVCALDSQLKNIFESSEDLVDTHSILFCGAVAACRLANVKFPNCDIAIRPKPAVPAWQRRIERRIDGARVLIGKLYCFREGNTRPRVMRFVRRAFSGTEISPQEYMSRVTERIDFLKQKVYAWASRIRRYKRRVDRYSQNRMFQSDERWVYRAWERPQQNMMDVCRPDDAATSSFWRSIWSVPVCHSEADWMRDVERVCEPIPTMEPILITPLDIARAVRPLPNWKSPGPDGLHNFWLKWFSSSHTCLASQFQSSLESGSLPQFLTTGVTHLLHKSGSPAEPKNYRPITCLSTVYKLLTSILRTKINTHVDSNSIMSASQNGCRNGSRGTKELLLIDMAISQQVRRARKDLSICWIDYKKAYDSVPHSWLKRVLELYKIDATLRAFLESCMGQWRTVLRYPGCRQIQGNDEPVWIKRGIFQGDSLSPLWFCLALNPVSTLLENSGLGYRLRKDGQVISHLLYMDDLKLFAPNKLQLMELLKVTETFSSAIGMEFGVDKCAVMYVKRGKIMGSEGLQLSDSIHLRSLSSSESYKYLGMSEALGINVTDMKQSLRERFFGRLKKVLNSLLSGGNKVRAFNGWVMPVLMYSFGILKWTQTELDALDRRVRTLLTENRMHHPRSSVMRLYIPRKCGGRGFLNAKTLHNREVCSLREYFLKADVGMHRDVAAVDRGLTPLSMANENWRKPVVLTTDDRMKEWQGKELHGRFYRALHGPDVDFLASVSWLRFGDLFGETEGFVCAIMDEVMLTNNYRKYIMKDGTVDVCRACHLPGESIRHIISGCSRLANGEYLHRHNQVARIIHQQLALKFNLVELEVPYYKYVPDPVLVKDHVTLYWDQSIITDRTIVANKPDIVVIDRSARRVMIIDVTIPHDENLVKAEKEKQIKYLDLAHEVRDMWNMDSVIIVPIVVSANGLIAKSLDEHLSKLSLGGWIKGLIQKAVLLDTARIVRRFLSLQP

SEQ ID NO: 28598 - protein, 1199 aa, Xestia c-nigrum
MITRAALRRARLATPDSSLSSASPPPDPGSPVSPAVAVASSSSDEYFSPPTSPTPVRRAGRGRPPRSLGLRGQQAPSRVPATGGCVQRMRWTQSMNENVMRAYYGSTEGGTNLTVYRVRMLSMFQDLEPTVNASAQRLSDQVRVIQRNHLLDDAVLDRLRSEVLNNRIIFTQAQTAVQASAIHATPPRSNPAVIEEDDRVATISSQCNDRLRSALDNALREYRSISAELRPRLPRLPMHKKNRALVCALDSQLKNIFESSEDLVDTHSILFCGAVAACRLANVKFPNCDIATRPKPAVPAWQRRIERRIDGARVLIGKLYCFREGNTRPRVMRFVRRAFSGTEISPQEYMSRVTERIDFLKQKVYAWASRIRRYKRRVDRYSQNRMFQSDERWVYRAWERPQQNMTDVCRPDDAATSSFWRSIWSVPVCHSEADWMRDLERVCEPIPTMEPILITPLDIARAVRPLPNWKSPGPDGMHNFWLKWLSSSHTCLASQFQSSLESGSLPQFLTTGVTHLLHKSGSPAEPKNYRPITCLSTVYKLLTSILRTKINTHVDNNSIMSASQNGCRNGSRGTKELLLIDMAISQQVRRARKDLSTCWIDYKKAYDSVPHSWLRRVLELYKIDATLRAFLESCMGQWRTVLRYPGCRQIQGNDEPVWIKRGIFQGDSLSPLWFCLALNPVSTLLENSGLGYRLRKDGQVISHLLYMDDLKLFAPNKLQLMELLKVTETFSSAIGMEFGVDKCAVMYVKRGKIMGSEGLQLSDSIHLRSLSSSESYKYLGMSEALGINVTDMKQSLKERFFGRLKKVLNSLLSGGNKVRAFNGWVMPVLMYSFGILKWTQTELDALDRRVRTLLTENRMHHPRSSVMRLYIPRKCGGRGFLNAKTLHNREVCSLREYFLKADVGMHRDVVAVDKGLTPLFMAKENWRKPVVLTTDDRKKEWQGKELHGRFYRALHGPDVDFLASVSWLRFGDLFGETEGFVCAIMDEVMLTNNYRKYIMKDGTVDVCRACHCPGESIRHIISGCSRLANGEYLHRHNQVARIIHLQLALKFKLVESEVPYYKYVPDPVLVKDHVTLYWDQSIITDRTIVANKPDIVVIDRSARRVMIIDVTIPHDENLVKAEKEKQMKYLDLAHEVRDMWNMNSVIIVPIVVTANGLIAKSLDEHLSKLSLGGWIKGLIQKAVLLDTARIVRRFLSLQP

SEQ ID NO: 28599 - protein, 1200 aa, Xestia c-nigrum
MITRAASRRRARPPTPDSSLSSASPPPDPGSPVPPVAAVASSSSDEYFSPPTSPTPVRRAGRGRPPRSLGLRGQQVLSRVPAAGGCVQRMRWTQSMNENVMRAYYGSTEGGINLTAYRDRMLSLFQDLEPAVNVSAQRLSDQVRVIQRSHRLDDATLDRLRSEVLSNLIIITPTQTAVQVSVVNATLPRSNPVVVEEDDRVALVSSQCNDRLRSALEDALREYRSTPTELRPRLPRLPMHKKNRALVCALDSQLKNIFESSEDLVDTHSILFCGAVAACRVANVKFPNCDIATRPKPAVPAWQRRIERRIDGARVLIGKLYSFREGNTRPRVMRFVRRAFLGTEISPQEYMSRVTERIDFLKQKVYAWANRIRRYKRRVDRYSQNRMFQSDERWVYRTWEQPQQNMTDVCRPDDAATSSFWRNIWSVPVCHTEADWMRDVERVCEPIPEMEPVFITPLDIANAVRPLPNWKSPGPDGLHNFWLKWLSSSHTCLASQFQSSLESGSLPQFLTAGVTHLLHKSGSAAEPKNYRPITCLSTVYKLLTSILRTKINIHIDKNSIMSASQNGCRNGSRGTKELLLIDMAISQQVRRSRKDLSTCWIDYKKAYDSVPHSWLMRVLELYKIDATLRTFLESCMGQWRTVLRYPGCRQIQGNDESVWIKRGIFQGDSLSPLWFCLALNPLSTLLENSGLGYRLRKDGQVISHLLYMDDLKLFAPNKLQLMELLKVTETFSSAIRMEFGVDKCAVMYVKRGEIMRSEGLQLSDSIHLRSLSSSESYKYLGMSEALGINVTDMKQSLRERFFGRLKKVFNSLLSGGNKVRAFNGWVMPVLMYSFGILKWTQTELDALDRRVRTLLTENRMHHPRSSVMRLYIPRKCGGRGFLNAKTLHNREVCSLREYFLKADVGMHRDVVAVDKGLTPLSMAKENWRKPVVLTTDDRRKEWQGKELHGRFYRALHGPDVDFLASVSWLRFGDLFGETEGFVCAIMDEVMLTNNYRKYIMKDGTVDVCRACHLPGESIRHIISGCSRLANGEYLHRHNQVARIIHQQLALKFNLVELEVPYYKYVPDPVLVKDHVTLYWDQSIITDRTIVANKPDIVVIDRSARRVMIIDVTIPHDENLVKAEKEKQIKYLDLAHEVRDMWNMNSVIIVPIVVTANGLIAKSLDDHLAKLSLGGWIKNLIQKAVLLDTARIVRRFLSLQP

SEQ ID NO: 28600 - protein, 1200 aa, Xestia c-nigrum
MITRAASRRRARLPSPDSSLSSASPPPDPGSPVSTVAAVASSSSDEYFSPPTSPTPVRRAGRGRPPRSLGLRGQQAPSRVPATGGCVQRMRWTQSMNENAMRAYYGSTEGGTNLTAYRVRMLSLFQDLEPAVNVSAQRLSDQVRVIQRNHMLDDAALDRLRSEVLSNRIILTPAQTAVQASAIDATPPRSNPAVVEEDGRVATVSSQCNDRLRSALEDALREYRSTPTELRPRLPRLPMHKKNRALVCALDSQLKNVFESSEDLVDTHSILFCGAVAACRLANVKFPNCDLATRPKPAVPVWQRRIERRIDGARVLIGKLYCFREGNTRPRVMRFVRRAFSGTEISPQEYMSRVTERIDFLKQKVYAWASRIRRYKRRVDRYSQNRMFQCDERWVYRAWERPDQNVTDVCHPGDAATSSFWRSIWSVPVCHSEADWMRDVERVCEPIPEMAPVVITSLDIARAVRPLPNWKSPGPDGLHNFWLKWLSSSHTCLASQFQSSLESGSLPQFLTTGVTHLLHKSGSPTEPQNYRPITCLSTVYKLLTSILRTKINTHIDNNSIMSASQNGCRNGSRGTKELLLIDMAISQQVRRSRKDLSTCWIDYKKAYDSVPHSWLMRVLELYKIDATLCTFLKSCMGQWRTVLRYPGCRQIQGNDESVWIKRGIFQGDSLSPLWFCLALNPLSTLLENSGLGYQLRKDGQVISHLLYMDDLKLFAPNKLRLMELLKVTETFSNAIKMEFGVDKCAVMYVKRGEIMESEGLQLSDSIHLRSLSSSESYKYLGMSEALGINVTDMKQSLRERFFGRLKKVLNSLLSGGNKVRAFNGWVMPVLMYSFGILKWTQTELDALDRRVRTLLTENRMHHPRSSVMRLYIPRKCGGRGFLNAKTLHNREVCSLREYFLKAEVGMHRDVVAVDKGLTPLSMAKENWRKPVILTTDDRKKEWQGKVLHGRFYRALHGPDVDFLASVSWLRFGDLFGETEGFVCAIMDEVMLTNNYRKYIMKDGTVDVCRACHCPGESIRHIISGCSRLANGEYLHRHNQVARIIHQQLALKFKLVESEVPYYKYVPDPVLVKDHITLYWDQSIITDRTIVANKPDIVVIDRSARRVMIIDVTIPHDENLVKAEKEKQIKYLDLAHEVRDMWNMNSVIIVPIVVTANGLIAKTLDEHLSKLSLGGWVKGLIQKAVLLDTARIVRRFLSLQP

SEQ ID NO: 28601 - protein, 1180 aa, Xestia c-nigrum
MITRAASRRRARPPTPDSSLSSASPPPDPGSPVPPVAAVASSSSDEYFSPPTSPTPVRRAGRGRPPRSLGLRGQQAPSRVPATGGCVQRMRWTQSMNENVMRAYYGSTEGGINLTAYRDRMLSLFQDLEPAVNVSAQRLSDQVRVIQRSHRLDDTTLDRLRSEVLSNLITITPTQTAVHMSVVNATLPRSNPVVVEEDDRVALVSSQCNDRLRSALDNALREYRSISAELRPRLPRLPMHKKNRALVCALDSQLKNIFESSEDLVDTHSILFCGAVAACRLANVKFPNCDIAIRPKPAVPAWQRRIERRIDGARVLIGKLYCFREGNTRPRVMRFVRRAFSGTEISPQEYMSRVTERIDFLKQKVYAWASRIRRYKRRVDRYSQNRMFQSDERWVYRAWERPQQNMMDVCRPDDAATSSFWRSIWSVPVCHSEADWMRDVERVCEPISTMEPILITPLDIARAVRPLPNWKSPGPDGLHNFWLKWFSSSHTCLASQFQSSLESGSLPQFLTIGVTHLLHKSGSPAEPKNYRPITCLSTVYKLLTSILRTKINTHVDSNSIMSASQNVCRNGSRGTKELLLIDMAISQQVRRVRKDLSICWIDYKKAYDSVPHSWLKRVLELYKIDATLRAFLESCMGQWRTVLRYPGCRQIQGNDEPVWIKRGIFQGDSLSPLWFCLALNPVSTLLENSGLGYRLRKDGQVISHLLYMDDLKLFAPNKLQLMELLKVTETFSSAIGMEFGVDKCAVMYVKRGKIMGSEGLQLSDSIHLRSLSSSESYKYLGMSEALGINVTDMKKSLRERFFGRLKKVLNSLLSGGNKVRAFNGWVMPVLMYSFGILKWTQTELDALDRRVRTLLTENRMHHPRSSVMRLYIPRKCGGRGFLNAKTLHNREVCSLREYFLKADVGMHRDVAAVDKGLTPLSMANENWRKPVVLSTDDRMKEWQGKELHGRFYRALHGPDVDFLASVSWLRFGDLFGETEGFVCAIMDEVMLTNNYRKYIMKDGTVDVCRACHLPGESIRHIISGCSRLANGEYLHRHNQVARIIHQQLALKFNLVELEVPYYKYVPDPVLVKDHVTLYWDQSIITDRTIVANKPDIVVIDRSARRVMIIDVTIPHDENLVKAEKEKQIKYLDLAHEVRDMWNMDSVIIVPIVVSANGLIAKSLDEHLSKLSLGGWIKGLI

SEQ ID NO: 28602 - protein, 1205 aa, Omphaloscelis lunosa
MLTRSAARSARLPPPDSPLSSASPPPVPNHIVNAVSTPAAVVASSSSDEYFSPPTSPTPVRRQGRGRPPKSLGLRGQPAPSRVPAASGCVQRMRWTQSMNENVMRAYYGSTEGGTNLTAYRVRMLSLFQELEPTVNVSAQRLSDQVRVIQRNHRLDDTALDRLRSEVLSNHIVSAREQTAAEASNIDPTPPRFNHGVEEEDDRVATVSSQCNNRLRSALEDAFREYRYTPTELRPRLPRLPMHKKNRALMCALDSQLTNFFESSEDLIDTHSILYCAAVAACRLANVKFPNCDGATRPKPAVPAWQCRIERRIDGARVLIGKLYCFREGNTHTRPRVMRFVRRAFSGTEISPQDYMSRVTERIDFLKQKVCAWASRNRRYKRRVDRYTQNRMFQSDERWVYRAWERPEQNVTDVCRPDDAATSAFWRSIWSVPVCHTEAGWMQDVERVCETIPEMDAVFITPLDVARAVRPIPNWKSPGPDGLHNFWLKWLSSSHTCLASQFQSSLESGSLPQFLTTGVTHLLHKSGNPAEPKNYRPITCLSTVYKLLTSILRTKINTHIDSNSIMSVSQNGCRNGSRGTKELLLIDMAISQQVRRSRKDLSTCWIDYKKAYDSVPHTWLMRVLELYKVDTTLRTFLMSCMGQWRTVLRYPGCRRTQGNDEPVWIKRGIFQGDSLSPLWFCLALNPLSTLLEDSGLGYRLRRGGQVISHLLYMDDLKLFAPNKLRLMELLKVTETFSGAIRMEFGVDKCAVMHVKRGEIMESEGIQLSDSIHLRPLSSAENYRYLGMSESLGINVADMKQSLKERFFGRLKKVLISFLSGGNKVRAFNGWVMPVLMYSFGILKWTQTELDALDRRVRTLLTANRMHHPRSSVMRLYIPRKCGGRGFLNAKTLHNREVCSLREYFFKADVGMHRDVVAVDNGLTPLSMAKENWRKPVVLTTDDRKEIWQSKALHGRFYRALHEPSVDFLASVSWLRFGDLFGETEGFICAIMDEVILTNNYRRHIMKDGTVDVCRACHRPGESIRHIISGCSRLANGEYLHRHNQVARIIHQQLALKYKLVDSEVPYYKYVPDPVLENDHATLYWDRSIITDRTIVANKPDIVVIDRLARHAMIVDVTIPHDENLVKAEKEKQIKYLDLAHEVVGMWNVSSAIIVPIVVTANGLMAKSLDHHLSRLSLGGWIKRLIQKAVLLDTARIVRRFLSLQP

SEQ ID NO: 28603 - protein, 1202 aa, Omphaloscelis lunosa
MLTRSAARSARLPPPDSPLSSASPPPVPSPIVNAVSTPAAVVASSSSDEYFSPPTSPTPVRRQGRGRPPRSLGLRGQPAPSRVPAAGGCVQRMRWTQLMNENVMRAYYGSTEGGTNLTAYRVRMLSLFQELEPTVNVSAQRLSDQVRVIQRNHRLDDIALDRLRSEVLSNHIVSTRAQTAAQESNIDPTPPRCNHGVEEDDRVATVSSQCNDRLRSALEDAFREYRYTPTELRPRLPRLPMHKKNRALVCALDSQLTNFFESSEDLIDTHSILYCAAVAACRLANVKFPNYDGATRPKPVVPAWQCRIERRIDGARVLIGKLYCFREGNTRPRVMRFVRRAFLGTGISPQEYMSRVTERIDFLKQKVCAWASRIRRYKRRVDRYTQNRMFQSDERWVYRAWERPEQNVTDVCRPDDAATSAFWRSIWSVPVCHTEAGWMQDVERVCETIPEMDAVFITPLDVARAVRPLPNWKSPGPDGLHNFWLKWLSSSHTRLASQFQSSLESGLLPQFLTTGVTHLLHKSGNPAEPKNYRPITCLPTVYKLLTSILRTKINTHIDSNSIMSASQNGCRNGSRGTKELLLIDMAISQQVRRSRKDLSTCWIDYKKAYDSVPHTWLMRVLELYKVHTTLRTFLMSCMGQWRTVLRYPGCRQTQGNDEPVWIKRGIFQGDSLSPLWFCLALNPLSTLLEGSGLGYRLRRGGQVISHLLYMDDLKLFAPNKLRLMELLKVTETFSGAIRMEFGVDKCAVMHVKRGEIMESEGTQLSDSIHLRSLSSAENYRYLGMSESLGINVADMKQSLKERFVGRLKKVLISFLSGGNKVRAFNGWVMPVLMYSFGILKWTQTELDALDRRVRTLLTANRMHHPRSSVMRLYIPRKCGGRGFLNAKTLHNREVCSLREYFFKADVGMHRDVVAVDNGLTPLSMAKENWRKPVVLTTDDRKEVWQSKALHGRFYRALHEPGVDFLASVSWLRFGDLFGETEGFICAIMDEVILTNNYRRHIMKDGTVDVCRACHRPGESIRHIISGCSRLANGEYLHRHNQVARIIHQQLALKYKLVDSEVPYYKYVPDPVLENDHVTLYWDRSIITDRTIIANKPDIVVIDRLARRAMIVDVTIPHDENLVKAEKEKQIKYLDLAHEVVDMWNVSSAIIVPIVVTANGLMAESLDQHLSRLSLGGWIKRLIQKAVLLDTARIVRRFLSLQP

SEQ ID NO: 28604 - protein, 1202 aa, Sesamia nonagrioides
MLTRQAARRARSPPPDSSPSTASPPPVPSANVSAVTIPAAVVASSSSDEYFSPPTSPRPVRRQGRGRPPKSLGLRGHPAPSRVPAAGGCVQRMRWTQTINENVMRAYYRATEGGTNLTAYRERMLSLFQALEPTVNVSAQRLSDQVRVIQRNHRLDDIALDRLRSEVLSNQITPTLTQTAAQTSIIDAGPPRSNRVEEEDDRVETVSSQYNDRLRNALEDAFRDYRSTPTDLRPRLPRLPMHKKNRALVCALDSLLKNFFESSEDLIDTHSILYCAAVAACRLAKVKFPNCEEAARPKPAVPAWQRRIERRIDGTRVLIGKLYCFRDGNTRPRVMRFVRQAFSGTGISPREYINHLTERIDFLKQKVCAWASRIRRYKRRVDRYTQNRMFQSDERWVYRAWERPEQNEADVCRPDDATTSAFWRGIWSVSVCHTEGNWIRNVEQVCETIPEMDTILITPSDVAAAVRSLPNWKSPGPDGLHNFWLKWLSSSHTCLASQFQSSLESGSLPQFLTTGITHLLHKSGSTAESKNYRPITCLPTVYKVLTSILKAKINKHLNSNSIMSVSQNGCKSGSRGTKELLLIDMAISQQVRRSRKDLSTCWIDYKKAYDSVPHTWLMRVLELYKINATLRTFLRSCMGQWKTALHYPGSRQIQGNDEPVWIKRGIFQGDSLSPVWFCLALNPLSTLLENSGLGYRLRRGGQVISHLLYMDDLKLFAPNELHLMKLLNVTETFSSGIRMEFGVDKCAVMHVKQGEIMESEGITLPDSIYLRSLSSFESYKYLGMSEALGISDADMKQSLKERFFGRLKKVLNSLLSGGNKVRAFNGWVMPVLMYSFGILKWTQTELDALDRRVRTLLTANRMHHPRSSVMRLYIPRKCGGRGFLNAKTLHNREVCSLREYFLQTVVGMHHDVVKVDKGLTPLSMAKENWHKPIILTTDDRRKVWQSKELHGRFYRALHEPDVDFLASVSWLRFSDLFGETEGFVCAIMDEVILTNNYRRYIMKDGTIDVCRACHHPGESIRHIISGCSRLANSEYLHRHNQVARIIHQQLALKYKLVDSEVPYYKYVPDPVLENDHVTLYWDRSIITDRTIVANKPDIVVIDRLARLAMIVDVTIPHDGNLVKAEKEKKMKYLDLAHEVVDMWNVNSAVIVPIVVSANGLIAKSLDQHLLRLALGSWIKGLIQKAVLLDTARIVRRFLSLEP

SEQ ID NO: 28605 - protein, 1202 aa, Sesamia nonagrioides
MLTRQAARRARSPPPDSSPSTASPPPVPSANVSAVTTPAAVVASSSSDEYFSPPTSPRPVRRQGRGRPPKSLGLRGHPAPSRVPAAGGCVQRMRWTQTINENVMRAYYRATEGGTNLTAYRERMLSLFQALEPTVNVSAQRLSDQVRVIQRNHRLDDIALDRLRSEVLSNQITPTLTQTAAQASIIDAGPPRSNRVEEEDDRVETVSSQYNDRLRNALEDAFRDYRSTPTDLRPRLPRLPMHKKNRALVCALDSLLKNFFESSEDLIDTHSILYCAAVAACRLAKVKFPNCEEAARPKPAVPAWQRRIERRIDGTRVLIGKLYCFRDGNTRPRVMRFVRQAFSGTGISPREYINHLTERIDFLKQKVCAWASRIRRYKRRVDRYTQNRMFQSDERWVYRAWERPEQNEADVCRPDDATTSAFWRGIWSVSVCHTEGNWIRNVEQVCETIPEMDTILITPSDVAAAVRSLPNWKSPGPDGLHNFWLKWLSSSHTCLASQFQSSLESGSLPQFLTTGITHLLHKSGSTAEPKNYRPITCLPTVYKVLTSILKAKINKHLNSNSIMSVSQNGCKSGSRGTKELLLIDMAISQQVRRSRKDLSTCWIDYKKAYDSVPHTWLMRVLELYKINATLRTFLRSCMGQWKTALHYPGSRQIQGNDEPVWIKRGIFQGDSLSPVWFCLALNPLSTLLENSGLGYRLRRGGQVISHLLYMDDLKLFAPNELHLMKLLNVTETFSSGIRMEFGVDKCAVMHVKQGEIMESEGITLPDSIHLRSLSSFESYKYLGMSEALGINDADMKQSLKERFFGRLKKVLNSLLSGGNKVRAFNGWVMPVLMYSFGILKWTQTELDALDRRVRTLLTANRMHHPRSSVMRLYIPRKCGGRGFLNAKTLHNREVCSLREYFLQTVVGMHHDVVKVDKGLTPLSMAKENWHKPIILTTDDRRKVWQSKELHGRFYRALHEPDVDFLASVSWLRFSDLFGETEGFVCAIMDEVILTNNYRRYIMKDGTIDVCRACRHPGESIRHIISGCSRLANSEYLHRHNQVARIIHQQLALKYKLVDSEVPYYKYVPDPVLENDHVTLYWDRSIITDRTIVANKPDIVVIDRLARLAMIVDVTIPHDGNLVKAEKEKKMKYLDLAHEVVDMWNVNSAVIVPIVVSANGLIAKSLDQHLLRLALGSWIKGLIQKAVLLDTARIVRRFLSLEP

SEQ ID NO: 28606 - protein, 1202 aa, Sesamia nonagrioides
MLTRAAKRRARPPPPDSSLSTASPPPVSSATVNAVRTPAVVVASSSSDEYFSPPTSPTPVRRQGRGRPPKSLGLRGHPAPSRVPAAGGCVQRMRWTQTMNENVMRAYYGATEGGTNLTAYRERMLSLFQALEPTVNVSAQRLSDQVRVIQRNHRLDDIALDRLRSEVLSNQIAPTLTQAAAQASIIDAVPPRSNRVEEEDDRVETVSSQYNDRLRSALEDAFRDYRSTPTNLRPRLPRLPMHKKNRALVCALDSQLKNFFESSEDLIDTHSILYCAAVAACRLAKVKFPNCEEATRPKLAVPAWQRRIERRIDGTRVLIGKLYCFREGNTRSRVMRFVRQAFSGTGISPREYINNVTERIDFLKQKVCAWASRIRRYKKRVDRYTQNRMFQSDERWVYRAWERPEQNEADECRPDDATTSAFWRGIWSVSVCHTEGDWTQDVEQVCEAIPEMDNILITPLDVATAVRSLPNWKSPGPDGLHNFWLKWLSSSHTCLASQFQSSLESGSLPQFLTTGITHLLHKSGSTAEPKNYRPITCLPTVYKVLTSILKAKINNHLDSNSIMSVSQNGCRSGSRGTKELLLIDMAISQQVRRSRKDLSTCWIDYKKAYDSVPHTWLMRVLELYKINATLRTFLRSRMGQWKTVLRYPGSRQIQGNDEPVWIKRGIFQGDSLSPLWFCLALNPLSTLLEDSGLGYRLKRGGQVISHLLYMDDLKLFAPNKLHLMKLLNVTETFSSGIKMEFGVDKCAVMHVKRGQIMESEGITLPDSIHLRSLSSIESYKYLGMSEALGINDADMKQSLKERFFGRLKKVLNSLLSGGNKVRAFNGWVMPVLMYSFGILKWTQTELDALDRRVRTLLTANRMHHPRSSVMRLYIPRKCGGRGFLNAKTLHNREVFSLREYFFKTVVGMHHDVVTVDKGLTPLSMAKENWHKPIILTTDDRKIVWQSKELHGRFYRALHGPDVDFLASVSWLRFGDLFGETEGFVCAIMDEVILTNNYRRYIMKDGTIDVCRACHHPGESIRHIISGCSRLANSEYLHRHNQVARIIHQQLALKYKLVDSEVPYYKYVPDPVLENDHVTLYWDRSIITDRTIVANKPDIVVIDRLARLAMIVDVTIPHDGNLVKAEKEKQMKYLDLAHEVVDMWNVNSAVIVPIVVSANGLIAKSLDQHLLRLSLGSWIKGLIQKAVLLDTARIVRRFLSLEP

SEQ ID NO: 28607 - protein, 1162 aa, Junonia neildi
MLTRSRARNAQTPSPDSSLNPASQPPGTTPNAAVASSSSDEFFSPPTSPPPVHRRGRGRPPTCLGSRGPPASDRVPASGGSVSRMRWTTSINENVMRAYLGATEGGTNMTAYRARMHALFQVLEPALNVSAQRLSDQVRVIQRNHMLDNAVLDRLRSELQCNRATPSSPQAPAQSQTAHAISLQPTQAGEGQDSGAAHVSTQCSEQLRSALESAIREYRSSPPEFRPRLPRLPMKNKNKALMGALDSLLPSYFDSSEDLSDTHSILYCAAVAACRVANVKFINNDTATRPKPAAPAWQCRIERRIDGARALIGKLLCFREGNTRPRVMRYVRRAFLGTDISPQDYMARVTERIDFLKQKVSAWASRIRRYKSRVERYTLNRTFQSDQRRVYRGWEHPDQGVTDARLPDDEAMTSFWRNIWSAPVAHTEGGWTWDVERACDQIPEMDLVTITPEDVTTAARPLPNWKSPGPDGLHNFWIKWLRSSHARLASQFQSSLESESLPQFLTTGITLLLHKSGSTTEPKNYRPITCLPTLYKLLTSILRTKINDHIDTKSIMSISQNGCRNGSRGTKELLLIDMAICQQVRRSRRDLSTCWIDYKKAYDSVPHTWLMKVLELYKVNSVLRAFLQTCMGQWRTVLHYPGCRRTLGSAEPIRIERGIFQGDSLSPLWFCLALNPLSTLLENSGLGYRLRRGGQVISHLLYMDDLKLIAPNKSHLLELLKVTKAFSDSIRMEFGVDKCAVMHVKRGRIVESEGVELSDSIYLRSLSPTETYKYLGMAEALGIREADMRQSVRERFLGRLKKVLKSLLSGGNKVRAFNGWVMPVLMYSFGIIRWTQTELDALDRQVRALLTAYRMHHPRSSVMRLYIPRKCGGRGLLNAKTLHNREVCSLREYFLHAKTEMHRDVVAVDRGLTPLSLANENWRIPVVLSTNDRRVVWQGKELHGRFYRALHGPDVDFEASVAWLRFGDLFGETEGFVCAIMDEVMMTNNYRKYIVKDGTVDVCRACRRPGETIRHIVSGCSHLANGEYLHRHNQVARIIHQQLALKYNLVESEVPYYKYVPDPVLENGHITLYWDRSIITDRTIVANKPDIVVIDRSERRAMIVDVAVPHDENLVKAEKEKLTKYLDLAHEVVAMWNVDSAIIVPIVVTANGLIAKSLDQHL

SEQ ID NO: 28608 - protein, 868 aa, Noctua janthe
MRFVRRAFSGTGISPQEYMSRVTERIDFLKQKVYAWANRIRRYKRRVDRYSQNRIFQSDERWVYRAWERPEQNMTDVCRPNYAATSSFWRSIWSVPVCHTEADWMRDVERACEPIPEMEPILITSIDITRAVRPLPNWKSPGPDGLHNFWLKWLSSSHTCLASQFQSSLESGSLPQFLTTGVTHLLHKSGSPAEPKNYRPITCLSTVYKLLTSILRVKINTHIDKNFIMSASQNGCRNRSRGTKELLLIDMAISQQVRRSRKDLSTCWIDYKKAYDSVPHTWLMRVLELYKIDATLRAFLESCMGQWRTVLRYPGCRQIQGNDEPVWIKRGIFQGDSLSPLWFCLALNPLSTLLEDSGLGYRLRRGGQVISHLLYMDDLKLFAPNKLRLMELLKVTETFSNAIRMEFGVDKCAVMYVKRGEIMESEGIQLSDSIHLRSLSSSESYKYLGMSESLGINVTDMKQSLRERFFGRLNKVLNSLLSGGNKVRAFNGWVMPVLMYSFGVLKWTQTELDALDRRVRTLLTANRMHHPRSSVMRLYIPRKCGGRGFLNAKTLHNREICSLREYFLKTEVGMHRDVVAEDKGLTPLSMANENWRKPVVLTTDDRKEVWQGKELHGRFYRALHGPDVDFLASVSWLRFGDLFGETEGFVCAIMDEVMLTNNYRKYIMKDGTVDVCRACHRPGESIRHIISGCSRLANGEYLHRHNQVARIIHQQLALKYKLVESEVPYYKYVPDPVLEKDHVTLYWDRSIITDRTIVANKPDIVVIDRLARRVMIVDVTIPHDENLVKAEKEKQIKYLDLAHEVVDMWNVNSAIIVPIVVTANGLIAKSLDDHLSRLSLGGWIKGLIQKAVLLDTARIVRRFLSLEP

SEQ ID NO: 28609 - protein, 1050 aa, Ochropleura plecta
MLDDAALDRLRSEVLGNRIILTTPQTAMQASVIDGMQPRSDPAVVEEDDRVATVSSQCNERLRSALEDALRDYRSTPAELRPRLPRLPMHKKNRALVCALDSQLKNLFESSEDLVDTHSILYCGAVAVCRLANVKFPSCDVATRPKPSVPAWQCRIERRIDEARVLIGKLYCFREGNTRPRVMRFVRRAFSGTGISPQEYMSRTTERIDFLKQKVYAWANRIRRYKRRVDRYSQNRMFRSDERWVYRAWERPEQSVTDVCRPDDVATSSFWHSIWSVPVCHTEADWMRDVERVCETIPEMEPILITSLDIASAVRPLPNWKSPGPDGLHNFWLKWLSSSHTRLASQFQSCLESGSLPQFLTTGVTHLLYKSGSPAEPKNYRPITCLSTVYKLLTSILRAKINSHIDNNSIMSASQNGCRNGSRGTKELLLIDMAISQQVRRSRKDLSTCWIDYKKAYDSVPHTWLKRVLELYKIDATLRAFLESCMGQWRTVLRYPGCRQIQGNDEPVWIKRGIFQGDSLSPLWFCLALNPLSTLLEDSGLGYRLRRGGQVISHLLYMDDLKLFAPNKLRLMEILKVTETFSNAIRMEFGVDKCAVMYVKRGEIMESEGIQLSDSIHLRSLSSSESYKYLGMSEALGINVADMKQLLRERFFGRLKKVLKSLLSGGNKVRAFNSWVMPVIMYSFGILKWTQTELDALDRRVRTLLTGNRMHHPRSSVMRLYIPRKCGGRGFLNAKTLHNREVCSLREYFLKTDVGMHRDVVAVDKGLTPLSMAKENWRKPVVLTTDDRKVVWQGKELHGRFYKALHGPDVDFLASVSWLRFGDLFGETEGFVCAIMDEVMLTNNYRKYIMKDGTVDVCRACHRPGESIRHIISGCSRLANSEYLHRHNQVARIIHQQLALKYNLVESEVPYYKYVPDPVLEKDHVTLYWDRSIITDRTIVANKPDIVVIDRSARRVMIIDVTIPHDENLVKAEKEKQLKYLDLAHEVVDMWNVNSAIIVPIVVTANGLIAKSLDEHLSKLSLGGWIKGLIQKAVLLDTARIVRRFLSLEP

SEQ ID NO: 28610 - protein, 962 aa, Ochropleura plecta
MHKKNRALVCALDSQLKNLFESSEDLVDTHSILYCGAVAVCCLANVKFPNCDVATRPKPSVPAWQCRIERRIDEARALIGKLYCFREGNTRPRVMRFVRRAFSGTGISPQEYMSRTTERIDFLKQKVYAWANRIQRYKRRVDRYSQNRMFRSDERWVYRAWERPEQSVTDVCRPDDVATSSFWHSIWSVRVCHTEAGWMRDVERVCETIPEMEPILITSLDIASAVRPLPNWKSPGPDGLHNFWLKWLSSSHTRLASQFQSCLESGSLPQFLTTGVTHLLYKSGSPAEPKNYRPITCLSTVYKLLTSILRAKINSHIVKNSIISASQNGCRNGSRGTKELLLIDMAISQQVRRSRKDLSTCWIDYKKAYDSVPHTWLKRVLELYKIDTTLRTFLESCMGQWRTVLRYPGCRQIQGNDEPVWIKRGIFQGDSLSPLWFCLALNPLSTLLEDSGLGYRLRRGGQVISHLFYMDDLKLFAPNKLRLMELLKVTETFSNAIRMEFGVDKCAVMYVKRGEIMESEGIHLSDSIHLRSLSSSESYKYLGMSEALGINVADMKQLLRERFFGRLKKVLKSLLSGGNKVRAFNSWVMPVLMYSFGILKWTQTELDALDRRVRTLLTANRMHHPRSSVMRLYIPRKCGGRGFLNAKTLHNREVCSLREYFLKTDVGMHRDVVAVDKGLTPLSMAKENWRKPVVLTTDYRKEVWQGKELHGRFYKALHGPDVDFLASVSWLRFGDLFGETEGFVCAIMDEVMLTNNYRKYIMKDGTVDVCRACHRPGESIRHIISGCSRLANGEYLHRHNQVARIIHQQLALKYNLVESEVPYYKYVPDPVLEKDHVTLYWDRSIITDRTIVANKPDIVVIDRSARRVMIIDVTIPHDENLVKAEKEKQLKYLDLAHEVVDMWNVNSAIIVPIVITANGLIAKSLDEHLSKLSLGGWIKGLIQKAVLLNTARIVRRFLSLEP

SEQ ID NO: 28611 - protein, 1202 aa, Mythimna impura
MIMLTRAATRRARPSPLGSSLSSASPPPDLGSPVSPTAAVASSSSDEYFSPPTSPTPVRRPGRGRPPKSLGPRGQPAPSRVPATGGCVQRMKWTQSMNENVMRAYYGSTEGGTNLTAYRVRMLSLFQELEPTVNVTAQRLSDQVRVIQRNHRLDGAALDRLRSEVLSNRIISTPSQTQTEAPQATDAILPRSNHIDDEADDRVVTVSSQCNDRLRSALEDALREYRSTPIALRPRLPRLPMHKKNRALVCALDSLLENVFESSVNLADTHSILYCGAIAACRLANVKLSSCDGATRPKPAAPAWQCRIERRIDEARALIGKLYCFREGNTRPRVMRYVRRAFSGTEISPREYLSRVTERIDFLKQKVCAWANRIRRYKRRVDRYSQNRMFQSDERWVYRAWERPEQNVTDVTRPDAVATNTFWRNIWSVPVCHTEDGWMREVERVCEAIPEMEKIVISPIDVARAVRPLPNWKSPGPDGLQNFWLKWYSSSHALLASQFQSSLESGSLPQFLTTGVTHLLHKTGSTAEPKNYRPITCLSTVYKLLTSILRTKINKHIDSNSIMSASQNGCRNGSRGTKELLLIDMAISQQVRRSRKDLSTCWIDYKKAYDSVPHTWLMRVLELYKIDATLRTFLESCMGQWNTVLRYPGCRSILRDDEPIWIKRGIFQGDSLSPLWFCLALNPLSTLLEESGLGYRLRRGGQVLSHLLYMDDLKLIAPNKLRLMELLKVTETFSSAIRMEFGVDKCAVMHVKRGEIMESEGIQLSDSIHFRSLSSTETYKYLGMSEALGINVADMKQSLKERFFGRLKKVLNSLLSGGNKVRAFNGWVMPVLMYSFGILKWTQTELDAVDRRVRTLLTANRMHHPRSSVMRLYIPRKCGGRGFLNAKTLHNREVCSLREYFHKTDVGMHRDVVAVDKGLTPLSMAKENWRKPVVLTTDDRKEVWKSKELHGRFYRALHESDIDFAASVAWLRFSNLFGETEGFICAIMDEVILTNNYRRYIMKDGTVDVCRACHRPGESIRHIISGCSRLANGEYLHRHNQVARIIHQQLALKYNLVDYEVPYYRYVPDPVLENDHVTLYWDRSIITDRTIVANKPDIVVIDRLARRVMIVDVTIPHDENLVKAEKEKQIKYLDLAHEVVDMWNVDSAVIVPIVVTANGLIAKSFDDHLSKLSLRGWIKGLIQKAVLLDTARIVRRFLSLEP

SEQ ID NO: 28612 - protein, 1202 aa, Mythimna impura
MIMLTRAAIRRARPSPLGSSLSSASPPPDLGSPVSPTAAVASSSSDEYFSPPTSPTPVRRPGRGRPPKSLGPRGQPAPSRVPATGGCVQRMKWTQSMNENVMRAYYGSTEGGTNLTAYRVRMLSLFQELEPTVNVTAQRLSDQVRVIQRNHRLDGAALDRLRSEVLSNRIISTPSQTQTEAPQATDATLPRSNHIDDEADDRVVTVSSQCNDRLRSALEDALREYRSTPIALRPRLPRLPMHKKNRALVCALDSLLENVFESSVNLADTHSILYCGAIAACRLANVKLPSCDGATRPKPAAPAWQCRIERRIDEARALIGKLYCFREGNTRPRVMRYVRRAFSGTEISPREYLSRVTERIDFLKQKVCAWANRIRRYKRRVDRYSQNRMFQSDERWVYRAWERPEQNVTDVTRPDAVATNTFWRNIWSVPVCHTEDGWMREVERVCEAIPEMEKIVISPIDVARAVRPLPNWKSPRPDGLQNFWLKWYSSSHALLASQLQSSLESGSLPQFLTTGVTHLLHKTGSTAEPKNYRPITCLSTVYKLLTSILRTKINKHIDSNSIMSASQNGCRNGSRGTKELLLIDMAISQQVCRSRKDLSTCWIDYKKAYDSVPHTWLMRVLELYKIDATLRTFLESCMGQWNIVLRYPGCRSIRRDDEPIWIKRGIFQGDSLSPLWFCLALNPLSTLLEESGLGYRLRRGGQVLSHLLYMDDLKLIAPNKLRLMELLKVTETFSSAIRMEFGVDKCAVMHVKRGEIMESEGIQLSDSIHFRSLSSTETYKYLGMSEALGINVADMKQSLKERFFGRLKKVLNSLLSGGNKVRAFNGWVMPVLMYSFGILKWTQTELDAVDRRVRTLLTANRMHHPRSSVMRLYIPRKCGGRGFLNAKTLHNREVCSLREYFHKTDVGMHRDVVAVDKGLTPLSMAKENWRKPVVLTTDDRKEVWKSKELHGRFYRALHESDIDFAASVAWLRFSNLFGETEGFICAIMDEVILTNNYRRYIMKDGTVDVCRACHRPGESIRHIISGCSRLANGEYLHRHNQVARIIHQQLALKYNLVDYEVPYYRYVPDPVLENDHVTLYWDRSIITDRTIVANKPDIVVIDRLARRVMIVDVTIPHDENLVKAEKEKQIKYLDLAHEVVDMWNVDSAVIVPIVVTANGLIAKSFDDHLSKLSLRGWIKGLIQKAVLLDTARIVRRFLSLEP

SEQ ID NO: 28613 - protein, 962 aa, Mythimna impura
MCKRNRALVCALDSLLKNVFESSEDLVDTHSILYCGAVAACRLANIKFSSCDVATRPKPAVPAWQCRIEGRIDEARALIGKLYCFREGNTRPRVMRFVRRAFSGTGITPREYMSRVTERIDFLKQKVCAWANRIRRYKRRVDRYSQNRMFQSDERWVYRAWERPEQSVIDALRPDDAATNAFWRSIWSVPVCHTEGGWMRDVERVCVDVPEMEKVEITPLDVARAVRPLPNWKSPGTDGLHNFWLKWYSSSHALLASQFQSSLESGSLPQFLTTGITHLLHKTGSPTEPKNYRPITCLSTVYKFLTSILRAKIYIHIEKNLIMSASQNGCRNGSRGTKELLLIDMAISQQVRRSRKDLSTCWIDYKKAYDSVPHTWLMRVLELYKIDATLRTFLESCMRQWKTVLRYPGCRPIQGNDEPIWIKRGIFQGDSLSPLWFCLALNPLSTLLEDSGLGYRLRRGGQVLSHLLYMDDLKLFAHNNLQLMELLKVTETFSSAIRMEFGVDKCAVMHVKRGEIVESEGIQLSDSIHLRTLSSTETYKYLGMSEALGINVADMKQTLKERFFNRLKKVLNSLLSGGNKVRAFNGWVMPVLMYSFGILKWTQTELDALDRRVRTLLTANRMHHPRSSVMRLYIPRKCGGRGFLNAKTLHNREVCSLREYFLKTDVGMHRDVVAVDKGLTPLSMAKENWRKPVVLTTDDRKEVWKGKELHGRFYRALHEPDVDFLASVAWLRFSNLFGETEGFVCAIMDEVILTNNYRRHIMKDGTVDVCRACHRPGESIRHIISGCSRLANGEYLHRHNQVARIIHQQLALKYNLVDSEVPYYRYVPDPVLENDHVTLYWDRSIITDRTIVANKPDIVVIDRLARRAVIVDVTIPHDENLVKAEKEKQIKYLDLAHEVVDMWNVDSAIIVPIVVTANGLIAKSFDDHLSKLSLRGWIKGLIQKAVLLDTARIVRRFLSLEP

SEQ ID NO: 28614 - protein, 1201 aa, Xestia xanthographa
MMLTRAAAARRAHLPTPDSSLSSASPPPDPRSPVSPVAAVASSSSDEYFSPPTSPPPVRRAGRGRPPTSLGLRGRQAPSRVPATGGCVQRMKWTQSMNENVMRAYYGSTEGGTNLTAYRVRMLFLFQDLEPTVIVSAQRLSDQVRVIQRSHRLDDAALDRLRSEVLSNLIVLTPTQTAVQVSAIDATPPRLNPAVVEEDDGVATVSSQCNDRLRSALENALHEYRSTPTELRPRLPRLPMHKKNRALVCALDSQLKNIFESSENLVDTHSILFCGAVAACRIANVKFPNCDVATRPKPAVPAWQRRIERRIDGARVLIGKLYCFREGNTRPRVMRFERRAFSGTEISPQEYMSRATERIDFLKQKVYAWANRIRRYKRRVDRYSQNRMFQSDERWVYRVWERPEQNMTDVCRPDDAATSSFWRSIWSVPVCHTEADWMRDVERVCEPIPEMEPIFITPVDVARAVRPLPNWKSPGPDGLHNFWLKWFSSSHTCLASQFQSSLESGSLPQFLTTGVTHLLHKSGSPAEPKNYRPITCLSTIYKLLTSILRVKINTHIDKNSIMSASQNGCRNGSRGTKELLLIDMAISQQVRRSRKDLSTCWIDYKKAYDSVPHTWLMRVLELYKVDTTLRTFLESCMGQWKTVLRYPGCRQIQGSDEPVWIKRGIFQGDSLSPLWFCLALNPLSTLLENSGLGCRLRKDGQVISHLLYMDDLKLFAPNKLRLMELLKVTETFSSAIRMEFGVDKCAVMYVKRGEIMESEGLQLSDSIHLKSLSSSETYKYLGMSEALGINVTDMKQSLRERFFGRLRKVLNSLLSGGNKVRAFNGWVMPVLMYSFGILKWTQTELDALDRRVRTLLTESRMHHPRSSVMRLYIPRKCGGRGFLNAKTLHNREVCSLREYFLKAEVGMHRDVVAVDKGLTPLSMAKENWHRPEVLTTDDRKEVWQGKVLHGRFYRALHGPDVDFIASVSWLRFGDLFGETEGFVCAIMDEVMLTNNYRKYIMKDGPVDVCRACHLPGESIRHIISGCSRLANGEYLHRHNQVARIIHQQLALKYKLVESEVPYYKYVPDPVLENDHVTLYWDRSIITDRTIVANKPDIVMMDRSARRVMIIDVTIPHDDNLVKAEKEKQIKYLDLAHEVRGMWNMNSVIIVPIVVTANGLIAKSFDDHLSKLSLGGWIKGLIQKAVLLDTARIVRRFLSLQP

SEQ ID NO: 28615 - protein, 1202 aa, Cosmia trapezina
MLTRSAARARPPPPDSSLSSASPPPVSSPIVGAVITPAAAVASSSSDEYFSPPTSPTPVRRQGRGRPPRSLGLRGQPAPSRVPAAGGCVQRMRWTQSMNENVMRAYYGSTEGGTNLTAYRVRMLSLFQELEPTVNVSAQRISDQVRVIQRNHRLDDAALDRLRSEVLSNHIISNPTQTAVQPSIIDALPPRSNHVVEEEDDRVATVSSQCNDRLRDALEDAFCEYRSTPTELRPRLPRLPMHKKNRALMCALDSLLKDFFESSENLVDTHSILYCAAVAACRLANVKFPNCDGATRPKPAVPAWQCRIERRIDGARVLIGKLYCFRQGNTRPRVMRFVRRAFSGTGISPPEYMSRVTERIDFLKQKVCAWASRIRRYKRRVDRYTQNRMFQSDERWVYRAWERPEQNVTDVCRPDDAATSAFWRSIWSVPVCHAEAGWMKDVERVCEAIPEMEPVLITPLDVARAVRPLPNWKSPGPDGLHNFWLKWLISSHTRLASQFQSSLESGSLPQFLTTGVTHLLHKSGSPAEPKNYRPITCLSTIYKLLTSILRAKINMHIDSNSIMSTSQNGCRNGSRGTKELLLIDMAISQQVRRSRKDLSTCWIDYKKAYDSVSHAWLMRVLELYKIDATLRTFLESCMGQWRTVLRYPGCRRIRGNDEPVRIKRGIFQGDSLSPLWFCLALNPLSTLLEDSGLGYRLRRGGQVISHLLYMDDLKLFAPNKLRLMELLKVTESFSSAIRMEFNVDKCAVMHVKRGEIMESEGIQLSDSIHLRSLSSSETYKYLGMSEALGINVADMKQSLRERFFGRLKKVLISLLSGGNKVRAFNGWVMPVLMYSFGILKWTQTELDALDRRVRTLLTANRMHHPRSSVMRLYIPRKCGGRGFLNAKTLHNREVCSLREYFLKSDVGMHRDVVAVDKGLTPLSMAKQNWRKPVVLTTDDRKKVWQSKELHGRFYRALHEPGVDFLASVSWLRFGDLFGETEGFVCAIMDEVILTNNYRRYIMKDGTVDVCRACHRPGESIRHIISGCSRLANGEYLHRHNQVARIIHQQLALKYKLVDSEVPYYKYVPDPVLENDHVTLYWDRSIITDRTIVANKPDIVVIDRLARRAMIVDVTIPHDGNLVKAEKEKQIKYLDLAHEVVDMWNVDSAVIVPIVVTANGLIADSLDQHLSRLSLGGWIKGQIQKAVLLDTARIVRRFLSLQP

SEQ ID NO: 28616 - protein, 1202 aa, Cosmia trapezina
MLTRSAVRARPPPPDSSLSSASPPPVSSPIVGAVITPAAAVASSSSDEYFSPPTSPTPVRRQGRGRPPRSLGLRGQPAPSRVPAAGGCVQRMRWTQSMNENVMRAYYGSTEGGTNLTAYRVRMLSLFQELEPTVNVSAQRISDQVRVIQRNHRLDDAALDRLRSEVLSNHIISNPTQTAVQPSIIDALPPRSNHVVEEEDDRVATVSSQCNDRLRDALEDAFCEYRSTPTELRPRLPRLPMHKKNRALMCALDSLLKDFFESSENLVDTHSILYCAAVAACRLANVKFPNCDGATRPKPAVPAWQCRIERRIDGARVLIGKLYCFRQGNTRPRVMRFVRRAFSGTGISPPEYMSRVTERIDFLKQKVCAWASRIRRYKRRVDRYTQNRMFQSDERWVYRAWERPEQNMTDVCRPDDAATSAFWRSIWSVPVCHAEAGWMKDVERVCEAIPEMEPVLITPLDVARAVRPLPNWKSPGPDGLHNFWLKWLISSHTRLASQFQSSLESGSLPQFLTTGVTHLLHKSGSPAEPKNYRPITCLSTIYKLLTSILRAKINMHIDSISIMSTSQNGCRNGSRGTKELLLIDMAINQQVRRSRKDLSTCWIDYKKAYDSVSHAWLMRVLELYKIDATLRTFLESCMGQWRTVLRYPGCRRIRGNDEPVRIKRGIFQGDSLSPLWFCLALNSLSTLLEDSGLGYRLRRGGQVISHLLYMDDLKLFAPNKLRLMELLKVTESFSSAIRMEFGVDKCAVMHVKRGEIMESEGIQLSDSIHLRSLSSSETYKYLGMSEALGINVADMKQSLRERFFGRLKKVLISLLSGGNKVRAFNGWVMPVLMYSFGILKWTQTELDALDRRVRTLLTANRMHHPRSSVMRLYIPRKCGGRGFLNAKTLHNREVCSLREYFLKSDVGMHRDVVAVDKGLTPLSMAKENWRKPVVLTTDDRKKVWQSKELHGRFYRALHEPSVDFLASVSWLRFGDLFGETEGFVCAIMDEVILTNNYRRYIMKDGTVDVCRACHRPGESIRHIISGCSRLANGEYLHRHNQVARIIHQQLALKYKLVDSEVPYYKYVPDPVLENDHVTLYWDRSIITDRTIVANKPDIVVIDRLARRAMIVDVTIPHDGNLVKAEKEKQIKYLDLAHEVVDMWNVDSAVIVPIVVTANGLIADSLDQHLSRLSLGGWIKGQIQKAVLLDTARIVRRFLSLQP

SEQ ID NO: 28617 - protein, 1199 aa, Mamestra brassicae
MITRAAARRAHPPPPGSSLSSASPTPDIGSQVSPVVAVASSSSDEYFSPPTSPTPVRRQGRGRPPRSLGSRGQPALSRVPAAGGCVQRMRWTQSMNENVMRAYYGSTEGGTNLTAYRVRMLSLFQDLEPTVNVSAQRLSNQVRVIQHNCRLDDAALERLRSEVLSNLIISTPTQTVVQAPASGAITPRPNNGSDEVDDRVVTVSSQCNDRLRSALEDALREYRLTPTELRPRLPRLPMHKKNRALVCALDSLLQNIFESSESLVDTHSILFCGAVAACRIAKVKFPSCDEAIRPKPAAPAWQCRIERRIDEARALIGKLYCFREGNTRPRVMRFVRRAFSGTGISPREYTFRVTERIDFLKQKVCAWANRIRRYKRRVDRYSQNRMFQSDERWVYRAWERPEQSVTDVYRPDDVATSTFWRSIWSVPICHAEGGWMRDVERVCEAIPQMEKITITTLDIAKAVRPLPNWKSPGPDGLHNFWLKWYSSSHALLASQFQSSLESGSLPQFLTTGITHLLHKTGSPAEPKNYRPITCLSTVYKLLTSILRAKINEHIESNSIMSASQNGCRKGSRGTKELLLIDMAISQQVRRSRKDLSTCWIDYKKAYDSVPHTWLMKVLELYKIDATLRTFLESCMRQWKTVLRYPGCQPIQGSDEPVWIKRGIFQGDSLSPLWFCLALNPLSTLLEDSGIGYRLRRGGQAISHLLYMDDLKLFASNNLRLMELLKVTETFSSAIRMEFGVDKCAVMHVKKGEIMESEGIQLSDSIQVRSLSSTESYKYLGMSEALGINGTDMKQSLRERFFGRLKKVLNSLLSGGNKVRAFNGWVMPVLMYTFGILKWTQTELDALDRRVRTLLTANRMHHPRSSVMRLYIPRKCGGRGFLNAKTLHNREMCSLREYFLKADVGMHRDVVAVDKGLTPLSMAKENWRKPVILTTDDRKEVWKGKELHGRFYRALYGSDVDFSASVAWLRFGDLFGETEGFVCAIMDEVILTNNYRKHIMKDGTVDVCRACHRPGESIRHIISGCSRLANGEYLHRHNQVARIIHQQLALKYKLVDSEVPYYKYVPDPVLENDHVTLYWDRSIITDRTIVANKPDIVVIDRLARRTMIIDVTIPHDENLVKAEKEKQIKYLDLAHEVVDMWNVDSAVIVPIVITAYGLMAKSFDDHLSKLALRGWIKGLIQKAVLLDTARIVRRFLSLEP

SEQ ID NO: 28618 - protein, 1199 aa, Mamestra brassicae
MITRAAARRAHPPPPGSSLSSASPTPDIGSQVSPVVAVASSSSDEYFSPPTSPTPVRRQGRGRPPRSLGSRGQPAPSRVPAAGGCVQRMRWTQSMNENVMRAYYGSTEGGTNLTAYRVRMLSLFQDLEPTVNVSAQRLSDQVRVIQHNCRLDDAALERLRSEVLSNLIISTPTQTVVQAPASGAITPRPNNGSDEVDDRVVTVSSQCNDRLRSALEDALREYRLTPTELRPRLPRLPMHKKNRALVCALDSLLQNIFESSESLVDTHSILFCGAVAACRIANVKFPSCDEAIRPKPAAPAWQCRIERRIDEARALIGKLYCFREGNTRPRVMRFVRRAFSGTGISPREYTFRVTERIDFLKQKVCAWANRIRRYKRRVDRYSQNRMFQSDERWVYRAWERPEQSVTDVYRPDDVATTTFWRSIWSVPICHAEGGWMRDVERVCEAIPQMEKITITTLDVAKAVRPLPNWKSPGPDGLHNFWLKWYSSSHALLASQFQSSLESGSLPQFLTTGITHLLHKTGSPAEPKNYRPITCLSTVYKLLTSILRAKINEHIESNSIMSASQNGCRKGSRGTKELLLIDMAISQQVRRSRKDLSTCWIDYKKAYDSVPHTWLMKVLELYKIDATLRTFLESCMRQWKTVLRYPGCQPIQGSDEPVWIKRGIFQGDSLSPLWFCLALNPLSTLLEDSGLGYRLRRGGQAISHLLYMDDLKLFAPNNLRLMELLKVTETFSSAIRMEFGVDKCAVMHVKKGEIMDSEGIQLSDSIQVRSLSSTESYKYLGMSQALGINGTDMKQSLRERFFGRLKKVLNSLLSGGNKVRAFNGWVMPVLMYTFGILKWTQTELDALDRRVRTLLTANRMHHPRSSVMRLYIPRKCGGQGFLNAKTLHNREMCSLREYFLKADVGMHRDVVAVDKGLTPLSMAKENWRKPVILTTDDRKEVWKGKELHGRFYRALYGSDVDFSASVAWLRFGDLFGETEGFVCAIMDEVILTNNYRKHIMKDGTVDVCRACHRPGESIRHIISGCSRLANGEYLHRHNQVARIIHQQLALKYKLVDSEVPYYKYVPDPVLENDHVTLYWDRSIITDRTIVANKPDIVVIDRLARRTMIIDVTIPHDENLVKAEKEKQIKYLDLAHEVVDMWNVDSAVIVPIVVTANGLMAKSFDDHLSKLALRGWIKGLIQKAVLLDTARIVRRFLSLEP

SEQ ID NO: 28619 - protein, 1080 aa, Mamestra brassicae
MLSLFQDLEPTVNVSAQRLSDQVRVIQRNHRLDDAALDRLRSEILNNLIISTPTQTAVQAPVNGRITPRPNNVSDEVDDRVVTVSSQCNDRLRSALEDALREYRSTPTELRPRLPRLPMHKKNRALVCALDSLLQNIFESSESLVDTHSILYCGAVAACRIANVKFPGCDEAIRPKPAAPAWQRRIERRIDETRALIGKLYCFREGNTRPRVMRFVRRAFSGTEISPRDFTSRVTERIDFLKQKVCAWASRIRRYKRRVDRYSQNRMFQSDERWVYRAWERPEQSVTDVCRPDDVATSIFWRSIWSVPICHAEGGWMRDVERVCEAIPQMEKITITTLDVAKAVRPLPNWKSPGPDGLHNFWLKWYSSSHALLASQFQSSLDSGSLPQFLTTGVTHLLHKTGSPTEPKNYRPITCLSTVYKLLTSILRAKINEHIESNSIMSASQNGCRKGSRGTKELLLIDMAISQQVRRSRKDLSTCWIDYKKAYDSVPHTWLMKVLELYKIDATLRTFLESCMRQWKTVLRYPGCRPIQGSDEPVWIKRGIFQGNSLSPLWFCLALNPLSTLLEDSGLGYRLRRGGQAISHLLYMDDLKLFAPNNLRLMELLKVTETFSSAIRMEFGVDKCAVMHVKKGEIMESEGIHLSDSIQVRSLSSNETYKYLGMLEALGINGTDMKQSLKERFFGRLKKVLNSLLSGGNKVRAFNGWVMPVLMYTFGILKWTQTELDALDRRVRTLLTANRMHHPRSSVMRLYIPRKCGGRGFLNAKTLHNREMCSLREYFLKADVGMHRDVVAVDKGLTPLSMAKENWRTPVILTTDDRKEVWKGKELHGRFYRALHGSDVDFSASVAWLRFGDLFGETEGFVCAIMDEVILTNNYRRHIMKDGTVDMCRACHRPGESIRHIISGCSRLANGEYLHRHNQVARIIHQQLALKYNLVDSEVPYYKYVPDPVLENDHVTLYWDRSIITDRTIVANKPDIVVIDRLARRTMIIDVTIPHDENLVKAEKEKQIKYLDLAHEVVDMWNVESAVIVPIVVTANGLMAKSFDDHLSKLALRSWVKGLIQKAVLLDTARIVRRFLSLEP

SEQ ID NO: 28620 - protein, 1199 aa, Mamestra brassicae
MLTRAALQRARPPPPDPSLSSASPPPDIGSPLSPAVAVASSSSDEYFSPPTSPTPVRRQGRGRPPRGLGPRGQPAPSRVPATGGCVQRMRWTQSMNENVMRAYYGSTEGGTNLTAYRVRMLSLFQDLEPTVNVSAQRLSDQVRVIQRNHRLDDAALDRLRSEVLNNLIISTPTQTAVKAPVNGRITPRPNNVSDEVDDRVVTVSSQCNDRLRSALEDALREYRSTPTELGPRLPRLPMHKKNRALVCALDSLLQNIFESSESLVDTHSILYCGAVAACRIANVKFPGCDEAIRPKPAAPAWQRRIERRIDETRALIGKLYCFREGNTRPRVMRFVRRAFSGTEISPRDFTSRVTERIDFLKQKVCAWASRIRRYKRRVDRYSQNRIFQSDERWVYRAWERPEQSMTDVCRPDDVATSIFWRSIWSVPICHAEGGWMRDVERVCEAIPQMEKITITTLDVAKAVRPLPNWKSPGPDGLHNFWLKWYSSSHALLASQFQSSLDSGSLPQFLTTGVTHLLHKTGSPTDPKNYRPITCLSTVYKLLTSILRAKINEHIESNSIMSASQNGCRKGSRGTKELLLIDMAISQQVRRSLKDLSTCWIDYKKAYDSVPHTWLMKVLELYKIDATLRTFLESCMRQWKTVLRYPGCRPIQGSDEPVWIKRGIFQGDSLSPLWFCLALNPLSTLLEDSGLGYRLRRGGQAISHLLYMDDLKLFAPNNLRLMELLKVTETFSSAIRMEFGVDKCAVMHVKKGEIMESEGIHLSDSIQVRSLSSTETYKYLGMLEALGINGTDMKQSLRERFFGRLKKVLNSLLSGGNKVRAFNGWVMPVLMYTFGILKWTQTELDALDRRVRTLLTANRMHHPRSSVMRLYIPRKCGGRGFLNAKTLHNREMCSLREYFLKADVGMHRDVVAVDKGLTPLSMAKENWRTPVILTTDDRKEVWKGKELHGRFYRALHGSDVDFSASVAWLRFGDLFGETEGFVCAIMDEVILTNNYRRHIMKDGTVDMCRACHRPGESIRHIISGCSRLANGEYLHRHNQVARIIHQQLALKYNLVDSEVPYYKYVPDPVLENDHVTLYWDRSIITDRTIVANKPDIVVIDRLARRTMIIDVTIPHDENLVKAEKEKQIKYLDLAHEVVDMWNVESAVIVPIVVTANGLMAKSFDDHLSKLALRSWVKGLIQKAVLLDTARIVRRFLSLEP

SEQ ID NO: 28621 - protein, 1199 aa, Mamestra brassicae
MITRAAARRAHPPPPGSSLSSASPTPDIGSQVSPVVAVASSSSDEYFSPPTSPTPVRRQGRGRPPRSLGSRGQPAPSRVPAAGGCVQRMRWTQSMNENVMRAYYGSTEGGTNLTAYRVRMLSLFQDLEPTVNVSAQRLSDQVRVIQHNCRLDDAALERLRSEVLSNLIISTPTQTVVQAPASGAITPRPNNGSDEVDDRVVTVSSQCNDRLRSALEDALREYRLTPTELRPRLPRLPMHKKNRALVCALDSLLQNIFESSESLVDTHSILFCGAVAACRIANVKFPSCDEAIRPKPAAPAWQCRIERRIDEARALIGKLYCFREGNTRPRVMRFVRRAFSGTGISPREYTFRVTERIDFLKQKVCAWANRIRRYKRRVDRYSQNRMFQSDERWVYRAWERPEQSVTDVYRPDDVATSTFWRSIWSVPICHAEGGWMRDVERVCEAIPQMEKITITTLDIAKAVRPLPNWKSPGPDGLHNFWLKWYSSSHALLASQFQSSLESGSLPQFLTTGITHLLHKTGSPAEPKNYRPITCLSTVYKLLTSILRAKINEHIESNSIMSASQNGCRKGSRGTKELLLIDMAISQQVRRSRKDLSTCWIDYKKAYDSVPHTWLMKVLELYKIDATLRTFLESCMRQWKTVLRYPGCQPIQGSDEPVWIKRGIFQGDSLSPLWFCLALNPLSTLLEDSGLGYRLRRGGQAISHLLYMDDLKLFAPNNLRLMELLKVTETFSSAIRMEFGVDKCAVMHVKKGEIMESEGIQLSDSIQVRSLSSTESYKYLGMSEALGINGTDMKQSLRERFFGRLKKVLNSLLSGGNKVRAFNGWVMPVLMYTFGILKWTQTELDALDRRVRTLLTANRMHHPRSSVMRLYIPRKCGGRGFLNAKTLHNREMCSLREYFLKTDVGMHRDVVAVDKGLTPLSMAKENWRKPVILTTDDRKEVWKGKELHGRFYRALYGSDVDFSASVAWLRFGDLFGETEGFVCAIMDEVILTNNYRKHIMKDGTVDVCRACHRPGESIRHIISGCSRLANGEYLHRHNQVARIIHQQLALKYKLVDSEVPYYKYVPDPVLENDHVTLYWDRSIITDRTIVANKPDIVVIDRLARRTMIIDVTIPHDENLVKAEKEKQIKYLDLAHEVVDMWNVDSAVIVPIVITANGLMAKSFDDHLSKLALRGWIKGLIQKAVLLDTARIVRRFLSLEP

SEQ ID NO: 28622 - protein, 1070 aa, Mamestra brassicae
MLSLFQDLEPTVNVSAQRLSDQVRVIQHNCRLDDAALERLRSEVLSNLIISTPTQTVVQAPASGAITPRPNNGSDEVDDRVVTVSSQCNDRLRSALEDALREYRLTPTELRPRLPRLPMHKKNRALVCALDSLLQNIFESSESLVDTHSILFCGAVAACRIANVKFPSCDEAIRPKPAAPAWQCRIERRIDEARALIGKLYCFREGNTRPRVMRFVRRAFSGTGISPREYTFRVTERIDFLKQKVCAWANRYSLNRMFQSDERWVYRAWERPEQSVTDVYRKNDVATSTFWRSIWSVPICHAEGGWMRDVERVCEAIPQMEKITITTLDIAKAVRPLPNWKSPGPDGLHNFWLKWYSSSHALLASQFQSSLESGSLPQFLTTGITHLLHKTGSPAEPKNYRPITCLSTVYKLLTSILRAKINEHIESNSIMSASQNGCRKGSRGTKELLLIDMAISQQVRRSRKDLSTCWIDYKKAYDSVPHTWLMKVLELYKIDATLRTFLESCMRQWKTVLRYPGCQPIQGSDEPVWIKRGIFQGDSLSPLWFCLALNPLSTLLEDSGLGYRLRRGGQAISHLLYMDDLKLFAPNNLRLMELLKVTETFSSAIRMEFGVDKCAVMHVKKGEIMESEGIQLSDSIQVRSLSSTESYKYLGMSEALGINGTDMKQSLRERFFGRLKNVLNSLLSGGNKVRAFNGWVMPVLMYTFGILKWTQTELDALDRRVRTLLTANRMHHPRSSVMRLYIPRKCGGRGFLNAKTLHNREMCSLREYFLKADVGMHRDVVAVDKGLTPLSMAKENWRKPVILTTDDRKEVWKGKELHGRFYRALHGSDVDFSASVAWLRFGDLFGETEGFVCAIMDEVILTNNYRKHIMKDGTVDVCRACHRPGESIRHIISGCSRLANGEYLHRHNQVARIIHQQLALKYKLVDSEVPYYKYVPDPVLENDHVTLYWDRSIITDRTIVANKPDIVVIDRLARRTMIIDVTIPHDENLVKAEKEKQIKYLDLAHEVVDMWNVDSAVIVPIFITANGLMAKSFDDHLSKLALRGWIKGLIQKAVLLDTARIVRRFLSLEP

SEQ ID NO: 28623 - protein, 1199 aa, Noctua fimbriata
MITRAAYRRARLTTPDSPLSSASPPPDPGSPVLPAAAVASSSSDEYFSPPTSPTPVRRQGRGRPPRSLGLRGHPAPSRVPAAGGCVQRMRWTHSINENVMRAYYGSTEGGTNLTAYRVRMLSLFQVLEPTVNVSAQRLSDQVRVIQRNHMLDDAVLDRLRSEVLSNRVILTPAQTAVQASVIDATPPRFNPAVVEEDDRVAVVSNQCNDRLRSALEDALREYRSTPTELRPRLPRLPMHNKNRALVCALDSQLKNIFESSENLVDTHSILYCGAVAACRLANVKFPNCDVATRPKPAVPAWQYRIERRIDGARVLIGKLHCFREGNTRPRVMRFVRRAFSGTGISPQEYMSRVTERIDFLKQKVYAWANRIRRYKRRVDRYSQNRMFQSDERWVYRAWERPELNMTDVCRPDDAATSSFWRSIWSVPVCHTEADWMRDVERVCEPIPEMEPILITPLDIARAVRPLPNWKSPGPDGLHNFWLKWLSSSHTCLASQFQSSLESGSLPQFLTTGVTHLLHKSGSPAEPKNYRPITCLSTVYKLLTSILRAKINTHIDKNSIMSVSQNGCRNGSRGTKELLLIDMAISQQVRRSRKDLSTCWIDYKKAYDSVPHTWLMRVLELYKIDATLRAFLESCMGQWRTVLRYPGCRQIQGNDEPVWIKRGIFQGDSLSPLWFCLALNPLGTLLEDSGLGYRLRRGGQVISHLLYMDDLKLFAPNKLQLMKLLKVTENFSSAIRMEFVVDKCAVMYVKQGEIMESEGIQLSDSIHLRTLSSTESYKYLGMSEALGINVTDMKQSLKERFFGRLNKVLHSLLSGGNKVRAFNGWVMPVLMYSFGVLKWTQTELDALDRRVRTLLTANRMHHPRSSVMRLYIPRKCGGRGFLNAKSLHNREMCSLREYFLKVEVGMHRDVVAVDKGLTPLSMAKENWRKPEVLTTDDRKEVWQGKELHGRFYRALHGPDVDFLASVSWLRFGDLFGETEGFVCAIMDEVMLTNNYRKYIMKDGTVDVCRACHRPGESIRHIISGCSRLANGEYLHRHNQVARIIHQQLALKYKLVESEVPYYKYVPDPVLEKDHVTLYWDQSIITDRTIVANKPDIVVIDRSARRVMIVDVTIPHDENLVKAEKEKQIKYLDLAHEVVDMWNVNSAIIVPIVVTANGLIAKSLDDHLSKLSLGGWIKGLIQKAVLLDTARIVRRFLSLEP

SEQ ID NO: 28624 - protein, 1202 aa, Noctua fimbriata
MITRAASRRARLPPPDQSLSSASPPPESSPIVSAVTPAVAVASSSSDEYFSPPTSPTPVRRQGRGRPPRSLGLRGHPAPSRVPAAGGCVQRMRWTHSINENVMRAYYGSTEGGTNLTAYRVGMLSLFQVLEPTINVSAQRLSDQVRVIQRNHMLDDAVLDRLRSEVLSNRIVLTPAQTAVQASVIDATPPRFNPAVVEEDDRVAVVSSQCNDRLRSALEDALREYRSTPTELRPRLPRLPMHNKNRALVCALDSQLKNLFESSENLVDTHSILYCGAVAACRLANVKFPNCDVATRPKPAVPAWQRRIECRIDGARVLIGKLHCFREGNTRPRVMRFVRRAFSGTGISPQEYMSRVTERIDFLKQKVYAWANRIRRYKRRVDRYSQNRMFQSDERWVYRAWERPDQNMTDMCRPDDAATSSFWRSIWSVPVCHTEADWMRDVEQVCEPIPEMEPILITPLDVARAVRPLPNWKSPGPDGLHNFWLKWLSSSHTCLASQFQSSLESGSLPQFLTTGVTHLLHKSGSSAEPKNYRPITCLSTVYKLLTSILRAKINTHIDKNSIMSASQNGCRNGSRGTKELLLIDMAISQQVRRSRKDLSTCWIDYKKAYDSVPHTWLMRVLELYKIDATLRAFLESCMGQWRTVLRYPGCRQIQGNDEPVWIKRGIFQGDSLSPLWFCLALNPLSTLLEDSGLGYRLRRGGQVISHLLYMDDLKLFAPNKLQLMELLKVTETFSSAIRMEFGVDKCAVMYVKQGEIMESEGIQLSDSIHLRTLSSTESYKYLGMSEALGINVTDMKQSLKERFFGRLNKVLHSLLSGGNKVRAFNGWVMPVLMYSFGVLKWTQTELDALDRRVRTLLTANRMHHPRSSVMRLYIPRKCGGRGFLNAKSLHNREMCSLREYFLKVEVGMHRDVVAVDKGLTPLSMAKENWRKPEVLTTDDRKEVWQGKELHGRFYRALHGPDVDFLASVSWLRFGDLFGETEGFVCAIMDEVMLTNNYRKYIMKDGTVDVCRACHRPGESIRHIISGCSRLANGEYLHRHNQVARIIHQQLALKYKLVESEVPYYKYVPDPVLEKDHVTLYWDQSIITDRTIVANKPDIVVIDRSARRVMIVDVTIPHDENLVKAEKEKQIKYLDLAHEVVDMWNVNSAIIVPIVVTANGLIAKSLDDHLSRLSLGGWIKGLIQKAVLLDTARIVRRFLSLEP

SEQ ID NO: 28625 - protein, 868 aa, Noctua fimbriata
MRFVRRAFSGTGISPQEYMSRVTERIDFLKQKVYAWANRIRRYKRRVDRYSQNRMFQSDERWVYRTWERPELNMADVCRPDDATTSSFWRSIWSVPVCHTEADWMHDVERVCEPIPEMEPVLITPLDIARAVRPLPNWKSPGPDGLHNFWLKWLSSSHTCLASQFQSSLESGSFPQFLTTCVTHLLHKSGSPAEPKNYRPITCLSTVYKLLTSILRAKINTHIDKNSIMSASQNGCRNGSRGTKDLLLIDMAISQQVRRSRKDLSTCWIDYKKAYDSVPHTWLMRVLELYKIDGTLRAFLESCMGQWRTVLRYPGCRQIQGNDEPVWIKRRIFQGDSLSPLWFCLALNPLSTLLEDSGLGYRLRRGGQVISHLLYMDDLKLFAPNKLRLMELLKVTETFSSAIRMEFGVDKCAVMYVKQGEIMESEGIQLSDSIHLRTVSSTESYKYLGMSETLGINVTDMKQSLKERFFGRLNKVLHSLLSGGNKVRAFNGWVMPVLMYSFGVLKWTQTELDALDRRVRTLLTANRMHHPRSSVMRLYIPRKCGGRGFLNAKSLHNREICSLREYFLKVEVGMHRDVVAVDKGLTPLSMAKKNWRKPEVLTTDDRKEVWQGKELHGRFYRALHGPDVDFLASVSWLRFGDLFGETEGFVCAIMDEVMLTNNYRKYVMKDGTVDVCRACHRPGESIRHIISGCSRLANGEYLHRHNQVARIIHQQLALKYKLVESEVPYYKYVPDPVLEKDHVTLYWDQSIITDRTIVANKPDIVVIDRSARRVMIVDVTIPHDENLVKAEKEKQIKYLDLAHEVVDMWNVNSAIIVPIVVTANGLIAKSLDDHLSRLSLGGWIKGLIQKAVLLDTARIVRRFLSLEP

SEQ ID NO: 28626 - protein, 962 aa, Noctua fimbriata
MHNKNRALVCALDSQLENIFESSENLVDTHSILYCGAVAACRLANVKFPNCDVATRPKPAVPAWQRRIERRIDGARVLIGKLHCFREGNTRPRVMRFVRRAFSGTGISPQEYMSRATERIDFLKQKVYAWANRIRRYKRRVDRYSQNRMFQSDERWVYRAWERPELNMTDVCRPDDAATSSFWRSIWSVPVCHTEADWMCDVERVCEPIPEMEPILITPLDIARAVRPLPNWKSPGPDGLHNFWLKWLSSSHTCLASQFQSSLESGSLPQFLTTGVTHLLHKSGSPAEPKNYRPITCLSTVYKLLTSILRAKINTHIDKNSIMSASQNGCRNGSRGTKELLLIDMAISQQVRRSRKDLSTCWIDYKKAYDSVPHTWLMRVLELYKIDATLRAFLESCMGQWRTVLRYPGCRQIQGNDEPVWIKRGIFQGDSLSPLWFCLALNPLSTLLEDSGLGYRLRRGGQVISHLLYMDDLKLFAPNELRLMELLKVTETFSSAIRMEFGVDKCAVMYVKQGEIMESEGIQLSDSIHLRTLSSTESYKYLGMSEALGINVTDMKQSLKERFFGRLNKVLHSLLSGGNKVRAFNGWVMPVLMYSFGVLKWTQTELDALDRRVRTLLTANRMHHPRSSVMRLYIPRKCGGRGFLNAKSLHNREMCSLREYFLKVEVGMHRDVVAVDKGLTPLSMAKENWRKPEVLTTDDRKEVWQGKELHGRFYRALHGPDVDFLASVSWLRFGDLFGETEGFVCAIMDEVMLTNNYRKYIMKDGTVDVCRACHRPGESIRHIISGCSRLANGEYLHRHNQVARIIHQQLALKYKLVESEVPYYKYVPDPVLEKDHVTLYWDQSIITDRTIVANKPDIVVIDRSARRVMIVDVTIPHDENLVKAEKEKQIKYLDLAHEVVDMWNVNSAIIVPIVVTANGLIAKSLDDHLSRLSLGGWIKGLIQKAVLLDTARIVRRFLSLEP

SEQ ID NO: 28627 - protein, 1202 aa, Noctua fimbriata
MLTRAAARRARLPPPDPSLSSASPPPESSPIVSAVTPAVAVASSSSDEYFSPPTSPTPVRRQGRGRPPRSLGLRGHPAPSRVPAAGGCVQRMRWTHSINENVMRAYYGSTEGGTNLTAYRVEMLSLFQVLEPTVNVSAQRLSDQVRVIQRNHMLDDAVLDRLRSEVLSNRIVLTPAQTAVQASVIDATPPRFNPAVVEEDDRVAVVSSQCNDRLRSALEDALREYRSTPTELRPRLPRLPMHNKNRALVCALDSQLENIFESSENLVDTHSILYCGAVAACRLANVKFPNCDVATRPKPAVPAWQRRIERRIDGARVLIGKLHCFREGNTRPRVMRFVRRAFSGTGISPQEYMSRVTERIDFLKQKVYAWANRIRRYKRRVDRYSQNRMFQSDERWVYRAWERPELNMTDVCRPDDAATSSFWRSIWSVPVCHTEADWMRDVERVCEPIPEMEPILITRLDIARAVRPLPNWKSPGPDGLHNFWLKWLSSSHTCLASQFQSSLESGSLPQFLTTGVTHLLHKSGSPAEPKNYRPITCLSTVYKLLTSILRAKINTHIDKNSIMSASQNGCRSGSRGTKELLLIDMAISQQVRRSRKDLSTCWIDYKKAYDSVPHTWLMRVLELYKIDATLRAFLESCMGQWRTVLRYPGCRQIQGNDEPVWIKRGIFQGDSLSPLWFCLALNPLSTLLEDSGLGYRLRRGGQVISHLLYMDDLKLFAPNKLQLMELLKVTETFSSAIRMEFGVDKCAVMYVKRGEIMESEGIQLSDSIHLRSLSSSESYKYLGMSEALGINVTDMKQSLKERFFGRLNKVLHSLLSGGNKVRAFNGWVMPVLMYSFGVLKWTQTELDALDRRVRTLLTANRMHHPRSSVMRLYIPRKCGGRGFLNAKSLHNREMCSLREYFLKVEVGMHRDVVAVDKGLTPLSMAKENWRKPEVLTTDDRKEVWKGKELHGRFYRALHGPDVDFLASVSWLRFGDLFGETEGFVCAIMDEVMLTNNYRKYIMKDGTVDVCRACHRPGESIRHIISGCSRLANGEYLHRHNQVARIIHQQLALKYKLVESEVPYYKYVPDPVLEKDHVTLYWDQSIITDRTIVANKPDIVVIDRSARRVMIVDVTIPHDENLVKAEKEKQIKYLDLAHEVVDMWHMNSAVIVPIVVTANGLIAKSLDDHLSKLSLGGWIKGLIQKAVLLDTARIVRRFLSLEP

SEQ ID NO: 28628 - protein, 1202 aa, Noctua fimbriata
MITRAASRRARLPPPDQSLSSASPPPESSPIVSAVTPAVAVASSSSDEYFSPPTSPTPVRRQGRGRPPRSLGLRGHPAPSRVPAAGGCVQRMRWTHSINENVMRAYYGSTEGGTNLTAYRVGMLSLFQVLEPTINVSAQRLSDQVRVIQRNHMLDDAVLDRLRSEVLSNRIVFTPAQTAVQASVIDATPPRFNPAVVEEDDRVAVVSSQCNDRLRSALEDALREYRSTPTELRPRLPRLPMHNKNRALVCALDSQLKNLFESSENLVDTHSILYCGAVAACRLANVKFPNCDVATRPKPAVPAWQRRIECRIDGARVLIGKLHCFREGNTRPRVMRFVRRAFSGTGISPQEYMSRVTERIDFLKQKVYAWANRIRRYKRRVDRYSQNRMFQSDERWVYRAWERPDQNMTDMCRPDDAATSSFWRSIWSVPVCHTEADWMRDVEQVCEPIPEMEPILITPLDVARAVRPLPNWKSPGPDGLHNFWLKWLSSSHTCLASQFQSSLESGSLPQFLTTGVTHLLHKSGSPAEPKNYRPITCLSTVYKLLTSILRAKINTHIDKNSIMSASQNGCRNGSRATKELLLIDMAISQQVRRSRKDLSTCWIDYKKAYDSVPHTWLMRVLELYKIDATLRAFLESCMGQWRTVLRYPGCRQIQGNDEPVWIKRGIFQGDSLSPLWFCLALNPLSTLLEDSGLGYRLRRGGQVISHLLYMDDLKLFAPNKLQLMELLKVTETFSSAIRMEFGVDKCAVMYVKQGEIMKSEGIQLSDSIHLRTLSSTESYKYLGMSEALGINVTDMKQSLKERFFGRLNKVLHSLLSGGNKVRAFNGWVMPVLMYSFGVLKWTQTELDALDRRVRTLLTANRMHHPRSSVMRLYIPRKCGGRGFLNAKSLHNREMCSLREYFLKVEVGMHRDVVAVDKGLTPLSMAKENWRKPEVLTTDDRKEVWQGKELHGRFYRALHGPDVDFLASVSWLRFGDLFGETEGFVCAIMDEVMLTNNYRKYVMKDGTVDVCRACHRPGESIRHIISGCSRLANGEYLHRHNQVARIIHQQLALKYKLVESEVPYYKYVPDPVLEKDHVTLYWDQSIITDRTIVANKPDIVVIDRSARRVMIVDVTIPHDENLVKAEKEKQIKYLDLAHEVVDMWNVNSAIIVPIVVTANGLIAKSLDDHLSKLSLGGWIKGLIQKAVLLDTARIVRRFLSLEP

SEQ ID NO: 28629 - protein, 1202 aa, Noctua fimbriata
MITRAASRRARLPPPDQSLSSASPPPESSPIVSAVTPAVAVASSSSDEYFSPPTSPTPVRRQGRGRPPRSLGLRGHPAPSRVPAAGGCVQRMRWTHPINENVMRAYYGSTEGGTNLTAYRVGMLSLFQVLEPTINVSAQRLSDQVRVIQRNHMLDDAVLDRLRSEVLSNRIVFTPAQTAVQASVIDATPPRFNPAVVEEDDRVAVVSSQCNDRLRSALEDALREYRSTPTELRPRLPRLPMHNKNRALVCALDSQLKNLFESSENLVDTHSILYCGAVAACRLANVKFPNCDVATRPKPAVPAWQRRIECRIDGARVLIGKLHCFREGNTRPRVMRFVRRAFSGTGISPQEYMSRVTERIDFLKQKVYAWANRIRRYKRRVDRYSQNRMFQSDERWVYRAWERPDQNMTDMCRPDDAATSSFWRSIWSVPVCHTEADWMRDVEQVCEPIPEMEPILITPLDVARAVRPLPNWKSPGPDGLHNFWLKWLSSSHTCLASQFQSSLESGSLPQFLTTGVTHLLHKSGSPAEPKNYRPITCLSTVYKLLTSILRAKINTHIDKNSIMSASQNGCRNGSRATKELLLIDMAISQQVRRSRKDLSTCWIDYKKAYDSVPHTWLMRVLELYKIDATLRAFLESCMGQWRTVLRYPGCRQIQGNDEPVWIKRGIFQGDSLSPLWFCLALNPLSTLLEDSGLGYRLRRGGQVISHLLYMDDLKLFAPNKLQLMELLKVTETFSSAIRMEFGVDKCAVMYVKRGEIMESEGIQLSDFIHLRSLSSSESYKYLGMSEALGINVTDMKQSLKERFFGRLNKVLHSLLSGGNKVRAFNGWVMPVLMYSFGVLKWTQTELDALDRRVRTLLTANRMHHPRSSVMRLYIPRKCGGRGFLNAKSLHNREMCSLREYFLKVEVGMHRDVVAVDKGLTPLSMAKENWRKPEVLTTDDRKEVWQGKELHGRFYWALHGPDVDFLASVSWLRFGDLFGETEGFVCAIMDEVMLTNNYRKYIMKDGTVDVCRACHRPGESIRHIISGCSRLANGEYLLRHNQVARIIHQQLALKYKLVESEVPYYKYVADPVLEKNHVTLYWDQSIITDRTIVANKPDIVVIDRSARRVMIVDVTIPHDENLVKAEKEKQIKYLDLAHEVVDMWHVNSAIIVPIVVMANGLIAKSLDDHLSKLSLGGWIKSLIQKAVLLDTARIVRRFLSLEP

SEQ ID NO: 28630 - protein, 1202 aa, Noctua fimbriata
MITRAAYRRARLPPPDPSLSSASPPPESSPIVSAVTPAVAVASSSSDEYFSPPTSPTSVRRQGRGRPPRSLGLRGHPAPSRVPAAGGCVQRMRWTHSINENVMRAYYGSTEGGTNLTAYRVGMLSLFQVLEPTVNVSAQRLSDQVRVIQRNHMLDDAVLDRLRSEVLSNRIVLTPAQTAVQASVIDATPPRFNPAVVEEDDRVAVVSSQCNDRLRSALEDAFREYRSTPTELRPRLPRLPMHNKNRALVCALDSQLENIFESSENLVDTHSILYCGAVAACRLANVKFPNFDVATRPKPAVPAWQRRIERRIDEARVLIGKLHCFREGNTRPRVMRFVRRAFSGTGISPQEYMSRVTERIDFLKQKVYAWANRIRRYKRRVDRYSQNRMFQSDERWVYRAWERPELNMTDVCRPDDAATSSFWRSIWSVPVCHTEADWMRDVERVCEPIPEMEPILITRLDIARAVRPLPNWKSPGPDGLHNFWLKWLSSSHTCLASQFQSSLESGSLPQFLTTGVTHLLHKSGSPAEPKNYRPITCLSTVYKLLTSILRAKINTHIDKNSIMSASQNGCRSGSRGTKELLLIDMAISQQVRRSRKDLSTCWIDYKKAYDSVPHTWLMRVLELYKIDATLRAFLESCMGQWRTVLRYPGCGQIQGNDEPVWIKRGIFQGDSLSPLWFCLALNPLSTLLEDSGLGYRLRRGGQVISHLLYMDDLKLFAPNKLQLMELLKVTETFSSAIRMEFGVDKCAVMYVKQGEIMESEGIQLSDSIHLRTLSSTESYKYLGMSEALGINVTDMKQSLKERFFGRLNKVLHSLLSGGNKVRAFNGWVMPVLMYSFGVLKWTQTELDALDRRVRTLLTANRMHHPRSSVMRLYIPRKCGGRGFLNAKSLHNREMCSLREYFLKVEVGMHRDVVAVDKGLTPLSMAKENWRKPEVLTTDDRKEVWQGKELHGRFYRALHGPDVDFLASVSWLRFGDLFGETEGFVCAIMDEVMLTNNYRKYIMKDGTVDVCRACHRPGESIRHIISGCSRLANGEYLHRHNQVARIIHQQLALKYKLVESEVPYYKYVPDPVLEKDHVTLYWDQSIITDRTIVANKPDIVVIDRSARRVMIVDVTIPHDENLVKAEKEKQIKYLDLAHEVVDMWNVNSAIIVPIVVTANGLIAKSLDDHLSKLSLGGWIKGLIQKAVLLDTARIVRRFLSLEP

SEQ ID NO: 28631 - protein, 1202 aa, Noctua fimbriata
MITRAAYRRARLPPPDPSLSSASPPPESSPIVSAVTPAVAVASSSSDEYFSPPTSPTPVRRQGRGRPPRSLGLRGHPAPSRVPAAGGCVQRMRWTHSINENVMRAYYGSTEGGTNLTAYRVGMLSLFQVLEPTVNVSAQRLSDQVRVIQRNHMLDDAVLDRLRSEVLSNRIVLTPAQTAVQASVIDATPPRFNPAVVEEDDRVAVVSSQCNDRLRSALEDALREYRSTPTELRPRLPRLPMHNKNRALVCALDSQLENIFESSENLVDTHSILYCGAVAACRLANVKFSNCDVATRPKPAVPAWQRRIERRIDGARVLIGKLHCFREGNTRPRVMRFVRRAFSGTGISPQEYMSRVTERIDFLKQKVYAWANRIRRYKRRVDRYSQNRMFQSDERWVYRAWERPELNMTDVCRPDDAATSSFWRSIWSVPVCHTEADWMRDVERVCEPIPEMEPILITPLDVARAVRPLPNWKSPGPGGLHNFWLKWLSSSHTCLASQFQSSLESGSLPQFLTTGVTHLLHKSGSPAEPKNYRPITCLSTVYKLLTSILRAKINTHIDKNSIMSASQNGCRNGSRGTKELLLIDMAISQQVRRSRKDLSTCWIDYKKAYDSVPHTWLMRVLELYKIDATLRAFLESCMGQWRTVLRYPGCRQIQGNDEPVWIKRGIFQGDSLSPLWFCLALNPLSTLLEDSGLGYRLRRGGQVISHLLYMDDLKLFAPNKLQLMELLKVTETFSSAIRMEFGVDKCAVMYVKRGEIMESEGIQLSDFIHLRSLSSSESYKYLGMSEALGINVTDMKQSLKERFFGRLNKVLHSLLSGGNKVRAFNGWVMPVLMYSFGVLKWTQTELDALDRRVRTLLTANRMHHPRSSVMRLYIPRKCGGRGFLNAKSLHNREMCSLREYFLKVEVGMHRDVVAVDKGLTPLSMAKENWRKPEVLTTDDRKEVWQGKELHGRFYRALHGPDVDFLASVSWLRFGDLFGETEGFVCAIMDEVMLTNNYRKYIMKDGTVDVCRACHRPGESIRHIISGCSRLANGEYLHRHNQVARIIHQQLALKYKLVESEVPYYKYVPDPVLEKNHVTLYWDQSIITDRTIVANKPDIVVIDRSARRVMIVDVTIPHDENLVKAEKEKQIKYLDLAHEVVDMWHVNSAIIVPIVVTANGLIAKSLDDHLSKLSLGGWIKGLIQKAVLLDTARIVRRFLSLEP

SEQ ID NO: 28632 - protein, 1203 aa, Atethmia centrago
MLTRAASKRARPPPPDSSLSSASPPPVSSPTVSAVITSAAVVASSSSDEYFSPPTSPTPVRRQGRDRPPKSLGLRGHPAPSRVPAAGGCVQRMRWTQSMNENVMRAYNGSTEGGTNLTAYRVRMLSLFQELEPTVNVSAQRLSDQVRVIQRNRRLDDATLDRLRSEVLSNYIISTPAQTAVHTPIIDVIPPRSNHGVEEEDDRAATVSSQCNVRLRSALEDAFREYRSTPTELRPRLPRLPMHKKNRALMCALDSQLKVFFESSEDLVDTHSILYCAAVAACRLANVKFPNSDGATRPKPAVPAWQCRIERRIDKARVFIGKLYCFREGNTRPRVMRFVRRAFSGTGISPREYMSHITERIDFLKQKVCAWASRIRRYKRRVDRYTQNRMFQSDERWVYRAWERPKQNVTDVCRPDDATTTAFWRSIWSVPVCHVEADWMRDVERVCETIPEMEVVIITPSDIARAVRPLPNWKSPGPDGLHYFWLKWLTSSHTCLASQFQSSLESGSLPQFMTTGITHLLHKSGSPAEPKNYRPITCLSTVYKLLTSILRAKINTHIDSNSIMSASQNGCRNGSRGTKELLLIDMAISQQVRRSRKDLSTCWIDYKKAYDSVPHTWLMRVLELYKIDTTLRTFLESCMGQWRTVLRYPGCRQIQGNDEPVWIKRGIFQGDSLSPLWFCLALNPLSMQLEDSGLGYRLRRGGQIISHLLYMDNLKIFAPNKLQLMKLLKVTETFSSAIRMEFGVDKCAVMHVKRGEIMESEGIQLSDSIHLRSLSSPESYKYLGMSEALGINVTDMKQSLKERFFGRLKKVLISLLSGGNKVRAFNSWVMPVLTYSFGILKWTQTELDALDRRVRTLLTANRMHHPRSSVMRLYIPRKCGGRGFLNAKTLHNREICSLREYFLKTEVGMHRDVVAVDKGLTPLSMAKENWCKPVVLTTDDRKEIWQSKELHGRFYRALHEPDVDFLASVSWLRFGDLFGETEGFVCAIMDEVILTNNYRRHIMKDGTVDVCRACHRPGESIRHIISGCSRLANGEYLHRHNQVARIIHQQLALKYKLVNSEVPYYKYVPDPVLENDHVTLYWDRSIITDRTIVANKPDIVVIDRLARRAMIVDVTIPHGDNLVKAEKEKQIKYLDLAHEVVDMWNVNSAVIVPIVVTANGLMARSLNHHLSRLAIDGWIKGLIQKAVLLDTARIVRRFLSLEP

SEQ ID NO: 28633 - protein, 1203 aa, Atethmia centrago
MLTRAASKRARPPPPDSSLSSASPPPVSSPTVSAVITPAAVVASSSSDEYFSPPTSPTPVRRQGRDRPPKSLGLRGHPAPSWVPAAGGCVQRMRWTQSMNENVMRAYYGSTEGGTNLTAYRVRMLSLFQELEPTVNVSAQRLSDQVRVIQRNRRLDDATLDRLRSEVLSNYIISTPAQTAVHTPIIDVIPPRSNHGVEEEDDRAATVSSQCNVRLRSALEDAFREYRSTPTELRPRLPRLPMHKKNRALMCALDSQLKVFFESSEDLVDTHSILYCAAVAACRLANVKFPNSDGATRPKPAVPAWQCRIERRIDKARVLIGKLYCFREGNTRPRVMRFVRRAFSGTGISPREYMSHITERIDFLKQKVCAWASRIRRYKRRVDRYTQNRMFQSDERWVYRAWERPKQNVTDVCRPDDATTTAFWRSIWSVPVCHVEADWMRDVERVCETIPEMEVVIITPSDIARAVRPLPNWKSPGPDGLHNFWLKWLTSSHTCLASQFQSSLESGSLPQFMTTGITHLLHKSGSPAEPKNYRPITCLSTVYKLLTSILRAKINTHIDSNSIMSASQNGCRNGSRGTKELLLIDMAISQQVRRFRKDLSTCWIDYKKAYDSVPHTWLMRVLELYKIDTTLRTFLESCMGQWRTVLRYPGCRQIQGNDEPVWIKRGIFQGDSLSPLWFCLALNPLSTLLEDSDLGYRLRRGGQVISHLLYMDDLKIFAPNKLQLMELLKVTETFSSAIRMEFGVDKCAVMHVKRGEIMEPEGIQLSDSIHLRSLSSPESYKYLGMSEALGINVTDMKQSLKERFFGRLKKVLISPLSGGNKVRAFNGWVMPVLMYSFGILKWTQTELDALDRRVRTLLTANRMHHPRSSVMRLYIPRKCGGRGFLNAKTLHNREICSLREYFLKTEVGMHRDVVAVDKGLTPLSMAKENWCKPVILTTDDRKEIWQNKELHGRFYRALHEPDVDFLASVSWLRFGDLFGETEGFVCAIMDEVILTNNYRRHIMKDGTVDVCRACHRPGESIRHIISGCSRLANGEYLHRHNQVARIIHQQLALKYKLVNSEVPYYKYAPDPVLENDHVTLYYDRSIITDRTIVANKPDIVVIDRLARRAMIVDVTIPHDDNLVKAEKEKQIKYLDLAHEVVDMWNVNSAVIVPIVVTANGLMARSLNHHLSRLALDGWIKGLIQKAVLLDTARIVRRFLSLEP

SEQ ID NO: 28634 - protein, 868 aa, Atethmia centrago
MRFVRRAFSGTGISPREYMSHITERIDFLKQKVCAWASRIRRYKRRVDRYTQNRMFQSDERWVYRAWERPKQNETDVCRPDDATTTAFWRSIWSVPVCHVEADWMRDVERVCETIPEMEVVIITPSDIARVVRPLPNWKSPGPDGLHNFWLKWLTSSHTCLASQFQSSLESRSLPQFMTTGITHLLHKSGSPAEPKNYRPITCLSTVYKLLTSILRAKINTHIDSNSIMSASQNGCRNGSRGTKELLLIDMAISQQVRRSRKDLSTCWIDYKKAYDSVPHTWLMRVLELYKIDMTLRTFLESCMGQWRTVLRYPGCRQIQGNDESVWIKRGIFQGDSLSPLWFCLALNPLSMQLEDSGLGYRLRRGGQVISHLLYMDDLKIFAPNKLQLMELLKVTETFSSAIRMEFGVDKCAVMHVKRGEIMESEGIRLSDSIHLRSLSSPESYKYLGMSEALGINVTDMKQSLKERFFGRLKKVMISLLSGGNKVRAFNGWVMPVLMYSFGILKWTQTELDALDRRVRTLLTANRMHHPRSSVMRLYIPRKCGGRGFLNAKTLHNREICSLREYFLKTEVGMHRDVVAVDKGLTPLSMAKENWCKPVGLTTDDRKEIWQNKELHGRFYRALHEPDVDFLASVSWLRFGDLFGETEGFVCAIMDEVILTNNYRRHIMKDGTVDVCRACHRPGESIRHIISGCSRLANGEYLHRHNQVARIIHQQLALKYKLVNSEVPYYKYVPDPVLENDHVTLYWDRSIITDRTIVANKSDIVVIDRLARRAMIVDVTIPHDDNLVKAEKEKQIKYLDLAHEVVDMWNVNSAVIVPIVVTANGLMARSLNHHLSRLTLDGWIKGLIQKAVLLDTARIVRRFLSLEP

SEQ ID NO: 28635 - protein, 883 aa, Atethmia centrago
MHKKNRALMCALDSQLKVFFESSEDLVDTHSILYCAAVTACRLANVKFPNSDGATRPKPAVPAWQCRIERRIDKARVLIGKLYCFREGNTRPRVMRFVRRAFSGTGISPREYMSHITERIDFLKQKVCAWASRIRRYKRRVDRYTQNRMFQSDERWVYRAWERPKQNVTDVCHPDDATTTAFWRSIWSVPVCHVEADWMRDVERVCETIPEMEVVIITPSDIARAVRPLPNWKSPGPDGLHNFWLKWLTSSHTCLASQFQSSLESGSLPQFMTTGITHLLHKSGSPAEPKNYRPITCLSTVYKLLTSILRAKINTHIDSNSIMSASQNGCRNGSRGTKELLLIDMAISQQVRRSRKDLSTCWIDYKKAYDSVPHTWLMRVLELYKIDTTLRTFLESCMGQWRTVLRYPGCRQIQGNDEPVWIKRGIFQGDSLSPLWFCLALNPLSMLLEDSGLGYRLRRGGQVISHLLYMDDLKIFAPNKLQLMKLLKVTETFSSAIRMEFGVDKCAVMHVKRGEIMESEGIQLSDSIHLRSLSSPESYKYLGMSEALGINVTAMKQSLKERFFGRLKKVLISLLSGGNKVRAFNGWVMPVLMYSFGILKWTQTELDALDRRVRTLLTANRMHHPRSSVMRLYIPRKCGGRGFLNAKTLHNREICSLREYFLKTEVGMHRDVVAVDKGLTPLSMAKENWCKPVVLTTDDRKEIWQSKELHGRFYRALHEPDVDFLASVSWLRFGDLFGETEGFVCAIMDEFILTNNYRRHIMKDGTVDVCRACHRPGESIRHIISGCSRLANGEYLHRHNQVARIIHQQLALKYKLVNSEVPYYKYVPDPVLENDHVTLYWDRSIITDRTIVANKPDIVVIDRLARRAMIVDVTIPHVNNLVC

SEQ ID NO: 28636 - protein, 1202 aa, Atethmia centrago
MLTRSAARARPPPPDSSLSSASPAPVPSPTVSAVTTPAAVVASSSSDEYFSPPTSPTPVRRQGRGRPPKSLGLRGQLAPSRVPAAGGCVQRMRWTQSMNENVMRAYYGSTEGGTNLTAYRVRMLSLFQKLEPTVNVSAQRLSDQVRVIQRNHRLDDAALDRLRSEVLSNHIVSTPAQTATHAPIINAIPPRSNHDVEEEDDRVATVSSQCNVRLRSALEDAFREYRSTPTELRPRLPRLPMHKKNRALVCTLDSLLKDFFESSEDLVDTHSILYCAAVAACRLANVKFPNCDGATRPKPAVPAWQCRIERRIDGARVLIGKLYCFREGNTRPRVMRFVRRAFSGTGISPREYMSRVTERIDFLKQKVCAWASRIRRYKRRVDRYTQNRMFQSDERWVYRAWERPEQNETDVCRPDDATTTAFWRSIWSVPVCHAEADWMRDVERVCETIPEMEVVIITPSDIARAVRPLPNWKSPGPDGLHNFWLKWLTSSHTCLASQFQSSLESGSLPQFLTTGITHLLHKSGSPAEPKNYRPITCLSTVYKLLTSILRAKINTHIDSNSIMSASQNGCRNGSRGTKELLLIDMAISQQVRRFRKDLSTCWIDYKKAYDSVPHTWLMRVLEFYKIDTTLRTFLESCMGQWRTVLRYPGCRQIQGNDEPVWIKRGIFQGDSLSPLWFCLALNPLSTLLEDSGLGYRLRRGGQVISHLLYMDDLKIFAPNKLQLMELLNVTETFSSAIRMEFGVDKCAVMHVKRGEIMESEGIKLSDSIHLRSLSSPESYKYLGMSEALGINVTDMKQSLKERFFGRLKKVLISPLSGGNKVRAFNGWVMPVLMYSFGILKWTQTELDALDRRVRTLLTANRMHHPRSSVMRLYIPRKCGGRGFLNAKTLHNREICSLREYFLKTEVGMHRDVVAVDKGLTPLSMAKENWCKPVILTTDDRKEIWQNKELHGRFYRALHEPDVDFLASVSWLRFGDLFGETEGFVCAIMDEVILTNNYRRHIMKDGTVDVCRACHRPGESIRHIISGCSRLANGEYLHRHNQVARIIHQQLALKYKLVNSEVPYYKYAPDPVLENDNVTLYWDRSIITDRTIVANKPDIVVIDRLARRAMIVDVTIPHDENLVKAEKEKQIKYLDLAHEVVDMWNVDSAVIVPIVVTANGLMAESLNHHLSRLSLGGWIKGLIQKAVLLDTARIVRRFLSLES

SEQ ID NO: 28637 - protein, 962 aa, Mesoligia furuncula
MHKKNRALVCALDSQLKNFFESSVDLVDTHSILYCAAVAACRLANVKFPSCDGATRPKPAVPAWQRRIERRIDGARVLIGKLYCFREGNTRPRVMRFVRRAFSGTGISPREYMSRVTERIDFLKQKVCAWASRIRRYKRRVDRYTQNRMFQSDERWVYRAWERPEQNVTDVCRPDDAATSAFWCSIWSVPVCHTEAGWMQDVEQVCESVPEMETVLITPSDVARAVRPLSNWKSPGPDGLHNFWLKWLISSHTCLASQFQSSLESGSLPQFLSTGVTHLLHKSGSPAEPKNYRPITCLSTVYKLLTSILRAKINKHIESNSIMSTSQNGCRNGSRGTKELLLIDMAISQQVRRSRKDLSTCWIDYKKAYDSVPHTWLMRVLELYKIDATLRTFLESCMGQWKTVLRYPGCRQIQGNDEPVWIKRGIFQGDSLSPLWFCLALNPLSTLLEDSGLGYRLRRGGQVISHLLYMDDLKLFAPNKLRLMELLKVTKTFSSAIRMEFGVDKCAVMHVKRGEIMESEGIQLSDSISLRSLSSSESYKYLGMSEALGINDADMKQSLKERFFCRLKKVLISLLSGGNKVRAFNGWVMPVLMYSFGILKWTQTELDALDRRVHTLLTANRMHHPRSSVMRLYIPRKCEGRGFLNAKTLHNREVCSLREYFLKAEVGMHRDVVAVDKGLTPLSMAKENWRKPVVLSTDDRKKVWQSKELHGRFYRALHEPGVDFIASVSWLRFGDLFGESEGFVCAIMDEVILTNNYRRHIMKDGTVDVCRACHRPGESIRHIISGCSRLANGEYLHRHNQVARIIHQQLALKYKLVDSEVPYYKYVPDPVLENDHVTLYWDRSIITDRTIVANKPDIVVIDRLARRTMIVDVTIPHDGNLVKAEKEKKIKYLDLAHEVVDMWNVSSAVIVPIVVSANGLMAESLDQHLSRLSLGGWIKGLIQKAVLLDTARIVRRFLSLEP

SEQ ID NO: 28638 - protein, 978 aa, Xestia c-nigrum
MRWTQSMNENAMRAYYGSKKNRALVCALDSQLKNVFESSEDLVDTHSILFCGAVAACRLANVKFPNCDLATRPKPAVPVWQRRIERRIDGARVLIGKLYCFREGNTRPRVMRFVRRAFSGTEISPQEYMSRVTERIDFLKQKVYAWASRIRRYKRRVDRYSQNRMFQCDERWVYRAWERPDQNVTDVCHPGDTATSSFWRSIWSVPVCHSEADWMRDVERVCEPIPEMAPVVITSLDIARAVRPLPNWKSPGPDGLHNFWLKWLSSSHTCLASQFQSSLESGSLPQFLTTGVTHLLHKSGSPTEPQNYRPITCLSTVYKLLTSILRTKINTHIDNNSIMSASQNGCRNGSRGTKELLLIDMAISQQVRRSRKDLSTCWIDYKKAYDSVPHSWLMRVLELYKIDATLCTFLKSCMGQWRTVLRYPGCRQIQGNDESVWIKRGIFQGDSLSPLWFCLALNPLSTLLENSGLGYQLRKDGQVISHLLYMDDLKLFAPNKLRLMELLKVTETFSNAIRMEFGVDKCAVMYVKRGEIMESEGLQLSDSIHLRSLSSSESYKYLGMSEALGINVTDMKQSLRERFFGRLKKVLNSLLSGGNKVRAFNGWVMPVLMYSFGILKWTQTELDALDRRVRTLLTENRMHHPRSSVMRLYIPRKCGGRGFLNVKTLHNREVCSLREYFLKAEVGMHRDVVAVDKGLTPLSMAKENWRKPVILTTDDRKKEWQGKVLHGRFYRALHGPDVDFLASVSWLRFGDLFGETEGFVCAIMDEVMLTNNYRKYIMKDGTVDVCRACHCPGESIRHIISGCSRLANGEYLHRHNQVARIIHQQLALKFKLVESEVPYYKYVPDPVLVKDHITLYWDQSIITDRTIVANKPDIVVIDRSARRVMIIDVTIPHDENLVKAEKEKQIKYLDLAHEVRDMWNMNSVIIVPIVVTANGLIAKSLDEHLSKLSLGGWIKGLIQKAVLLDTARIVRRFLSLQP

SEQ ID NO: 28639 - protein, 1199 aa, Xestia c-nigrum
MITRAALRRARLATPDSSLSSASPPPDPGSPVSPAVAVASSSSDEYFSPPTSPTPVRRAGRGRPPRSLGLRGQQAPSRVPATGGCVQRMRWTQSMNENVMRAYYGSTEGGTNLTVYRVRMLSMFQDLEPTVNASAQRLSDQVRVIQRNHLLDDAVLDRLRSEVLNNRIIFTQAQTAVQASAIHATPPRSNPAVIEEDDRVATISSQCNDRLRSALDNALREYRSISAELRPRLPRLPMHKKNKALVCALDSQLKNIFESSEDLVDTHSILFCGAVAACRLANVKFPNCDIATRPKPAVPAWQRRIERRIDGARVLIGKLYCFREGNTRPRVMRFVRRAFSGTEISPQEYMSRVTERIDFLKQKVYAWASRIRRYKRRVDRYSQNRMFQSDERWVYRAWERPQQNITDVCRPDDAATSSFWRSIWSVPVCHSEADWMRDVERVCEPIPTMEPILITPLDIARAVRPLPNWKSPGPDGLHNFWLKWFSSSHTCLASQFQSSLESGSLPQFLTTGVTHLLHKSGSPAEPKNYRPITCLSTVYKLLTSILRTKINTHVDSNSIMSASQNGCRNGSRGTKELLLIDMAISQQVRRARKDLSTCWIDYKKAYDSVPHSWLKRVLELYKIDATLRAFLESCMGQWRTVLRYPGCRQIQGNDEPVWIKRGIFQGDSLSPLWFCLALNPVSTLLENSGLGYRLRKDGQVISHLLYMDDLKLFAPTKLQLMGLLKVTETFSSAIGMEFGVDKCAVMYVKRGKIIGSEGLQLSDSIHLRSLSSSESYKYLGMSEALGINVTDMKQSLKERFFGRLKKVLNSLLSGGNKVRAFNGWVMPVLMYSFGILKWTQTELDALDRRVRTLLTENRMHHPRSSVMRLYIPRKCGGRGFLNAKTLHNREVCSLREYFLKADVGMHRDVVAVDKGLTPLSMAKENWRKPVVLTTDDRKNEWQGKELHGRFYRALHGPDVDFLASVSWLRFGDLFGETEGFVCAIMDEVMLTNNYRKYIMKDGTVDVCRACHCPGESIRHIISGCSRLANGEYLHRHNQVARIIHQQLALKFKLVESEVPYYKYVPDPVLVKDHVTLYWDQSIITDRTIVANKPDIVVIDRSARRVMIIDVTIPHDENLVKAEKEKQMKYLDLAHEVRDMWNMNSVIIVPIVVTANGLIAKSLDEHLSKLSLGGWIKGLIQKAVLLDTARIVRRFLSLQP

SEQ ID NO: 28640 - protein, 1200 aa, Xestia c-nigrum
MITRAASRRRARPPTPDSSLSSASPPPDPGSPVPPVAAVASSSSDEYFSPPTSPTPVRRAGRGRPPRSLGLRGQQAPSRVPATGGCVQRMRWTQSMNENVMRAYYGSTEGGINLTAYRDRMLSLFQDLEPAVNVSAQRLSDQVRVIQRSHRLDDTTLDRLRSEVLSNLITITPTQTAVHMSVVNATLPRSNPVVVEEDDRVALVSSQCNDRLRSALDNALREYRSISAELRPRLPRLPMHKKNRALVCALDSQLKNIFESSEDLVDTHSILFCGAVAACRLANVKFPNCDIAIRPKPAVPAWQRRIERRIDGARVLIGKLYCFREGNTRPRVMRFVRRAFSGTEISPQEYMSRVTERIDFLKQKVYAWASRIRRYKRRVDRYSQNRMFQSDERWVYRAWERPQQNMMDVCRPDDAATSSFWRSIWSVPVCHSEADWMRDVERVCEPIPTMEPILITPLDIARAVRPLPNWKSPGPDGLHNFWLKWFSSSHTCLASQFQSSLESGSLPQFLTTGVTHLLHKSGSPAEPKNYRPITCLSTVYKLLTSILRTKINTHVDSNSIMSASQNGCRNGSRGTKELLLIDMAISQQVRRARKDLSICWIDYKKAYDSVPHSWLKRVLELYKIDATLRAFLESCMGQWRTVLRYPGCRQIQGNDEPVWIKRGIFQGDSLSPLWFCLALNPVSTLLENSGLGYRLRKDGQVISHLLYMDDLKLFAPNKLQLMELLKVTETFSSTIGMEFGVDKCAVMYVKRGKIMGSEGLQLSDSIHLRSLSSSESYKYLGMSEALGINVTDMKQSLRERFFGRLKKVLNSLLSGGNKVRAFNGWVMPVLMYSFGILKWTQTELDALDRRVRTLLTENRMHHPRSSVMRLYIPRKCGGRGFLNAKTLHNREVCSLREYFLKADVGMHRDVTAVDRGLTPLSMANENWRKPVVLTTDDRMKEWQGKELHGRFYRALHGPDVDFLASVSWLRFGDLFGETEGFVCAIMDEVMLTNNYRKYIMKDGTVDVCRACHLPGESIRHIISGCSRLANGEYLHRHNQVARIIHQQLALKFNLVELEVPYYKYVPDPVLVKDHVTLYWDQSIITDRTIVANKPDIVVIDRSARRVMIIDVTIPHDENLVKAEKEKQIKYLDLAHEVRDMWNMDSVIIVPIVVSANGLIAKSLDEHLSKLSLGGWIKGLIQKAVLLDTARIVRRFLSLQP

SEQ ID NO: 28641 - protein, 1199 aa, Xestia c-nigrum
MITRAASRRALIPSPDSSLSSASPPPDPGSPVSPVAAVASSSSDEYFSPPTSPTPVRRAGRGRPPKGLGLRGQQAPSRVPATGGCVQRMKWTQLMNENVMRAYYGSTEGGTNLTAYRVRMLSLFQDLEPTVNASAQRLSDQVRVIQRNHLLDGAALDRLRSEVLSNRIILTPAQTAVQASSIDANPPRSNPAVVEEDDRVATVSSQCNDRLRSALEDALHEYRSTSAELRPRLPRLPMHKKNRALVCALDSQLKNVFESSEDLVDTHSILFCGAVAACRLANVKFPNYDLATRPKLAVPAWQRRIERRIDGARVLIGKLHCFRKGNTRPRVMRFVRRAFSGTEISPQEYMSRVTERIDFLKQKVYAWASRIRRYKRRVDRYSQNRMFQSDERWVYRAWERPQQNMTDVCRPDDAATSSFWRSIWSVPVCHSEADWMRDVERVCEPIPTMEPILITPLDIARAVRPLPNWKSPGPDGLHNFWLKWFSSSHTCLASQFQSSLESGSLPQFLTTGITHLLHKSGSPAEPKNYRPITCLSTVYKLLTSILRTKINTHVDSNSIMSASQNGCRNGSRGTKELLLIDMAISQQVRRARKDLSTCWIDYQKAYDSVPHSWLRRVLELYKIDATLRTFLESCMGQWRTVLRYPGCRQIQGNDEPVWIKRGIFQGDSLSPLWFCLALNPVSTLLENSGLGYRLRKDGQVISHLLYMDDLKLFAPNKLQLMELLKVTETFSSAIGMEFGVDKCAVMYVKRGKIMGSEGLQLSDSIHLRSLSSSESYKYLGMSEALGINVTDMKQSLKERFFGRLKKVLNSLLSGGNKVRAFNGWVMPVLMYSFGILKWTQTELDALDRRVRTLLTENRMHHPRSSVMRLYIPRKCGGRGFLNAKTLHNREVCSLREYFLKADVGMHRDVVAVDKGLTPLSMAKENWRKPVVLTTDDRKKEWQGKELHGRFYRALHGPDVDFLASVSWLRFGDLFGETEGFVCAIMDEVMLTNNYRKYIMKDGTVDVCRACHCPGESIRHIISGCSRMANGEYLHRHNQVARIIHQQLALKFKLVESEVPYYKYVPDPVLVKDHVTLYWDQSIITDRTIVANKPDIVVIDRSARRVMIIDVTIPHDENLVKAEKEKQMKYLDLAHEVRDMWNMNSVIIVPIVVTANGLIAKSLDEHLSKLSLGGWIKGLIQKAVLLDTARIVRRFLSLQP

SEQ ID NO: 28642 - protein, 1200 aa, Xestia c-nigrum
MITRAASRRRARPPTPDSSLSSASPPPDPGSPVPPVAAVASSSSDEYFSPPTSPTPVRRAGRGRPPRSLGLRGQQVLSRVPAAGGCVQRMRWTQSMNENVMRAYYGSTEGGINLTAYRDRMLSLFQDLEPAVNVSAQRLSDQVRVIQRSHRLDDATLDRLRSEVLSNLIIITPTQTAVQVSVVNATLPRSNPVVVEEDDRVALVSSQCNDRLRSALEDALREYRSTPTELRPRLPRLPMHKKNRALVCALDSQLKNIFESSEDLVDTHSILFCGAVAACRVANVKFPNCDIATRPKPAVPAWQRRIERRIDGARVLIGKLYSFREGNTRPRVMRFVRRAFLGTEISPQEYMSRVTERIDFLKQKVYAWANRIRRYKRRVDRYSQNRMFQSDERWVYRTWEQPQQNMTDVCRPDDAATSSFWRNIWSVPVCHTEADWMRDVERVCESIPEMEPVFITPLDIANAVRPLPNWKSPGPDGLHNFWLKWLSSSHTCLASQFQSSLESGSLPQFLTAGVTHLLHKSGSAAEPKNYRPITCLSTVYKLLTSILRTKINIHIDKNSIMSASQNGCRNGSRGTKELLLIDMAISQQVRRSRKDLSTCWIDYKKAYDSVPHSWLMRVLELYKIDATLRTFLESCMGQWRTVLRYPGCRQIQGNDESVWIKRGIFQGDSLSPLWFCLALNPLSTLLENSGLGYRLRKDGQVISHLLYMDDLKLFAPNKLQLMELLKVTETFSSAIRMEFGVDKCAVMYVKRGEIMRSEGLQLSDSIHLRSLSSSESYKYLGMSEALGINVTDMKQSLRERFFGRLKKVFNSLLSGGNKVRAFNGWVMPVLMYSFGILKWTQTELDALDRRVRTLLTENRMHHPRSSVMRLYIPRKCGGRGFLNAKTLHNREVCSLREYFLKADVGMHRDVVAVDKGLTPLSMAKENWRKPVVLTTDDRKKEWQGKELHGRFYRALHGPDVDFLASVSWLRFGDLFGETEGFVCAIMDEVMLTNNYRKYIMKDGTVDVCRACHLPGESIRHIISGCSRLANGEYLHRHNQVARIIHQQLALKFNLVELEVPYYKYVPDPVLVKDHVTLYWDQSIITDRTIVANKPDIVVIDRSARRVMIIDVTIPHDENLVKAEKEKQIKYLDLAHEVRDMWNMNSVIIVPIVVTANGLIAKSLDDHLAKLSLGGWIKNLIQKAVLLDTARIVRRFLSLQP

SEQ ID NO: 28643 - protein, 1200 aa, Xestia c-nigrum
MITRAASRRRARPPTPDSSLSSASPPPDPGSPVPPVAAVASSSSDEYFSPPTSPTPVRRAGRGRPPRSLGLRGQQAPSRVPATGGCVQRMRWTQSMNENVMRAYYGSTEGGINLTAYRDRMLSLFQDLEPAVNVSAQRLSDQVRVIQRSHRLDDATLDRLRSEVLSNLITITPTQTAVHMSVVNATLPRSNPVVVEEDDRVALVSSQCNDRLRSALDNALREYRSISAELRPRLPRLPMHKKNRALVCALDSQLKNIFESSEDLVDTHSILFCGAVAACRLANVKFPNCDVAIRPKPAVPAWQRRIERRIDGARVLIGKLYCFREGNTRPRVMRFVRRAFSGTEISPQEYMSRVTERIDFLKQKVYAWASRIRRYKRRVDRYSQNRMFQSDERWVYRAWERPQQNMTDVCRPDDAATSSFWRSIWSVPVCHSEADWMRDVERVCEPIPTMEPILITPLDIARAVRPLPNWKSPGPDGLHNFWLKWFSSSHTCLASQFQSSLESGSLPQFLTTGVTHLLHKSGSPAEPKNYRPITCLSTVYKLLTSILRSKINTHVDSNSIMSASQNGCRSGSRGTKELLLIDMAISQQVRRARKDLSICWIDYKKAYDSVPHSWLKRVLELYKIDATLRAFLESCMGQWRTVLRYPGCRQIQGNDEPVWIKRGIFQGDSLSPLWFCLALNPVSTLLENSGLGYRLRKDGQVISHLLYMDDLKLFAPNKLQLMELLKVTETFSSAIGMEFGVDKCAVMYVKRGKIMGSEGLQLSDSIHLRSLSSSESYKYLGMSEALGINVTDMKQSLRERFFGRLKKVLNSLLSGGNKVRAFNGWVMPVLMYSFGILKWTQTELDALDRRVRTLLTENRMHHPRSSVMRLYIPRKCGGRGFLNAKTLHNRELCSLREYFLKADVGMHRDVAAVDKGLTPLSMAKENWRKPVVLTTDDRMKEWQGKELHGRFYRALHGPDVDFLASVSWLRFGDLFGETEGFVCAIMDEVMLTNNYRKYIMKDGTVDVCRACHLPGESIRHIISGCSRLANGEYLHRHNQVARIIHQQLALKFNLVELEVPYYKYVPDPVLVKDHVTLYWDQSIITDRTIVANKPDIVVIDRSARRVMIIDVTIPHDENLVKAEKEKQIKYLDLAHEVRDMWNMDSVIIVPIVVSANGLIAKSLDEHLSKLSLGGWIKGLIQKAVLLDTARIVRRFLSLQP

SEQ ID NO: 28644 - protein, 1203 aa, Omphaloscelis lunosa
MLTRSAARSARLPPPDSPLSSASPPPVPSPIVNAVSTPAAVVASSSSDEYFSPPTSPTPVRRQGRGRPPKSLGLRGQPAPSRVPAAGGCVQRMRWTQSMNENVMRAYYGSTEGGTNLTAYRVRMLSLFQELEPTVNVSAQRLSDQVRVIQRNHRLDDTALDRLRSEVLSNHIVSARAQTTAEASNIDPTPPRFNHGVEEEDDRVATVSSQCNNRLRSALEDAFREYRYTPTELRPRLPRLPMHKKNRALMCALDSQLTNFFESSEDLIDTHSILYCAAVAACRLANVKFPNCDGATRPKPAVPAWQCRIERRIDGARVLIGKLYCFREGNTRPRVMRFVRRAFSGTEISPQDYMSRVTERIDFLKQKVCAWASRIRRYKRRVDRYTQNRMFQSDERWVYRAWERPEQNVTDVCRPDDAATSAFWRSIWSVPVCHTEAGWMQDVERVCETIPEMDAVFITPLDVARAVRPLPNWKSPGPDGLHNFWLKWLSSSHTCLASQFQSSLESGSLPQFLTTGVTHLLHKSGNPAEPKNYRPITCLSTVYKLLTSILRTKINTHIDSNSIMSVSQNGCRNGSRGTKELLLIDMAISQQVRRSRKDLSTCWIDYKKAYDSVPHTWLMRVLELYKVDTTLRTFLMSCMGQWRTVLRYPGCRRTQGNDEPVWIKRGIFQGDSLSPLWFCLALNPLSTLLEDSGLGYRLRRGGQVISHLLYMDDLKLFAPNKLRLMELLKVTETFSGAIRMEFGVDKCAVMHVKRGEIMESEGIQLSDSIHLRPLSSAENYRYLGMSESLGINVADMKQSLKERFFGRLKKVLISFLSGGNKVRAFNGWVMPVLMYSFGILKWTQTELDALDRRVRTLLTANRMHHPRSSVMRLYIPRKCGGRGFLNAKTLHNREVCSLREYFFKADVGMHRDVVAVDNGLTPLSMAKENWRKPVVLTTDDRKEIWQSKALHGRFYRALHEPSVDFLASVSWLRFGDLFGETEGFICAIMDEVILTNNYRRHIMKDGTVDVCRACHRPGESIRHIISGCSRLANGEYLHRHNQVARIIHQQLALKYKLVDSEVPYYKYVPVPVLENDHATLYWDRSIITDRTIVANKPDIVVIDRLARHAMIVDVTIPHDENLVKAEKEKQIKYLDLAHEVVDMWNVSSAIIVPIVVTANGLMAKSLDHHLSRLSLGGWIKRLIQKAVLLDTARIVRRFLSLQP

SEQ ID NO: 28645 - protein, 1203 aa, Omphaloscelis lunosa
MLTRSAARSARLPPPDSPLSSASPPPVPSPIVNAVSTPAAVVASSSSDEYFSPPTSPTPVRRQGRGRPPKSLGLRGQPAPSRVPAAGGCVQRMRWTQSMNENVMRAYYGSTEGGTNLTAYRVRMLSLFQELEPTVNVSAQRLSDQVRVIQRNHRLDDTALDRLRSEVLSNHIVSAREQTAAEASNIDPTPPRFNHGVEEEDDRVATVSSQCNNRLRSALEDAFHEYRYTPTELRPRLPRLPMHKKNRALMCALDSQLTNFFESSEDLIDTHSILYCAAVAACRLANVKFPNCDGATRPKPAVPAWQCRIERRIDGARVLIGKLYCFREGNTRPRVMRFVRRAFSGTEISPQDYMSRVTERIDFLKQKVCAWASRIRRYKRRVDRYTQNRMFQSDERWVYRAWERPEQNVTDVCRPDDAATSAFWRSIWSVPVCHTEAGWMQDVERVCETIPEMDAVFITPLDVARAVRPLPNWKSPGPDGLHNFWLKWLSSSHTCLASQFQSSLESGSLPQFLTTGVTHLLHKSGNPAEPKNYRPITCLSTVYKLLTSILRTKINTHIDSNSIMSVSQNGCRNGSRGTKELLLIDMAISQQVRRSRKDLSTCWIDYKKAYDSVPHTWLMRVLELYKVDTTLRTFLMSCMGQWRTVLRYPGCRRTQGNDEPVWIKRGIFQGDSLSPLWFCLALNPLSTLLEDSGLGYRLRRGGQVISHLLYMDDLKLFAPNKLRLMELLKVTETFSGAIRMEFGVDKCAVMHVKRGEIMESEGIQLSDSIHLRPLSSAENYRYLGMSESLGINVADMKQSLKERFFGRLKKVLISFLSGGNKVRAFNGWVMPVLMYSFGILKWTQTELDALDRRVRTLLTANRMHHPRSSVMRLYIPRKCGGRGFLNAKTLHNREVCSLREYFFKADVGMHRDVVAVDNGLTPLSMAKENWRKPVVLTTDDRKEVWQSKALHGRFYRALHEPSVDFLASVSWLRFGDLFGETEGFICAIMDEVILTNNYRRHIMKDGTVDVCRACHRPGESIRHIISGCSRLANGEYLHRHNQVARIIHQQLALKYKLVDSEVPYYKYVPDPVLENDHATLYWDRSIITDRTIVANKPDIVVIDRLARHAMIVDVTIPHDENLVKAEKEKQIKYLDLAHEVVGMWNVSSAIIVPIVVTANGLMAKSLDHHLSRLSLGGWIKRLIQKAVLLDTARIVRRFLSLQP

SEQ ID NO: 28646 - protein, 1203 aa, Omphaloscelis lunosa
MLTRSAARLARPPPPDSSLSSASPPPVPSPTVSATTTPAAVVASSSSDEYFSPPTSPTPVRRQGRGRPPKSLGLRGQPAPSRVPAAGGCVQRMRWTQSMNENVMRAYYGSTEGGTNLTAYRVRMLSLFQELEPTVNVSAQRLSDQVRVIQRNHRLDDTALDRLRSEVLSNHIVSTRAQTAAQASNIDATPPRFNHGVEEEDDRVATVSSQCNNRLRSALEDAFREYRYTPTELRPRLPRLPMHNKNRALVCALDSQLTNFFESSEDLIDTHSILYCAAVAACRLANVKFPNCDGATRPKPVVPAWQCRVERRIDGARVLIGKLYCFREGNTRPRVMRFVRRAFSGTGISPQDYMSRVTERIDFLKQKVCAWASRIRRYKRRVDRYTQNRVFQSDERWVYRAWERPEQNVTDVCRPDDAATSAFWRSIWSVPVCHTEAGWMQDVERVCETIPVMDAVFITPLDVARAVRPLPNWKSPGPDGLHNFWLKWLSSSHTRLASQFQSSLESGSLPQFLTTGVTHLLHKSGNPAEPKNYRPITCLSTVYKLLTSILRMKINTHIDNNSIMSVSQNGCRNGSRGTKELLLIDMAISQQVRRPRKDLSTCWIDYKKAYDSVPHTWLMRVLELYKVDTTLRTFLMSCMGQWRTVLRYPGCRQTQGNDEPVWIKRGIFQGDSLSPLWFCLALNPLSTLLEDSGLGYRLRRGGQVISHLLYMDDLKLFAPNKLRLMELLKVTETFSGAIRMEFGVDKCAVMHVKRGEIMESEGIQLSDSIHLRSLSSAENYRYLGMSESLGINVADMKQSLKERFFGRLKKVLISFLSGGNKVRAFNGWVMPVLMYSFGILKWTQTELDALDRRVRTLLTANRMHHPHSSVMRLYIPRKCGGRGFLNAKTLHNREVCSLREYFFKADVGMHRDVVAVDNGLTPLSMAKENWRKPVVLTTDDRKEVWQSKALHGRYFRALHEPDVDFLASVSWLRFGDLFGETEGFICAIMDEVILTNNYRRHIMKDGTVDVCRACHRPGESIRHIISGCSRLANGEYLHRHNQVARIIHQQLALKYKLVDSEVPYYKYVPDPVLENDHVTLYWDRSIITDRTIVANKPDIVVIDRLARHAMIVDVTIPHDENLVKAEKEKQIKYLDLAHEVVDMWSVSSAIIVPIVVTANGLMAKSLDQHLSRLSLDGWIKRLIQKAVLLDTARIVRRFLSLQP

SEQ ID NO: 28647 - protein, 1202 aa, Omphaloscelis lunosa
MLTRSAARSARLPPPDSPLSSASPPPVPSPIVNAVSTPAAVVASSSSDEYFSPPTSPTPVRRQGRGRPPRSLGLRGQPAPSRVPAAGGCVQRMRWTQLMNENVMRAYYGSTEGGTNLTAYRVRMLSLFQELEPTVNVSAQRLSDQVRVIQRNHRLDDIALDRLRSEVLSNHIVSTRAQTAAQESNIDPTPPRFNHGVEEDDRVATVSSQCNDRLRSALEDAFREYRYTPTELRPRLPRLPMHKKNRALVCALDSQLTNFFESSEDLIDTHSILYCAAVAACRLANVKFPNYDGATRPKPVVPAWQCRIERRIDGARVLIGKLYCFREGNTRPRVMRFVRRAFLGTGISPQEYMSRVTERIDFLKQKVCAWASRIRRYKRRVDRYTQNRMFQSDERWVYRAWVRPEQNVTDVCRPDDAATSAFWRSIWSVPVCHTEAGWMQDVERVCETIPEMDAVFITPLDVARAVRPLPNWKSPGPDGLHNFWLKWLSSSHTRLASQFQSSLESGLLPQFLTTGVTHLLHKSGNPAELKNYRPIRCLPTVYKLLTSILRTKINTHIDSNSIMSASQNGCRNGSRGTKELLLIDMAISQQVRRSRKDLSTCWIDYKKAYDSVPHTWLMRVLELYKVHTTLRTFLMSCMGQWRTVLRYPGCRQTQGNDEPVWIKRGIFQGDSLSPLWFCLALNPLSTLLEGSGLGYRLRRGGQVISHLLYMDDLKLFAPNKLRLMELLKVTETFSGAIRMEFGVDKCAVMHVKRGEIMESEGTQLSDSIHLRSLSSAENYRYLGMSESLGINVADMKQSLKERFFGRLKKVLISFLSGGNKVRAFNGWVMPVLMYSFGILKWTQTELDALDRRVRTLLTANRMHHPRSSVMRLYIPRKCGGRGFLNAKTLHNREVCSLREYFFKADVGMHRDVVAVDNRLTPLSMAKENWRKPVVLTTDDRKEVWQSKALHGRFYRALHEPGVDFLASVSWLRFGDLFGETEGFICAIMDEVILTNNYRRHIMKDGTVDVCRACHRPGESIRHIISGCSRLANGEYLHRHNQVARIIHQQLALKYKLVDSEVPYYKYVPDPVLENDHVTLYWDRSIITDRTIIANKPDIVVIDRLARRAMIVDVTIPHDENLVKAEKEKQIKYLDLAHEVVDMWNVSSAIIVPIVVTANGLMAESLDQHLSRLSLGGWIKRLIQKAVLLDTARIVRRFLSLQP

SEQ ID NO: 28648 - protein, 1203 aa, Omphaloscelis lunosa
MLTRSAARLARPPPPDSSLSSASPPPVPSPTVSATTTPAAVVASSSSDEYLSPPTSPTPVRRQGRGRPPKSLGLRGQPAPSRVPAAGGCVQRMRWTQSMNENVMRAYYGSTEGGTNLTAYRVRMLSLFQELEPTVNVSAQRLSDQVRVIQRNHRLDDTALDRLRSEVLSNHIVSTQAQTAAQASNNDATPPRFNHGVEEEDDRVATVSSQCNNRLRSALEDAFREYRYTPTELRPRLPRLPMHNKNRALVCALDSQLTNFFESSEDLIDTHSILYCAAVAACRLANVKFPNCDGATRPKPVVPAWQCRIERRIDGARVLIGKLYCFREGNTRPRVMRFVRRAFSGTGISPQDYMSRVTERIDFLKQKVCAWASRIRRYKRRVDRYTQNRVFQSDERWVYRAWERPEQNVTDVCRPDDAATSAFWRSIWSVPVCHTEAGWMQDVERVCETIPVMDAVFITPLDVARAVRPLPNWKSPGPDGLHNFWLKWLSSSHTRLASQFQSSLESGSLPQFLTTGVTHLLHKSGNPAEPKNYRPITCLSTVYKLLTSILRTKINTHIDSNSIMSVSQNGCRNGSRGTKELLLIDMAISQQVRRSRKDLSTCWIDYKKAYDSVPHTWLMRVLELYKVDTTLRTFLMSCMGQWRTVLRYPGCRQTQGNDEPVWIKRGIFQGDSLSPLWFCLALNPLSTLLEDSGLGYRLRRGGQVISHLLYMDDLKLFAPNKLRLMELLKVTETFSGAIRMEFGVDKCAVMHVKRGEIMESEGIQLSDSIHLRSLSSAENYRYLGMSESLGINVADMKQSLKERFFGRLKKVLISFLSGGNKVRAFNGWVMPVLMYSFGILKWTQTELDALDRRVRTLLTANRMHHPRSSVMRLYIPRKCGGRGFLNAKTLHNREVCSLREYFFKADVGMHRDVVAVDNGLTPLSMAKENWRKPVVLTTDDRKEVWQSKALHGRYFRALHEPDVDFLASVSWLRFGDLFGETEGFICAIMDEVILTNNYRRHIMKDGTVDVCRACHRPGESIRHIISGCSRLASGEYLHRHNQVARIIHQQLALKYKLVDSEVPYYKYVPDPVLENDHVTLYWDRSIITDRTIVANKPDIVVIDRLARHAMIVDVTIPHDENLVKAEKEKQIKYLDLAHEVVDMWNVSSAIIVPIVVTANGLMAKSLDQHLSRLSLGGWIKRLIQKAVLLDTARIVRRFLSLQP

SEQ ID NO: 28649 - protein, 1202 aa, Sesamia nonagrioides
MLTRQAARRARSPPPDSPPSTASPPPVPSANVSAVTTPAAVVASSSSDEYFSPPTSPRPVRRQGRGRPPKSLGLRGHPAPSRVPAAGGCVQRMRWTQTINENVMRAYYRATEGGTNLTAYRERMLSLFQALEPTVNVSAQRLSDQVRVIQRNHRLDDIALDRLRSEVLSNQITPTLTQTAAQASIIVAGPPRSNRVEEEDDRVETVSSQYNDRLRNALEDAFRDYRSTPTDLRPRLPRLPMHKKNRALVCALDSLLKNFFESSEDHIDTHSILYCAAVAACRLAKVKFPNCEEAARPKPAVPAWQRRIERRIDGTRVLIGKLYCFRDGNTRPRVMRFVRQAFSGTGISPREYINHLTERIDFLKQKVCAWASRIRRYKRRVDRYTQNRMFQSDERWVYRAWERPEQNEADVCRPDDAATSAFWRGIWSVSVCHTEGNWIRNVEQVCETIPEMDTILITPSDVAAAVRSLPNWKSPGPDGLHNFWLKWLSSSHTCLASQFQSSLESGSLPQFLTTGITHLLHKSGSTAEPKNYRPITCLPTVYKVLTSILKAKINKHLNSNSIMSVSQNGCKSGSRGTKELLLIDMAISQQVRRSRKDLSTCWIDYKKAYDSVPHTWLMRVLELYKINATLRTFLRSCMGQWKTALHYPGSRQIQGNDEPVWIKRGIFQGDSLSPVWFCLALNPLSTLLENSGLGYRLRRGGQVISHLLYMDDLKLFAPNELHLMKLLNVTETFSSGIRMEFGVDKCAVMHVKQGEIMESEGITLPDSIHLRSLSSFESYKYLGMSEALGINDADMKQSLKERFFGRLKKVLNSLLSGGNKVRAFNGWVMPVLMYSFGILKWTQTELDALDRRVRTLLTANRMHHPRSSVMRLYIPRKCGGRGFLNARTLHNREVCSLREYFLQTVVGMHHDVVTVDKGLTPLSMAKENWHKPIILTTDDRRKVWQSKELHGRFYRALHEPDVDFLASVSWLRFSDLFGETEGFVCAIMDEVILTNNYRRYIMKDGTIDVCRACHHPGESIRHIISGCSRLANSEYLHRHNQVARIIHQQLALKYKLVDSEVPYYKYVPDPVLENDHVTLYWDRSIITDRTIVANKPDIVVIDRLARLAMIVDVTIPHDGNLVKAEKEKKIKYLDLAHEVVDMWNVNSAVIVPIVVSANGLIAKSLDQHLLRLALGSWIKGLIQKAVLLDTARIVRRFLSLEP

SEQ ID NO: 28650 - protein, 1202 aa, Sesamia nonagrioides
MLTRAAKRRARPPPPDSSLSTASPPPVSSATVNAVRTPAVVVASSSSDEYFSPPTSPTPVRRQGRGRPPKSLGLRGHPAPSQVPAAGGCVQRMRWTQTMNENVMRAYYGATEGGTNLTAYRERMLSLFQALEPTVNISAQRLSDQVRVIQRNHRLDDIALDRLRSEVLSNQIAPTLTQTAVQASIIDAVPPRSNRVEEEDDRVETVSSQYNDRLRSALEDAFRDYRSTPTNLRPRLPRLPMHKKNRALVCALDSQLKNFFESSEDLIDTHSILYCAAVAACRLAKVKFPNCEEATRPKLAVPAWQRRIERRIDGTRVLIGKLYCFREGNTRPRVMRFVRQAFSGTGISPREYINNVTERIDFLKQKVCAWASRIRRYKKRVDRYTQNRMFQSDERWVYRAWERPEQNEADECRPDDATTSAFWRGIWSVSVCHTEGDWTQDVEQVCEAIPEMDNILITPLDVATAVRSLPNWKSPGPDGLHNFWLKWLSSSHTCLASQFQSSLESGSLPQFLTTGITHLLHKSGSTAEPKNYRPITCLPTVYKVLTSILKAKINNHLDSNSIMSVSQNGCRSGSRGTKELLLIDMAISQQVRRSRKDLSTCWIDYKKAYDSVPHTWLMRVLELYKINATLRTFLRSCMGQWKTVLRYPGSRQIQGNDEPVWIKRGIFQGDSLSPLWFCLALNPLSTLLEDSGLGYRLKRGGQVISHLLYMDDLKLFAPNKLHLMKLLNVTETFSSGIKMEFGVDKCAVMHVKRGQIMESEGITLPDSIHLRSLSSIESYKYLGMSEALGINDADMKQSLKERFFGRLKKVLNSLLSGGNKVRAFNGWVMPVLMYSFGILKWTQTELDALDRRVRTLLTANRMHHPRSSVMRLYIPRKCGGRGFLNAKTLHNREVFSLREYFLKTVVGMHHDVVTVDKGLTPLSMAKENWHKPIILTTDDRKMVWQSKELHGRFYRALHGPDVDFLASVSWLRFGDLFGETEGFVCAIMDEVILTNNYRRYIMKDGTIDVCRACHHPGESIRHIISGCSRLANSEYLHRHNQVARIIHQQLALKYKLVDSEVPYYKYVPDPVLENDHVTLYWDRSIITDRTIVANKPDIVVIDRLARLAMIVDVTIPHDGNLVKAEKEKQMKYLDLAHEVVDMWNVNSAVIVPIVVSANGLIAKSLDQHLLRLSLGSWIKGLIQKAVLLDTARIVRRFLSLEP

SEQ ID NO: 28651 - protein, 1202 aa, Sesamia nonagrioides
MLTRSATRKARPPPPDSLLSSASPPPVSSPIVNAVTTSAAAVASSSSDEYFSPPTSPTPVRRQGRGRPPKSLGLRGHPAPSRVPAVGGCVQRMRWSQTMNENVMRAYYGATEGGTNLTAYRERMLSLFQALEPTVNVSAQRLSDQVRVIQRNHRLDDTALDRLRSEVLSNQIAPTLTQTAALASIIDAVPPRSNRVEEEDDGVETVSSQYNDRLRSTLEDAFREYRFTPTDLRPRLPRLPMHKKNRALVSALDSQLKNVFESSEDLIDTHSILFCGAVAACRLANIKFPNCDEANRPRPAVPAWQHRIERRIDGARVLIGKLYCFREGNTRPRVMRFVRQAFSGTGISPREYISHVTERIDFLKQKVCAWASRIRRYKRRVDRYTQNRMFQSDERWVYRAWERTEQNEADVCRPDDAATSAFWRSIWSVPVCHAEGDWIQDVEQVCEMIPEMDTILITPIDVATAVRSLPNWKSPGPDGLHNFWLKWLSSSHTCLASQFQSSLESGSLPQFLTTGITHLLHKSGSTAEPNNYRPITCLPTVYKVLTSILKAKINKHLDSNSIMSVSQNGCRSGSRGTKELLLIDMAISQQVRRSRKDLSTCWIDYKKAYDSVPHTWLMRVLELYKVNATLRTFLRSCMGQWKTVLRYPGSRRIQGNDEPVWIKRGIFQGDSLSPLWFCLALNPLSTLLEDSGLGYRLRRGGQVISHLLYMDDLKLFAPNKLHLMKLLNVTETFSSGIKMEFGVDKCAVMHAKRGQIMESEGITLPDSIHLRSLSSVESYKYLGMSEALGINDADMKQSLKERFFGRLKKVLKSLLSGGNKVRAFNGWVMPVLMYSFGILKWTQTELDALDRRVRTLLTANRMHHPRSSVMRLYIPRKCGGRGFLNAKTLHNREVCSLREHFFKTVVGMHQDVVTVDKGLTPLSMAKENWHKPIILTTNDRKMIWQSKELHGRFYRALHEPDVDFLASVSWLRFSDLFGETEGFVCAIMDEVILTNNYRRYIMRDGTIDVCRACHHPGESIRHIISGCSRLANGEYLHRHNQVARIIHQQLALKYKLVDSEVPYYKYVPDPVLENDHATLYWDRSIITDRTIVANKPDIVVIDRLARLAMIVDVTIPHDGNLVKAEKEKQIKYLDLAHEVVDMWNVNSAVIVPIVVSANGLIAKSLDQHLLRLSLGSWIKGLIQKAVLLDTARIVRRFLSLEP

SEQ ID NO: 28652 - protein, 1199 aa, Mamestra configurata
MLTRAASRRARPPSPDPSLSSASPPPDSRSPMSPAVAVASSSSDEYFSPPTSPTPVRRQRRGRPPRGLGPRGQPAPSRVPATGGCVQRMRWTQSMNENVMRAYYGSTEGGTNLTAYRVRMLSLFQDLEPTVNVSAQRLSDQVRVIQRNHRLDDAALDRLRSEVLNNLIISTPTQTAVQAPVNGRITPRPNNVSDEVDDRVVTVSSQCNDRLRSALEDALREYRSTPTELRPRLPRLPMHKKNRALVCALDSLLQNIFESSESLVDTHSILYCGAVAACRIANVKFPGCDEAIRPKPAAPAWQRRIERRIDETRALIGKLYCFREGNTRPRVMRFVRRAFSGTEISPRDFTSRVTERIDFLKQKVCAWASRIRRYKRRVDRYSQNRMFQSDERWVYRAWERPEQSVTDVCRPDDVATSIFWRSIWSVPICHAEGGWMRDVERVCEAIPQMEKITITTLDVAKAVRPLPNWKSPGPDGLHNFWLKWYSSSHALLASQFQSSLDSGSLPQFLTTGVTHLLHKTGSPTEPKNYRPITCLSTVYKLLTSILRAKINEHIESNSIMSASQNGCRKGSRGTKELLLIDMAISQQVRRSRKDLSTCWIDYKKAYDSVPHTWLMKVLELYKIDATLRTFLESCMRQWKTVLRYPGCRPIQGSDEPVWIKRGIFQGDSLSPLWFCLALNPLSTLLEDSGLGYRLRRGGQAISHLLYMDDLKLFAPNNLRLMELLKVTETFSSAIRMEFGVDKCAVMHVKKGEIMESEGIQLSDSIQVRSLSSTETYKYLGMSEALGINGTDMKQSLRERFFGRLKKVLNSLLSGGNKVRAFNGWVMPVLMYTFGILKWTQTELDALDRRVRTLLTANRMHHPRSSVMRLYIPRKCGGRGFLNAKTLHNREMCSLREYFLKADVGMHRDVVAVDKGLTPLSMAKENWRTPVILTTDDRKEVWKGKELHGRFYRALHGSDVDFSASVAWLRFGDLFGETEGFVCAIMDEVILTNNYRRHIMKDGTVDMCRACHRPGESIRHIISGCSRLANGEYLHRHNQVARIIHQQLALKYKLVDSEVPYYKYVPDPVLENDHVTLYWDRSIITDRTIVANKPDIVVIDRLARRTMIIDVTIPHDVNLVKAEKEKQIKYLDLAHEVVDMWNVDSAVIVPIVVTANGLFSKSFDDHLSKLSLRGWVKGQIQKAVLLDTARIVRRFLSLEP

SEQ ID NO: 28653 - protein, 1187 aa, Mythimna ferrago
MLTRATARRARHPPPGSSLSSASPPPDPGSPVSPAAAVASSSSDEYFSPPTSPTPVRRPGRGRPPKSMGSRGQPAPSRVPAAGGCVQRMRWTQSMNENVMRAYYGSTEGGTNLTALTVNVSAQRLSDQVRVIQRNHRLDDAALDRLRSEILSNQIVSTSTQTQTAAMPTTNAISPRSDHNNDDADDRVVTVSSQCNERLRSALEDALCEYMSTPTELRPRLPRLPMHKKNRALVCALDSLLKNIFESSENLVDTHSILYCGAVAACRLAKIKFPNIDGTIRPKTAVPAWQCRIERHIDEARVLIGKLHCFREGNTRPRVMRFVRRAFLGTGISPQGYMSRVTERIDFLKQKVCAWASRIRRYKRRVDRYSQNRMFQSDERWVYRAWKRPEHSVTDECRPDDLATITFWRNIWSVPVSHTEGGWMRDVERVCEAIPEMEKVTITPEDVARAVRPLPNWKSPGPDGLQNFWLKWYSSSHAPLASQFQSILESGSLPEYLTTGVTHLLHKTGNPVDPKNYRPITCLSTVYKLLTSILRAKINIHIENNQIISPSQNGCRNGSRGTKELLLIDMAISQQTRRSRKDLSTCWIDYKKAYDSVPHTWLMRVLELYKIDITLRTFLESCMRQWKTVLRYPGCRPIQGNDEPIWIKRGIFQGDSLSPLWFCLALNPLSTLLEDSGLGYRLRRGGQVISHLLYMDDLKLFAPSNLQLMELLKVTETFSSAIRMEFGVDKCAGMHVKRGEIMESEGIQLPDSIHLRSLSSTETYRYLGMSEALGINNADMKQSLKERFFGRLKKVLNSLLSGGNKMRAFNGWVMPVLMYSFGILKWTQTELDALDRRVRTLLTANRMHHPRSSVMRLYIPRKCGGRGFLNAKTLHNREVCSLREYFLKTDVGMHRDVVAVDKGLTPLSMAKEDWHKPVIMTTDNRMEIWKGKELHGRFFRAFHEPDVDFLASVAWLRFSDLFGETEGFVCAIMDEVILTNNYRRYIMKDGTVDVCRACHRPGESIRHIISGCSRLANGEYLHRHNQVARIIHQQLALKYNLVDLEVPYYKYVPDPVLENDHVTLYWDRSIITDRTIVANKPDIVVIDRLARRAMIVDVTIPHDENLVKAEKEKQIKYLDLAHEVVDMWNVDSAIIVPIVVTVNGLIAKSFDDHLSKLSLRGWIKGLIQKAVLLDTARVVRRFLSLEP

SEQ ID NO: 28654 - protein, 868 aa, Hydraecia micacea
MRFVKRAFSGTGISPREYISHVTERIDFLKQKVCAWASRIRRYKRRIDRYTQNRMFQSDERWVYRAWERPEQNKTDVCRPDDAATSAFWRSIWSVPVCHTEAGWIQDVERVCETVPEMETVLITPLDVARAVRPLPNWKSPGPDGLHNFWLKWLNSSHTCLASQFQSSLESGSLPQFLTTGVTHLLHKSCSPAEPKNYRPITCLSTVYKLLTSILRAKINTHIENNSIMSASQNGCRNGSRGTKELLLIDMAISQQVRRSRKDLSTCWIDYKKAYDSVPHTWLMRVLELYKIDATLRTFLESCMGQWKTVLRYPGCRQIQGNDEPVWIKRGIFQGDSLSPLWFCLALNPLSTLLEDSGLGYRLRRGGQVISHLLYMDDLKLFAPTRLHLMELLKVTETFSSAIRMEFGVDKCAVMHVKRGEIMESEGIQFSDSINLRSLSSSESYKYLGMSEALGINVTEMKQSLKERFFCRLRKVLISLLSGGNKVRAFNGWVMPVLMYSFGILKWTQTELDALDRRVRTLLTANRMHHPRSSVMRLYIPRKCGGRGFLNAKTLHNREVCSLREYFLKAEVGMHRDVVAVDKGLTPLSMAKENWRKPVVLTTDDRKKVWQSKELHGRFYRALHEPGVDFLASVSWLRFGDLFGETEGFVCAIMDEVILTNNYRRHIMKDGTVDVCRACHRPGESIRHIISGCSRLANGEYLHRHNQVARIIHQQLALKYKLVDSEVPYYKYVPDPVLENDHVTLYWDRSIITDRTIVANKPDIVVIDRLARRTMIVDVTIPHDGNLVKAEKEKQMKYLDLAHEVVDMWNVSSAVIVPIVVSANGLMAEGLDEHLSRLSLGGWIKSLIQKAVLLDTARIVRRFLSLEP

SEQ ID NO: 28655 - protein, 868 aa, Noctua pronuba
MRFVRRAFSGTGISPQEYMSRVTERIDFLKQKVYAWANRIRRYKRWVDRYSQNRMFQSDERWVYRAWERPEQNMTDVCRPDDATTSSFWSSIWSVPVCHTEGDWMRAVERVCEPIPEMEPILITSLDVARSVRPLLNWKSPGPDGLHNFWLKWLSSSHTCLASQFQSSLESGALPQFLTTGVTHLLHKSGNPAEPKNYRPITCLSTVCKLLTSILRAKINTHIDKNSIMSASQNGCRNGSRGTKELLLIDMAISQQVRRSRKDLSTCWIDYKKAYDSVPHTWLMRVLELYKIDATLRTFLESCMGQWRTVLRYPGCRQIQGNDEPVWIKRGIFQGDSLSPLWFCLALNPLSTLLEDSGLGYRLRRGGQVISHLLYMDDLKLFAPNKLRLMELLKVTETFSSAIRMEFGVDKCAVMYVKRGEIMESEGIQLSDSIHLRSLSSSESYKYLGMSEALGINVTDMKQLLRERFFGRLKKVLNSLLSGGNKVRAFNGWVMPVLMYSFGILKWTQTELDALDRRVRTLLTANRMHHPRSSVMRLYIPRKCGGRGFLNAKTLHNRELCSLREYFFKAEVGMHRDVVAVDKGLTPLSMAKENWRKPVVLTTDDRKEVWQGKELHGRFYRALHGPDVDFLASVSWLRFGDLFGETEGFVCAIMDEVMLTNNYRKYIMKDGTVDVCRACHRPGESIRHIISGCSRLANGEYLHRHNQVARIIHQQLALKYKLVESEVPYYKYVPDPVLEKDHVTLYWDRSIITDRTIVANKPDIVVIDRSARRVMIVDVTIPHDENLVKAEKEKQIKYLDLAHEVVDMWNVNSAIIVPIVVTANGLMAKSLDDHLSRLSLGGWIKGLIQKAVLLDTARIVRRFLSLEP

SEQ ID NO: 28656 - protein, 1080 aa, Ochropleura plecta
MLSLFQDLEPTINVSAQRLSDQVRVIQRNHLLDDAALDRLRSEVLSNRVILTTPQTAVQASAIDVTQPRSNPAVVEEDDRVATVSSQCNDRLRSALEDALRDYRSTPAELRPRLPRLPMHKKNRALVCALDSQLKNLFESSEDLVDTHSILYCGAVAVCRLANVKFPNCDVATRPKPSVPAWQCRIERRIDEARALIGKLYCFREGNTRPRVMRFVRRAFSGTGISPQEYMSRTTERIDFLKQKVYAWANRIQRYKRRVDRYSQNRMFRSDERWVYRAWERPEQSVTDVCRPDDVATSSFWHSIWSVRVCHTEAGWMRDVERVCETIPEMEPILITSLDIASAVRPLPNWKSPGPDGLHNFWLKWLSSSHTRLASQFQSCLESGSLPQFLTTGVTHLLYKSGSPAEPKNYRPITCLSTVYKLLTSILRAKINSHIVKNSIISASQNGCRNGSRGTKELLLIDMAISQQVRRSRKDLSTCWIDYKKAYDSVPHTWLKRVLELYKIDTTLRTFLESCMGQWRTVLRYPGCRQIQGNDEPVWIKRGIFQGDSLSPLWFCLALNPLSTLLEDSGLGYRLRRGGQVISHLFYMDDLKLFAPNKLRLMELLKVTETFSNAIRMEFGVDKCAVMYVKRGEIMESEGIHLSDSIHLRSLSSSESYKYLGMSEALGINVADMKQLLRERFFGRLKKVLKSLLSGGNKVRAFNSWVMPVLMYSFGILKWTQTELDALDRRVRTLLTANRMHHPRSSVMRLYIPRKCGGRGFLNAKTLHNREVCSLREYFLKTDVGMHRDVVAVDKGLTPLSMAKENWRKPVVLTTDYRKEVWQGKELHGRFYKALHGPDVDFLASVSWLRFGDLFGETEGFVCAIMDEVMLTNNYRKYIMKDGTVDVCRACHRPGESIRHIISGCSRLANGEYLHRHNQVARIIHQQLALKYNLVESEVPYYKYVPDPVLEKDHVTLYWDRSIITDRTIVANKPDIVVIDRSARRVMIIDVTIPHDENLVKAEKEKQLKYLDLAHEVVDMWNVNSAIIVPIVITANGLIAKSLDEHLSKLSLGGWIKGLIQKAVLLNTARIVRRFLSLEP

SEQ ID NO: 28657 - protein, 1199 aa, Hecatera dysodea
MLTRAATLRARHPPPGSPLSSASPPPDIESQVSPAVAVASSSSDEYFSPPTSPPPVRRQGRGRPPRGLGPRGQPAPSRVPATGGCVQRMRWTQSMNENVMRAYYGSTEGGINLTAYRVRMLSLFQDLEPTVNVSAQRLSDQVRVIQRSHRLDEAALDRLRSEVLNNLIISTPTQTAVQAPGSGAIIPRPIHVCDEVVDRVVTVSSQCNDRLRSALEDALREYRSTPTELRPRLPRLPMHKKNRALVCALDSLLKNIFESSENLVDTHSILYCGAVAACRVANVKFSNSDGATRPKNAAPAWQCRIERRIDEARVLIGKLYCFREGNTRPRVMRFVRRAFLGTEISPQEYMSRVTERIDFLKQKVCAWANRIRRYKRRVDRYSQNRIFQSDERWVYRAWERPEQSVTDVCRPDDVTTNTFWRSIWSVPVCHAEGGWMRDVERVCEAIPQMEKITITTVDIATAVRPLPNWKSPGPDGLHNFWLKWYSSSHALLASQFQSSLDSGSLPQFLTTGVTHLLHKTGSPAEPKNYRPITCLSTVYKLLTSILRVKINEHIESNSIMSYSQNGCRKGSRGTKELLLIDMAISQQVRRSRKDLSTCWIDYKKAYDSVPHTWLLKVLELYKVDATLRTFLESCMRQWKTVLRYPGCRPIQGNEEPVWIKRGIFQGDSLSPLWFCLALNPLSTLLEDSGLGYRLRRGGQTISHLLYMDDLKLFAPNNLRLMELLKVTETFSSAIRMEFGVDKCAVMHVKKGEIMESEGIQLSDSIQVRSLSSTETYKYLGMSEALGINGADMKQSLKERFFGRLKKVLNSLLSGGNKVRAFNGWVMPVLMYSFGILKWTQTELDALDRRVRTLLTANRMHHPRSSVMRLYIPRKCGGRGFLNAKTLHNREMCSLREYFLKADVGMHRDVVAVDKGLTPLSMANENWRKPVIHTTDDRKEVWKGKELHGRFYRALYGSDVDFSASVAWLRFGDLFGETEGFVCAIMDEVILTNNYRRHIMKDGTVDVCRACHRPGESIRHIISGCSRLANGEYLHRHNQVARIIHQQLALKYKLVDSEVPYYKYVPDPVLENDHVTLYWDRSIITDRTIIANKPDIVVIDRLARRTMIIDVTIPHDENLVKAEKEKQIKYLDLAHEVVDMWNVDSAVIVPIVVTANGLMAKSFDEHLSKLALHGWLKGLIQKAVLLDTARIVRRFLSLEP

SEQ ID NO: 28658 - protein, 1112 aa, Mythimna impura
MRWTQSMNENVMRAYYGSTEGGTNLTAYRVRMLSLFRELEPTVNVTTQRLSDQVRVIQRNHRLDDAALDRLRSEVLSNRIISTPIQTQTAAPRATDATLPQSNYVDDEADDRVVTVSSQCNDRLRSALEDALREYRSTPIALRPRLPRLPMHKKNRALVCALDSLLENVFESSVNLADTHSILYCGAIAACRLANVKLPSCDGTTRPKPAAPAWQCRIERRIDGARALIGKLYCFREGNTRPRVMRYVRRAFSGTGISSREYLSRVTERIDFLKQKVCAWANRIRRYKRRVDRYSQNRMFQSDERWVYRAWQRPEQNVTDVTRLDAVATNTFWRNIWSVPVCHTEDGWMREVERVCEAIPEMEKVVISPIDVARAVRPLPNWKSPGPDGLQNFWLKWYSSSHALLASQFQSSLESGSLPQFLTTGVTHLLHKTGSTAEPKNYRPITCLSTVYKLLTSILRTKINKHIDTNSIMSASQNGCRNGSRGTKELLLIDMAISQQVRRSRKDLSTCWIDYKKAYDSVPHTWLMRVLELYKIDATLRTFLESCMGQWNTVLRYPGCRSIWRDDAPIWIKRGIFQGDSLSPLWFCLALNPLSTLLEESGLGYLLRRGGQVLSHLLYMDDLKLIAPNKLRLMELLKVTETFSSAIRMEFGVDECAVMHVKRGEIMESEGIQLSDSIYLKSLSSTETYKYLGMSEALGINVADMKQSLKERFFDRLKKVLNSLLSGGNKVRAFNGWVMPVLMYSFGILKWTQTELDALDRRVRTLLTANRMHHPRSSVMRLYIPRKCGGRGFLNAKTLHNREVCSLREYFHKTDVGMHRDVVAVDKGLTPLSMAKENWRKPVILTTDDRREVWKSKELHGRFYRALHYSDVDFAASVAWLRFSNLFGETEGFICAIMDEVILTNNYRRYIIKDGTVDVCRACHRPGESIRHIISGCSRLANGEYLHRHNQVARIIHQQLALKYNLVYSEVPYYSYVPDPVLENDHVTLYWDRSIITDRTIVANKPDIVVIDRLARRAMIVDVTIPHDENLVKAEKEKQIKYLDLAHEVVDMWNVDSAIIVPIVVTANGLMAKSLDDHLSKLSLRGWIKGLIQKAVLLDTARIVRRFLSLQP

SEQ ID NO: 28659 - protein, 1196 aa, Mythimna impura
MLTRTAARRARHPPPGSPLSSASPPPVLGSPMSPATAFASSSSDEYFSPPTSPTPVRRPGRGRPPKSLGPRGQPAPSRVPAAGGCVQRMRWTQSMNENVMCAYYGSTEGGTNLTAYRVRMLSLFQELEPTVNVTTQRLSDQVRVIQRNHRLDDAALDRLRSEVLSNRIISTPIQTQTAAPRATDATLPQSNHVDDRVVTVSSQCNDRLRSALEDALREYRSTPIALRPRLPRLPMHKKNRALVCALDSLLENVFESSVNLADTHSILYCGAIAACRLANVKLPSCDGATRPKPAAPAWQCRIERRIDGARALIGKLYCFREGNTRPRVMRYVRRAFSGTGISPPEYLSRVTERIDFLKQKVCAWANRIRRYKRRVDRYSQNRMFQSDERWVYRAWERPEQNVTDVTRPDAVATNTFWRNIWSVPVCHTEGGWMREVERVCEAIPEMEKVIISPTDVARAVRPLPNWKSPGPDGLQNFWLKWYSSSHALLASQFQSSLESGSLPQFLTTGVTHLLHKTGSTAEPKNYRPITCLSTVYKLLTSILRTKINQHIDNNSIMSASQNGCRNGSRGTKELLLIDMAISQQVRRSRKDLSTCWIDYKKAYDSVPHIWLMRVLELYKIDATLRTFLESCMRQWNTVLRYPGCRSIRRDDEPIWIKRGIFQGDSLSPLWFCLALNPLSTLLEESGLGYRLRRGGQVLSHLLYMDDLKLIAPNKLRLMELLKVTETFSSAIRMEFGVDKCAVMHVKRGEIMESEGIQLSDSIYLKSLSSTETYKYLGMSEALGINAADMKQSLKERFFDRLKKVLNSLLSGGNKVRAFNGWVMPVLMYSFGILKWTQTELDALDRRVRTLLTANRMHHPRSSVMRLYIPRKCGGRGFLNAKTLHNREVCSLREYFHKTDVGMHRDVVAVDKGLTPLSMAKENWRKPVILTTDDRRKVWKSKELHGRFYRALHDSDVDFAASVAWLRFSNLFGETEGFICAIMDEVILTNNYRRYIMKDGTVDVCRACHRPGESIRHIVSGCSRLANGEYLHRHNQVARIIHQQLALKYNLVYSEVPYYSYVPDPVLENDHVTLYWDRSIITDRTIVANKSHIVVIDRLARRTMIVDVTIPHDENLVKAEKEKQIKYLDLAHEVVDMWNVDSAIIVPIVVTANGLMAKSLDDHLSKLSLRGWIKGLIQKAILLDTARIVRRFLSLQP

SEQ ID NO: 28660 - protein, 1199 aa, Phlogophora meticulosa
MITRAATRRARPPSPDSPLSSASPPPDLGSPVTPAVAAASSSSDEYFSPPTSPTPVRRQGRGRPPKSLGSRGQPAPSQVPATGGCVQRMRWTQSMNENVMRAYYGSTEGGTNLTAYRVRMLSLFQGFEPTVNVSAQRLSDQVRVIQRNHRLDDAALDRLRSEMLSNHIVLTSTQTAVQAPAFNPILPRSNHVSNEADDRVDTVCSQYNDRLRSALEDALREYRSTPTELRPRLPRLPMHRKNRALVCALDSLLKNFFESSEDLVDTHSILYCAAVAACRLANVKFPKNDLAIRPKPAVPAWQSRIERRIDGARVLIGKLYCFREGNTRPRVMRFVRRAFSGTGISPREYMSRIVERIDFLKQKVCAWANRIRRYKRRVDRYSQNRMFQSDERWVYRAWERPEQDVAGEHRPDDVATNAFWRSIWSVPAHHVEARWMSDYESVCETIPEMEKIIITPEDVATAVRPVPNWKSPGPDGLHNFWLKWLSSSHTRLASQFQSCLESGSLPQFLTTGITHLLYKSGSTTEPKNYRPITCLSTVYKLLTSILRAKITEHIVGNSIMSASQNGCRNGSRGTKELLLIDMAISQQVRRSRKDLSTCWIDYKKAYDSVPHAWLTRVLELYKIDATLRTFLASCMGQWKTVLRYPGCRQIQGNDESIWIKRGIFQGDSLSPLWFCLALNPLSTLLEDSGLGYRLKRGGQVISHLLYMDDLKLFAPNNLRLMELLKITESFSSAIRMEFGVDKCAVMHVKRGEIVESEGIQLSDSIHLRSLSSSENYKYLGMSEALGINATDMKQSLKERFFGRLKKVLNCLLSGGNKVRAFNGWVMPVLMYSFGILKWTQTELDALDRRVRTLLTANRMHHPRSSVMRLYIPRKCGGRGFLNAKTLHNREVCNLRDYFLKTEVGMHRDVVAVDKGLTPLSMAKENWRKPVVLTTDDRKQVWQSKELHGRFYRALHGPDVDFLASVSWLRFGDLFGETEGFVCAIMDEVILTNNYRKHIMKDGTVDMCRACHRPGESIRHIISGCSRLANSEYLHRHNQVARIIHQQLALRYKLVESEVPYYKYVPDPVLEDDHITLYWDRSIITDRTIVANKPDIVVIDRLARRAMIVDVTIPHDENLVKAEKEKQIKYLDLAHEVVDMWNVDSAVIVPIVVTANGLLAKSLDDHLSRLSLHGWIKGLIQKAVLLDTARIVRRFLSLQP

SEQ ID NO: 28661 - protein, 1202 aa, Cosmia trapezina
MLTRSAARARPPPPDSSLSSASPPPVSSPTVSAVTTPAAVVASSSSDEYFSPPTSPIPVRRQGRGRPPKSLGLGGQPAPSRVPAAGGCVQRMRWTQSMNENVMRAYYGSTEGGTNLTAYRVRMLSLFQELEPTVNVSAQRLSDQVRVIQRNHRLDDAALDRLRSEILSDRIVSTQAQTAVQDSIIDALPPRSNHVVEEEDDRVATVSSQSNDRLRSALEDAFREYRSTPTELRPRLPRLPMHKKNRALVCALDSHLKDFFESSEDLVDTHSILYCAAVAACRLANVKFPNCDGANRSKPAVPAWQCRIERRIDGARVLIGKLYCFREGNTRPRVMRFVRRAFSGTGISPPEYMSRVTERIDFLKQKVCAWASRIRRYKRRVDRYTQNRMFQSDERWVYRAWERPEQNVTDVCRPDDAATSAFWRSIWSVPVCHAEAGWMQDVERVCETIPEMETVLITPLDVARAVRPFPNWKSPGPDGLHNFWLKWLISSHTCLASQFQSSLESGSLPQFLTTGVTHLLHKSGSPVEPKNYRPITCLSTVYKLLTSILRAKINTHIASNSIISASQNGCRTGSRGTKELLLIDMAISQQVRRSRKDLSTCWIDYKKAYDSVPHTWLLKVLELYKIDATLRTFLESCMGQWRTVLRYPGCQQIRGSDEPVWIKRGIFQGDSLSPLWFCLALNPLSTLLEDSGLGYRLRRGGQVISHLLYMDDLKLFAPNELRLMELLKVTETFSGAIRMEFGVDKCAVMHVKRGEIMESEGIQLTDSIYLRSLSSSETYKYLGMSEALGINVADVKQSLKERFFGRLKKVLISLLSGGNKVRAFNGWVMPVLMYSFGILKWTQTELDALDRRVRTLLTANRMHHPRSSVMRLYIPRKCGGRGFLNAKTLHNREVCSLREYFLKADVGMHRDVVAVDKGLTPLSMAKENWRKPVLLTTDDRRKVWQSKELHGRFYRALHEPGVDFLASVSWLRFSDLFGETEGFVCAIMDEVILTNNYRRYIMKDGTVDVCRACHRPGESIRHIISGCSRLANGEYLHRHNQVARIIHQQLALKYKLVDSEVPYYKYVPDPVLENDHVTLYWDRSIITDRTIVANKPDIVVIDRLARRAMIVDVTIPHDGNLVKAEKEKQIKYLDLAHEVVDMWNVDSAVIVPIVVTANGLIADSLDQHLSRLSLGGWIKGQIQKAVLLDTARIVRRFLSLQP

SEQ ID NO: 28662 - protein, 1199 aa, Mamestra brassicae
MITRAAARRAHPPPPGSSLSSASPTPDIGSQVSPVVAVASSSSDEYFSPPTSPTPVRRQGRGRPPRSLGSRGQPAPSRVPAAGGCVQRMRWTQSMNENVMRAYYGSTEGGTNLTAYRVRMLSLFQDLEPTVNVSAQRLSDQVRVIQHNCRLDDAALERLRSEVLSNLIISTPTQTVVQAPASGAITPRPNNGSDEVDDRVVTVSSQCNDRLRSALEDALREYRLTPTELRPRLPRLPMHKKNRALVCALDSLLQNIFESSESFVDTHSILFCGAVAACRIANVKFPSCDEAIRPKPAAPAWQCRIERRIDEARALIGKLYCFREGNTRPRVMRFVRRAFSGTGISPREYTFRVTERIDFLKQKVCAWANRIRRYKRRVDRYSQNRMFQSDERWVYRAWERPEQSVTDVYRPDDVATSTFWRSIWSVPICHAEGGWMRDVERVCEAIPQMEKITITTLDIAKAVRPLPNWKSPGPDGLHNFWLKWYSSSHALLASQFQSSLESGSLPQFLTTGITHLLHKTGSPAEPKNYRPITCLSTVYKLLTSILRAKINEHIESNSIMSASQNGCRKGSRGTKELLLIDMAISQQVRRSRKDLSTCWIDYKKAYDSVPHTWLMKVLELYKIDATLRTFLESCMRQWKTVLRYPGCQPIQGSDEPVWIKRGIFQGDSLSPLWFCLALNPLSTLLEDSGLGYRLRRGGQAISHLLYMDDLKLFAPNNLRLMELLKVTETFSSAIRMEFGVDKCAVMHVKKGEIMESEGIQLSDSIQVRSLSSTESYKYLGMSEALGINGTDMKQSLRERFFGRLKKVLNSLLSGGNKVRAFNGWVMPVLMYTFGILKWTQTELDALDRRVRTLLTANRMHHPRSSVMRLYIPRKCGGRGFLNAKTLHNREMCSLREYFLKADVGMHRDVVAVDKGLTPLSMAKENWRKPVILTTDDRKEVWKGKELHGRFYRALYGSDVDFSASVAWLRFGDLFGETEGFVCAIMDEVILTNNYRKHIMKDGTVDVCRACHRPGESIRHIISGCSRLANGEYLHRHNQVARLIHQQLALKYKLVDSEVPYYKYVPDPVLENDHVTLYWDRSIITDRTIVANKPDIVVIDRLARRTMIIDVTIPHDENLVKAEKEKQIKYLDLAHEVVDMWNVDSAVIVPIVITANGLMAKSFDDHLSKLALRGWIKGLIQKAVLLDTARIVRRFLSLEP

SEQ ID NO: 28663 - protein, 1199 aa, Mamestra brassicae
MLTRAALQRARPPPPDPSLSSASPPPDIGSPLSPAVAVASSSSDEYFSPPTSPTPVRRQGRGRPPRGLGPRGQPAPSRVPATGGCVQRMRWTQSMNENVMRAYYGSTEGGTNLTAYRVRMLSLFQDLEPTVNVSAQRLSDQVRVIQRNHRLDDAALDKLRSEVLNNLIISTPTQTAVQAPVNGSITPRPNNVSDEVDDRVVTVSSQCNDRLRSALEDALREYRSTPTELRPRLPRLPMHKKNRALVCALDSLLQNIFESSESLVDTHSILYCGAVAACRIANVKFPGCDEAIRPKPAAPAWQRRIERRIDETRALIGKLYCFREGNTRPRVMRFVRRAFSGTEISPRDFTSRVTERIDFLKQKVCAWASRIRRYKRRVDRYSQNRMFQSDERWVYRAWERPEQSVTDVCRPDDVATSIFWRSIWSVPICHAEGGWMRDVERVCEAIPQMEKITITTLDVAKAVRPLPNWKSPGPDGLHNFWLKWYSSSHALLASQFQSSLDSGSLPQFLTTGVTHLLHKTGSPTEPKNYRPITCLSTVYKLLTSILRAKINEHIESNSIMSASQNGCRKGSRGTKELLLIDMTIIQQVRRSRKDLSTCWIDYKKAYDSVPHTWLMKVLELYKIDATLRTFLESCMRQWKTVLRYPGCRPIQGSDEPVWIKRGIFQGDSLSPLWFCLALNPLSTLLEDSGLGYRLRRGGQAISHLLYMDDLKLFAPNNLRLMELLKVTETFSSAIRMEFGVDKCAVMHVKKGEIMESEGIHLSDSIQVRSLSSTETYKYLGMLEALGINGTDMKQSLRKRFFGRLKKVLNSLLSGGNKVRAFNGWVMPVLMYTFGILKWTQTELDALDRRVRTLLTANRMHHPRSSVMRLYIPWKCGGRGFLNAKTLHNREMCSLREYFLKADVGMHRDVVAVDKGLTPLSMAKENWRTPVILTTDDRKEVWKGKELHGRFYRALHGSDVDFSASVAWLRFGDLFGETKGFVCAIMDEVILTNNYRRHIMKDGTVDMCRACHRPGESIRHIISGCSRLANGEYLHRHNQVARIIHQQLALKYNLVDSEVPYYKYVPDPVLENDHVTLYWDRSIITDRTIVANKPDIVVIDRLARRTMIIDVTIPHDENLVKAEKEKQIKYLDLAHEVVDMWNVDSAVIVPIVVTANGLMAKSFDDHLSKLALRSWVKGLIQKAVLLDTARIVRRFLSLEP

SEQ ID NO: 28664 - protein, 868 aa, Noctua fimbriata
MCFVRRAFSGTGISPQEYMSRVTERIDFLKQKVYAWANRIRRYKRRVDRYSQNRMFQSDERWVYRAWERPDQNMTDMCRPDDAATSSFWRSIWSVPVCHTEADWMRDVEQVCEPIPEMEPILITPLDVARAVRPLPNWKSPGPDGLHNFWLKWLSSSHTCLASQFQSSLESGSLPQFLTTGVTHLLHKSGSPAEPKNYRPITCLSTVYKLLTSILRTKINTHIDKNSIMSASQNGCRNGSRATKELLLIDMAISQQVRRSRKDLSTCWIDYKKAYDSVPHTWLMRVLELYKIDATLRAFLESCMGQWRTVLRYPGCRQIQGNDEPVWIKRGIFQGDSLSPLWFFLALNPLSTLLEDSGLGYRLRRGGQVISHLLYMDDLKLFAPNKLQLMELLKVTETFSSAIRMEFGVDKCAVMYVKQGEIMESEGIQLSDSIHLRTLSSTESYKYLGMSEALGINVTDMKQSLKERFFGRLNKVLHSLLSGGNKVRAFNGWVMPVLMYSFGVLKWTQTELDALDRRVRTLLTANRMHHPRSSVMRLYIPRKCGGRGFLNAKSLHNREMCSLREYFLKVEVGMHRDVVAVDKGLTPLSMAKENWRKPEVLTTDDRKEVWQGKELHGRFYRALHGPDVDFLASVTWLRFGDLFGETEGFVCAIMDEVMLTNNYRKYIMKDGTVDVCRACHRPGESIRHIISGCSRLANGEYLHRHNQVARIIHQQLALKYKLVESEVPYYKYVPDPVLEKDHVTLYWDQSIITDRTIVANKPDIVVIDRSARRVMIVDVTIPHDENLVKAEKEKQIKYLDLAHEVVDMWNVNSAIIVPIVVTANGLIAKSLDDHLSKLSLGGWIKGLIQKAVLLDTARIVRRFLSLEP

SEQ ID NO: 28665 - protein, 1050 aa, Noctua fimbriata
MLDDAVLDRLRSEVLSNRIVLTPAQTAVQASVIDATPPRFNPAVVEEDDRVAVVSSQCNDRLRSALEDALREYRSTPTELRPRLPRLPMHNKNRALVCALDSQLENIFESSENLVDTHSILYCGAVAACRLANVKFPNCDVATRPKPAVPAWQRRIERRIDGARVLIGKLHCFREGNTRPRVMRFVRRAFSGTGISPQEYMSRVTERIDFLKQKVYAWANRIRRYKRRVDRYSQNRMFQSDERWVYRAWERPELNMTDVCRPDDAATSSFWRSIWSVPVCHTEADWMRDVERVCEPIPEMEPILITRLDIARAVRPLPNWKSPGPDGLHNFWLKWLSSSHTCLASQFQSSLESGSLPQFLTTGVTHLLHKSGSPAEPKNYRPITCLSTVYKLLTSILRAKINTHIDKNSIMSASQNGCRNGSRGTKELLLIDMAISQQVRRSRKDLSTCWIDYKKAYDSVPHTWLMRVLELYKIDATLRTFLESCMGQWRTVLRYPGCRQIQGNDEPVWIKRGIFQGDSLSPLWFCLALNPLSTLLEDSGLGYRLRRGGQVISHLLYMDDLKLFAPNKLQLMELLKVTETFSSAIRMEFGVDKCAVMYVKRGEIMESEGIQLSDFIHLRSLSSSESYKYLGMSEALGINVTDMKQSLKERFFGRLNKVLHSLLSGGNKVRAFNGWVMPVLMYSFGVLKWTQTELDALDRRVRTLLTANRMHHPRSSVMRLYIPRKCGGRGFLNAKSLHNREICSLREYFLKVEVGMHRDVVAVDKGLTPLSMAKENWRKPEVLTTDDRKEVWQGKELHGRFYRALHGPDVDFLASVSWLRFGDLFGETEGFVCAIMDEVMLTNNYRKYIMKDGTVDVCRACHRPGESIRHIISGCSRLANGEYLHRHNQVARIIHQQLALKYKLVESEVPYYKYVPDPVLEKNHVTLYWDQSIITDRTIVANKPDIVVIDRSARRVMIVDVTIPHDENLVKAEKEKQIKYLDLAHEVVDMWHVNSAIIVPIVVTANGLIAKSLDDHLSKLSLGGWIKGLIQKAVLLDTARIVRRFLSLEP

SEQ ID NO: 28666 - protein, 1202 aa, Noctua fimbriata
MLTRAAARRARLPPPDPSHSSASPPPESSHIVSAVTPAVAVASSSSDEYFSPPTSPTPVRRQGRGRPPRSLGLRGHPAPSRVPATGGCVQRMRWTHSINENVMRAFYGSTEGGTNLTAYRVGMLSLFQVLEPTINVSAQRLSDQVRVIQRNHMLDDAVLDRLRSEVLSNRIVFTPAQTAVQASVIDATPPRFNPAIVEEDDRVAVVSSQCNDRLRSALEDALREYRSTPTELRPRLPRLPMHNKNRALVCALDSQLKNLFESSENLVDTHSILYCGAVAACRLANVKFPNCDVATRPKPAVPAWQRRIERRIDGARVLIGKLHCFREGNTRPRVMRFVRRAFSGTGISPQEYMSRVTERIDFLKQKVYAWANRIRRYKRRVDRYSQNRMFQSDERWVYRAWERPDQNMTDVCRPDDAATSSFWRSIWSVPVCHTEADWMRDVEQVCEPIPEMEPILITPLDVARAVRPLPNWKSPGPDGLHNFWLKWLSSSHTCLASQFQSSLESGSLPQFLTTGVTHLLHKSGSPAEPKNYRPITCLSTVYKLLTSILRAKINTHIDKNSIMSASQNGCRNGSRGTKELLLIDMAISQQVRRSRKDLSTCWIDYKKAYDSVPHTWLMRVLELYKIDATLRAFLESCMGQWRTVLRYPGCRQIQGNDEPVWIKRGIFQGDSLSPLWFCLALNPLSTLLEDSGLGYRLRRGGQVISHLLYMDDLKLFAPNKLRLMELLKVTETFSSAIRMEFGVDKCAVMYVKQGEIMESEGIQLSDSIHLRTLSSTESYKYLGMSEALGINVTDMKQSLKERFFGRLNKVLHSLLSGGNKVRAFNGWVMPVLMYSFGVLKWTQTELDALDRRVRTLLTANRMHHPRSSVMRLYIPRKCGGRGFLNAKSLHNREMCSLREYFLKVDLGMHRDVVAVDKGLTPLSMAKENWRKPEVLTTDDRKEVWQGKELHGRFYRALHGPDVDFLASVSWLRFGDLFGETEGFVCAIMDEVMLTNNYRKYIMKDGTVDVCRACHRPGESIRHIISGCSRLANGEYLHRHNQVARIIHQQLALKYKLVESEVPYYKYVPDPVLEKDHVTLYWDQSIITDRTIVANKPDIVVIDRSARRVMIVDVTIPHDENLVKAEKEKQIKYLDLAHEVVDMWNVNSAIIVPIVVTANGLIAKSLDDHLSKLSLGGWIKGLIQKAVLLDTARIVRRFLSLEP

SEQ ID NO: 28667 - protein, 962 aa, Noctua fimbriata
MHNKNRALVCALDSQLKNLFESSENLVDTHSILYCGAVAACRLANVKFPNCDVATRPKPAVPAWQRRIECRIDGARVLIGKLHCFREGNTRPRVMRFVRRAFSGTGISPQEYMSRVTERIDFLKQKVYAWANRIRRYKRRVDRYSQNRMFQSDERWVYRAWERPDQNMTDMCRPDDAATSSFWRSIWSVPVCHTEADWMRDVEQVCEPIPEMEPILITPLDVARAVRPLPNWKSPGPDGLHNFWLKWLSSSHTCLASQFQSSLESGSLPQFLTTGVTHLLHKSGSPAEPKNYRPITCLSTVYKLLTSILRAKINTHIDKNSIMSASQNGCRNGSRATKELLLIDMAISQQVRRSRKDLSTCWIDYKKAYDSVPHTWLMRVLELYKIDATLRAFLESCMGQWRTVLRYPGCRQIQGNDEPVWIKWGIFQGDSLSPLWFCLALNPLSTLLEDSGLGYRLRRGGQVISHLLYMDDLKLFAPNKLQLMELLKVTETFSSAIRMEFGVDKCAVMYVKQGEIMKSEGIQLSDSIHLRTLSSTESYKYLGMSEALGINVTDMKQSLKERFFGRLNKVLHSLLSGGNKVRAFNGWVMPVLMYSFGVLKWTQTELDALDRRVRTLLTANRMHHPRSSVMRLYIPRKCGGRGFLNAKSLHNREMCSLREYFLKVEVGMHRDVVAVDKGLTPLSMAKENWRKPEVLTTDDRKEVWQGKELHGRFYRALHGPDVDFLASVSWLRFGDLFGETEGFVCAIMDEVMLTNNYRKYIMKDGTVDVCRACHRPGESIRHIISGCSRLANGEYLHRHNQVARIIHQQLALKYKLVESEVPYYKYVPDPVLEKDHVTLYWDQSIITDRTIVANKPDIVVIDRSARRVMIVDVTIPHDENLVKAEKEKQIKYLDLAHEVVDMWNVNSAIIVPIVVTANGLIAKSLDDHLSKLSLGGWIKGLIQKAVLLDTARIVRRFLSLEP

SEQ ID NO: 28668 - protein, 1202 aa, Noctua fimbriata
MITRAAYRRARLPPPDPSLSSASPPPESSPIVSAVTPAVAVASSSSDEYFSPPTSPTPVRRQGRGRPPRSLGLRGHPAPSRVPAAGGCVQRMRWTHSINENVMRAYYGSTEGGTNLTAYRVGMLSLFQVLEPTVNVSAQRLSDQVRVIQRNHMLDDAVLDRLRSEVLSNRIVLTPAQTAVQASVIDATPPRFNPAVVEEDDRVAVVSSQCNDRLRSALEDALREYRSTPTELRPRLPRLPMHNKNRALVCALDSQLENIFESSENLVDTHSILYCGAVAACRLANVKFSNCDVATRPKPAVPAWQRRIERRIDGARVLIGKLHCFREGNSRPRVMRFVRRAFSGTGISPQEYMSRVTERIDFLKQKVYAWANRIRRYKRRVDRYSQNRMFQSDERWVYRAWERPELNMTDVCRPDDAATSSFWRSIWSVPVCHTEADWMRDVERVCEPIPEMEPILITPLDIARAVRPLPNWKSPGPDGLHNFWLKWLSSSHTCLASQFQSSLESGSLPQFLTTGVTHLLHKSGSPAEPKNYRPITCLSTVYKLLTSILRAKINTHIDKNSIMSASQNGCRNGSRGTKELLLIDMAISQQVRRSRKDLSTCWIDYKKAYDSVPHTWLMRVLELYKIDATLRAFLESCMGQWRTVLRYPGCRQIQGNDEPVWIKRGIFQGDSLSPLWFCLALNPLSTLLEDSGLGYRLRRGGQVISHLLYMDDLKLFAPNKLQLMELLKVTETFSSAIRMEFGVDKCAVMYVKRGEIMESEGIQLSDFIHLRSLSSSESYKYLGMSEALGINVTDMKQSLKERFFGRLNKVLHSLLSGGNKVRAFNGWVMPVLMYSFGVLKWTQTELDALDRRVRTLLTANRMHHPRSSVMRLYIPRKCGGRGFLNAKSLHNREMCSLREYFLKVEVGMHRDVVAVDKGLTPLSMAKENWRKPEVLTTDDRKEVWQGKELHGRFYRALHGPDVDFLASVSWLRFGDLFGETEGFVCAIMDEVMLTNNYRKYIMKDGTVDVCRACHRPGESIRHIISGCSRLANGEYLHRHNQVARIIHQQLALKYKLVESEVPYYKYVPDPVLEKNHVTLYWDQSIITDRTIVANKPDIVVIDRSARRVMIVDVTIPHDENLVKAEKEKQIKYLDLAHEVVDMWHVNSAIIVPIVVTANGLIAKSLDDHLSKLSLGGWIKGLIQKAVLLDTARIVRRFLSLEP

SEQ ID NO: 28669 - protein, 1202 aa, Noctua fimbriata
MITRAAYRRARLPPPDPSLSSASPPPESSPIVSAVTPAVAVASSSSDEYFSPPTSPTPVRRQGRGRPPRSLGLRGHPAPSRVPAAGGCVQRMRWTHSINENVMRAYYGSTEGGTNLTAYRVGMLSLFQVLEPTVNVSAQRLSDQVRVIQRNHMLDDAVLDRLRSEVLSNRIVLTPAQTAVQASVIDATPPRFNPAVVEEDDRVAVVSSQCNDRLRSALEDALREYRSTPTELRPRLPRLPMHNKNRALVCALDSQLENIFESSENLVDTHSILYCGAVAACRLANVKFPNCDVATRPKPAVPAWQRRIERRIDGARVLIGKLHCFREGNTRPRVMRFVRRAFSGTGISPQEYMSRVTERIDFLKQKVYAWANRIRRYKRRVDRYSQNRMFQSDERWVYRAWERPELNMTDVCRPDDAATSSFWRSIWSVPVCHTEADWMRDVERVCEPIPEMEPILITPLDIARAVRPLPNWKSPGPDGLHNFWLKWLSSSHTCLASQFQSSLESGSLPQFLTTGVTHLLHKSGSPAEPKNYRPITCLSTVYKLLTSILRAKINTHIDKNSIMSASQNGCKSGSRGTKELLLIDMAISQQVRRSRKDLSTCWIDYKKAYDSVPHTWLMRVLELYKIDATLRAFLESCMGQWRTVLRYPGCGQIQGNDEPVWIKRGIFQGDSLSPLWFCLALNPLSTLLEDSGLGYRLRRGGQVISHLLYMDDLKLFAPNKLQLMELLKVTETFSSAIRMEFGVDKCAVMYVKQGEIMESEGIQLSDSIHLRTLSSTESYKYLGMSEALGINVTDMKQSLKERFFGRLNKVLHSLLSGGNKVRAFNGWVMPVLMYSFGVLKWTQTELDALDRRVRTLLTANRMHHPRSSVMRLYIPRKCGGRGFLNAKSLHNREMCSLREYFLKVEVGMHRDVVAVDKGLTPLSMAKENWRKPEVLTTDDRKEVWQGKELHGRFYRALHGPDVDFLASVSWLRFSDLFGETEGFVCAIMDEVMLTNNYRKYIMKDGTVDVCRACHRPGESIRHIISGCSRLANGEYLHRHNQVARIIHQQLALKYKLVESEVPYYKYVPDPVLEKDHVTLYWDQSIITDRTIVANKPDIVVIDRSARRVMIVDVTIPHDENLVKAEKEKQIKYLDLAHEVVDMWNVNSAIIVPIVVTANGLIAKSLDDHLSKLSLGGWIKGLIQKAVLLDTARIVRRFLSLEP

SEQ ID NO: 28670 - protein, 1202 aa, Noctua fimbriata
MITRAAYRRARLPPPDPSLSSASPPPESSPIVSAVTPAVAVASSSSDEYFSPPTSPTPVRRQGRGRPPRSLGLRGHPAPSRVPAAGGCVQRMRWTHSINENVMRAYYGSTEGGTNLTAYRVGMLSLFQVLEPTVNVSAQRLSDQVRVIQRNHMLDDAVLDRLRSEVLSNRIVLTPAQTAVQASVIDATPPRFNPAVVEEDDRVAVVSSQCNDRLRSALEDALREYRSTPTELRPRLPRLPMHNKNRALVCALDSQLENIFESSENLVDTHSILYCGAVAACRLANVKFSNCDVATRPKPAVPAWQRRIERRIDGARVLIGKLHCFREGNTRPRVMRFVRRAFSGTGISPQEYMSRVTERIDFLKQKVYAWANRIRRYKRRVDRYSQNRMFQSDERWVYRAWERPELNMTDVCRPDDAATSSFWRSIWSVPVCHTEADWMRDVERVCEPIPEMEPILITPLDIARAVRPLPNWKSPGPDGLHNFWLKWLSSSHTCLASQFQSSLESGSLPQFLTTGVTHLLHKSGSPAEPKNYRPITCLSTVYKLLTSILRAKINTHIDKNSIMSASQNGCRNGSRGTKELLLIDMAISQQVRRSRKDLSTCWIDYKKAYDSVPHTWLMRVLELYKIDATLRAFLESCMGQWRTVLRYPGCRQIQGNDEPVWIKRGIFQGDSLSPLWFCLALNPLNTLLEDSGLGYRLRRGGQVISHLLYMDDLKLFAPNKLQLMELLKVTETFSSAIRMEFGVDKCAVMYVKRGEIMESEGIQLSDFIHLRSLSSSESYKYLGMSEALGINVTDMKQSLKERFFGRLNKVLHSLLSGGNKVRAFNGWVMPVLMYSFGVLKWTQTELDALDRRVRTLLTANRMHHPRSSVMRLYIPRKCGGRGFLNAKSLHNREMCSLREYFLKVEVGMHRDVVAVDKGLTPLSMAKENWRKPEVLTTDDRKEVWQGKELHGRFYRALHGPDVDFLASVSWLRFGDLFGETEGFVCAIMDEVMLTNNYRKYIMKDGTVDVCRACHRPGESIRHIISGCSRLANGEYLHRHNQVARIIHQQLALKYKLVESEVPYYKYVPDPVLEKNHVTLYWDQSIITDRTIVANKPDIVVIDRSARRVMIVDVTIPHDENLVKAEKEKQIKYLDLAHEVVDMWNVNSAIIVPIVVTANGLIAKSLDDHLSKLSLGGWIKGLIQKAVLLDTARIVRRFLSLEP

SEQ ID NO: 28671 - protein, 1202 aa, Atethmia centrago
MLTRSAARARPPPPDSSLSSASPPPVPSPTVSAVTTPAAVVASSSSDEYFSPPTSPTPVRRQGRGRPPKSLGLRGQLAPSRVPAAGGCVQRMRWTQSMNENVMRAYYGSTEGGTNLTAYRVRMLSLFQKLEPTVNVSAQRLSDQVRVIQRNHRLDDAALDRLRSEVLSNHIVSTPAQTATHAPIINAIPPRSNHDVEEEDDRVATVSSQCNVRLRSALEDAFREYRSTLTELRPRLPRLPMHKKNRALVCTLDSLLKDFFESSEDLVDTHSILYCAAVAACRLANVKFPNCDGATRPKPAVPAWQCRIERRIDGARVLIGKLYCFREGNTRPRVMRFVRRAFSGTGISPREYMSRVTERIDFLKQKVCAWASRIRRYKRRVDRYTQNRMFQSDERWVYRAWERPEQNETDVCRPDDATTTAFWRSIWSVPVCHAEADWMRDVERVCETIPEMDVVIITPSDIARAVRPLPNWKSPGPDGLHNFWLKWLTSSHTCLASQFQSSLESGSLPQFLTTGITHLLHKSGSPAEPKNYRPITCLSTVYKLLTSILRAKINTHIDSNSIMSASQNGCRNGSRGTKELLLIDMAISQQVRRFRKDLSTCWIDYKKAYDSVPHTWLMRVLEFYKIDTTLRTFLESCMGQWRTVLRYPGCRQIQGNDEPVWIKRGIFQGDSLSPLWFCLALNPLSTLLEDSGLGYRLRRGGQVISHLLYMDDLKIFAPNKLQLMELLKVTETFSSAIRMEFGVDKCAVMHVKRGEIMESEGIQLSDSIHLRSLSSPESYKYLGMSEALGINVTDMKQSLKERFFGRLKKVLISPLSGGNKVRAFNGWVMPVLMYSFGILKWTQTELDALDRRVRTLLTANRMHHPRSSVMRLYIPRKCGGRGFLNAKTLHNREICSLREYFLKTEVGMHRDVVAVDKGLTPLSMAKENWCKPVILTTDDRKEIWQNKELHGRFYRALHEPDVDFLASVSWLRFGDLFGETEGFVCAIMDEVILTNNYRRHIMKDGTVDVCRACHRPGESIRHIISGCSRLANGEYLHRHNQVARIIHQQLALKYKLVNSEVPYYKYAPDPVLENDHVTLYWDRSIITDRTIVANKPDIVVIDRLARRAMIVDVTIPHDENLVKAEKEKQIKYLDLAHEVVDMWNVDSAVIVPIVVTANGLMAESLNHHLSRLSLGGWIKGLIQKAVLLDTARIVRRFLSLES

SEQ ID NO: 28672 - protein, 962 aa, Atethmia centrago
MHKKNRALMCALDSQLKVFFESSEDLVDTHSILYCAAVAACRLANVKFPNSDGATRPKPAVPAWQCRIERRIDKARVLIGKLYCFREGNTRPRVMRFVRRAFSGTGISPREYMSHITERIDFLKQKVCAWASRIRRYKRRVDRYTQNRMFQSDERWVYRAWERPKQNVTDVCRPDDATTTAFWRSIWSVPVCHVEADWMRDVERVCETIPEMEVVIITPSDIARAVRPLPNWKSPGPDGLHNFWLKWLTSSHTCLASQFQSSLESGSLPQFMTTGITHLLHKSGSPAEPKNYRPITCLSTVYKLLTSILRAKINTHIDSNSIMSASQNGCRNGSRGTKELLLIDMAISQQVRRSGKDLSTCWIDYKKAYDSVPHTWLMRVLELYKIDTTLRTFLESCMGQWRTVLRYPGCRQIQGNDEPVWIKRGIFQGDSLSPLWFCLALNPLSMQLEDSGLGYRLRRGGQVISHLLYMDDLKIFAPNKLQLMKLLKVTETFSSAIRMEFGVDKCAVMHVKRGEIMESEGIQLSDSIHLRSLSSPESYKYLGMSEALGINVTDMKQSLKERFFGRLKKVLISLLSGGNKVRAFNGWVMPVLMYSFGILKWTQTELDALDRRVRTLLTANRMHHPRSSVMRLYIPRKCGGRGFLNAKTLHNREICSLREYFLKTEVGMHRDVVAVDKGLTPLSMAKENWCKPVVLTTDDRKEIWQSKELHGRFYRALHEPDVDFLASVSWLRFGDLFGETEGFVCAIMDEVILTNNYRRHIMKDGTVDVCRACHRPGESIRHIISGFSRLANEEYLHRHNQVARIIHQQLALKYKLVNSEVPYYKYVPDPVLENDHVTLYWDRSIITDRTIVANKPDIVVIDRLARRAMIVDVTIPHDDNLVKAEKEKQIKYLDLAHEVVDMWNVNSAVIVPIVVTANGLMARSLNHHLSRLALDDWIKGLIQKAVLLDTARIVRRFLSLEP

SEQ ID NO: 28673 - protein, 963 aa, Atethmia centrago
MHKKNRALVCALDSLLKDFFESSEDLVDTHSILYCAAVAACRLANVKFPNCDGATRPKPAVPAWQCRIERRIDGARVLIGKLYCFREGNTRPRVMRFVRRAFSGTGISPREYMSRVTERIDFLKQKVCAWASRIRRYKRRVDRCTQNRMFQSDERWVYRSWEQPEQNETDVCRPDDATTTAFWRSIWSVPVCHAEADWMRDVERVCETIPEMEVVVIITPSDIARAVRPLPNWKSPGPDGLHNFWLKWLTSSHTCLASQFQSSLESGSLPQFLTTGITHLLHKSGSPAEPKNYRPITCLSTVYKLLTSILRAKINTHIDSNSIMSASQNGCRNGSRGTKELLLIDMAISQQVRRFRKDLSTCWIDYKKAYDSVPHTWLMRVLELYKIDTTLRTFLESCMGQWRTVLRYPGCRQIQGNDEPVWIKRGIFQGDSLSPLWFCLALNPLSTLLEDSGLGYRLRRGGQVISHLLYMDDLKIFAPNKLQLMELLKVTETFSSAIRMEFGVDKCAVMHVKRGEIMESEGIQLSDSIHLRSLSSPESYKYLGMSEALGINVTDMKQSLKERFFGRLKKVLISPLSGGNKVRAFNGWVMPVLMYSFGILKWTQTELDALDRRVRTLLTANRMHHPRSSVMRLYIPRKCGGRGFLNAKTLHNREICSLREYFLKTEVGMHRDVVAVDKGLTPLSMAKENWCKPVILTTDDRKEIWQNKELHGRFYRALHEPDVDFLASVSWLRFGDLFGETEGFVCAIMDEVILTNNYRRHIMKDGTVDVCRACHCPGESIRHIISGCSRLANGEYLHRHNQVARIIHQQLALKYKLVNSEVPYYKYAPDPVLENDHVTLYWDRSIITDRTIVANKPDIVVIDRLARRAMIVDVTIPHDENLVKAEKEKQIKYLDLAHEVVDMWNVDSAVIVPIVVTANGLMAESLNHHLSRLSLGGWIKGLIQKAVLLDTARIVRRFLSLES

SEQ ID NO: 28674 - protein, 962 aa, Atethmia centrago
MHKKNRALMCALDSQLKVFFESSEDLVDIHSILYCAAVAACRLANVKFPNSDGATRPKPAVPAWQCRIERRIDKARVLIGKLYCFREGNTRPRVMRFVRRAFSGTGISPREYMSHITERIDFLKQKVCAWASRIRRYKRRVDRYTQNRMFQSDERWVYRAWERPKQNVTDVCRPDDATTTAFWRSIWSVPVCHVEADWMRDVERVCETIPEMEVVIITPSDIARAVRPLPNWKSPGPDGLHNFWLKWLTSSHTCLASQFQSSLESGSLPQFMTTGITHLLHKSGSTAEPKNYRPITCLSTVYKLLTSILRAKINTHIDSNSIMSASQNGCRNGSRGTKELLLIDMAISQQVRRSRKDLSTCWIDYKKAYDSVPHTWLMRVLELYKIDTTLRTFLESCMGQWRTVLRYPGCRQIQGNDEPVWIKRGIFQGDSLSPLWFCLALNPLSMQLEDSGLGYRLRRGGQIISHLLYMDDLKIFAPNKLQLMKLLKVTETFSSAIRMEFGVDKCAVMHVKRGEIMESEGIQLSDSIHLRSLSSPESYKYLGMSEALGINVTDMKQSLKERFFGRLKKVLISLLSGGNKVRAFNSWVMPVLTYSFGILKWTQTELDALDRRVRTLLTANQMHHPRSSVMRLYIPRKCGGRGFLNAKTLHNREICSLREYFLKTEVGMHRDVVAVDKGLTPLSMAKENWCKPVVLTTDDRKEIWQSKELHGRFYRALHEPDVDFLASVSWLRFGDLFGETEGFVCAIMDEVILTNNYRRHIMKDGTVDVCRACHRPGESIRHIISGCSRLANGEYLHRHNQVARIIHQQLALKYKLVNSEVPYYKYVPDPVLENDHVTLYWDRSIITDRTIVANKPDIVVIDRLARRAMIVDVTIPHDDNLVKAEKEKQIKYLDLAHEVVDMWNVNSAVIVPIVVTANGLMARSLNHHLSRLALDGWIKGLIQKAVLLDTARIVRRFLSLEP

SEQ ID NO: 28675 - protein, 1203 aa, Atethmia centrago
MLTRAASKRARPPPPDSSLSSASPPPVSSPTVSAVITPAAVVASSSSDEYFSPPTSPTPVRRQGRDRPPKSLGLRGHPAPSRVPAAGGCVQRMRWTQSMNENVMRAYYGSTEGGTNLTAYRVRMLSLFQELEPTVNVSAQRLSDQVRVIQRNRRLDDATLDRLRSEVLSNYIISTPAQTAVHTPIIDVIPPRSNHGVEEEDDRAATVSSQCNVRLRSALEDAFREYRSTPTELRPRLPRLPMHKKNRALMCALDSQLKVFFESSEDLVDTHSILYCAAVAACRLANVKFPNSDGATRPKPAVPAWQCRIERRIDKARVLIGKLYCFREGNTRPRVMCFVRRAFSGTGISPREYMSHITERIDFLKQKVCAWASRIRRYKRRVDRYTQNRMFQSDERWVYRAWERPKQNVTDVCRPDDATTTAFWRSIWSVPVCHVEADWMRDVERVCETIPEMEVVIITPSDIARAVRPLPNWKSPGPDGLHNFWLKWLTSSHTCLASQFQSSLESGSLPQFMTTGITHLLHKSGSTAEPKNYRPITCLSTVYKLLTSILRAKINTHIDSNSIMSASQNGCRNGSRGTKELLLIDMAISQQVRRSRKDLSTCWIDYKKAYDSVPHTWLMRVLELYKIDTTLRTFLESCMGQWRTVLRYPGCRQIQGNDEPVWIKRGIFQGDSLSPLWFCLALNPLSMQLEDSGLGYRLRRGGQIISHLLYMDDLKIFAPNKLQLMKLLKVTETFSSAIRMEFGVDKCAVMHVKRGEIMESEGIQLSDSIHLRSLSSPESYKYLRMSEALGINVTDMKQSLKERFFGRLKKVLISLLSGGNKVRAFNSWVMPVLTYSFGILKWTQTELDALDRRVRTLLTANRMHHPRSSVMRLYIPRKCGGRGFLNAKTLHNREICSLREYFLKTEVGMHRDVVAVDKGLTPLSMAKENWCKPVVLTTDDRKEIWQSKELHGRFYRALHEPDVDFLASVSWLRFGDLFGETEGFVCAIMDEVILTNNYRRHIMKDGTVDVCRACHRPGESIRHIISGCSRLANGEYLHRHNQVARIIHQQLALKYKLVNSEVPYYKYVPDPVLENDHVTLYWDRSIITDRTIVANKPDIVVIDRLARRAMIVDVTIPHDDNLVKAEKEKQIKYLDLAHEVVDMWNVNSAVIVPIVVTANGLMARSLNHHLSRLALDGWIKGLIQKAVLLDTARIVRRFLSLKP

SEQ ID NO: 28676 - protein, 1202 aa, Atethmia centrago
MLTRSAARARPPPPDSSLSSASPPPVPSPTVSAVTTPAAVVASSSSDEYFSPPTSPTPVRRQGRGRPPKSLGLRGQLAPSRVPAAGGCVQRMRWTQSMNENVMRAYYGSTEGGTNLTAYRVRMLSLFQKLEPTVNVSAQRLSDQVRVIQRNHRLDDAALDRLRSEVLSNHIVSTPAQTATHAPIINAIPPRSNHDVEEEDDRVATVSSQCNVRLRSALEDAFREYRSTLTELRPRLPRLPMHKKNRALVCTLDSLLKDFFESSEDLVDTHSILYCAAVAACRLANVKFPNCDGATRPKPAVPAWQCRIERRIDGARVLIGKLYCFREGNTRPRVMRFVRRAFSGTGISPREYMSRVTERIDFLKQKVCAWASRIRRYKRRVDRYTQNRMFQSDERWVYRAWERPEQNETDVCRPDDATTTAFWRSIWSVPVCHAEADWMRDVERVCETIPEMDVVIITPSDIARAVRPLPNWKSPGPDGLHNFWLKWLTSSHTCLASQFQSSLESGSLPQFLTTGITHLLHKSGSPAEPKNYRPITCLSTVYKLLTSILRAKINTHIDSNSIMSASQNGCRNGSRGTKELLLIDMAISQQVRRFRKDLSTCWIDYKKAYDSVPHTWLMRVLEFYKIDTTLRTFLESCMGQWRTVLRYPGCRQIQGNDEPVWIKRGIFQGDSLSPLWFCLALNPLSTLLEDSGLGYRLRRGGQVISHLLYMDDLKIFAPNKLQLMELLKVTETFSSAIRMEFGVDKCAVMHVKRGEIMESEGIQLSDSIHLRSLSSPESYKYLGMSEALGINVTDMKQSLKERFFGRLKKVLISPLSGGNKVRAFNGWVMPVLMYSFGILKWPQTELDALDRRVRTLLTANRMHHPRSSVMRLYIPRKCGGRGFLNAKTLHNREICSLREYFLKTEVGMHRDVVAVDKGLTPLSMAKENWCKPVILTTDDRKEIWQNKELHGRFYRALHEPDVDFLASVSWLRFGDLFGETEGFVCAIMDEVILTNNYRRHIMKDGTVDVCRACHRPGESIRHIISGCSRLANGEYLHRHNQVARIIHQQLALKYKLVNSEVPYYKYAPDPVLENDHVTLYWDRSIITDRTIVANKPDIVVIDRLARRAMIVDVTIPHDENLVKAEKEKQIKYLDLAHEVVDMWNVDSAVIVPIVVTANGLMAESLNHHLSRLSLGGWIKGLIQKAVLLDTARIVRRFLSLES

SEQ ID NO: 28677 - protein, 977 aa, Atethmia centrago
MSTPTELRPRLPRLPMHKKNRALVCTLDSLLKDFFESSEDLVDTHSILYCAAVAACRLANVKFPNCDGATRPKPAVPAWQCRIERRIDGARVLIGKLYCFREGNTRPRVMRFVRRAFSGTGISPREYMSRVTERIDFLKQKVCAWASRIRRYKRRVDRYTQNRMFQSDERWVYRAWERPEQNETDVCRPDDATTTAIWRSIWSVPVCHAEADWMRDVERVCETIPEMEVVIITPSDIARAVRPLPNWKSPGPDGLHNFWLKWLTSSHTCLASQFQSSLESGSLPQFLTTGITHLLHKSGSPAEPKNYRLITCLSTVYKLLTSILRAKINTHIDSNSIMSASQNGCRNGSRGTKELLLIDMAISQQVRRFRKDLSTCWIDYKKAYDSVPHTWLMRVLEFYKIDTTLRTFLESCMGQWRTVLRYPGCRQIQGNDEPVWIKRGIFQGDSLSPLWFCLALNPLSTLLEDSGLGYRLRRGGQVISHLLYMDDLKIFAPNKLQLMELLKVTETFSSAIRMEFGVDKCAVMHVKRGEIMESEGIQLSDSIHLRSLSSPESYKYLGMSEALGINVTDMKQSLKERFFGRLKKVLISPLSGGNKVRAFNGWVMPVLMYSFGILKWTQTELDALDRRVRTLLTANRMHHPRSSVMRLYIPRKCGGRGFLNAKTLHNREICSLREYFLKTEVGMHRDVVAVDKGLTPLSMAKENWCKPVILTTDDRKEIWQNKELHGRFYRALHEPDVDFLASVSWLRFGDLFGETEGFVCAIMDEVILTNNYRRHIMKDGTVDVCRACHRPGESIRHIISGCSRLANGEYLHRHNQVARIIHQQLALKYKLVNSEVPYYKYAPDPVLENDHVTLYWDRSIITDRTIVANKPDIVVIDRLARRAMIVDVTIPHDENLVKAEKEKQIKYIDLAHEVVDMWNVDSAVIVPIVVTANGLMAESLNHHLSRLSLGGWIKGLIQKAVLLDTARIVRRFLSLES

SEQ ID NO: 28678 - protein, 936 aa, Mesoligia furuncula
MHKNAYFILPRYNNNNLANVKFPSCDGATRPKPAVPAWQRRIERRIDGARVLIGKLYCFREGNTRPRVMRFVRRAFSGTGISPREYMSRLTERIDFLKQKVCAWASRIRRYKRRVDRYTQNRMFQSDERWVYRAWERPEQNVTDVCRPDDAATSAFWCSIWSVPVCHTEAGWMQDVERVCESIPQMEKVLITPSDVARAVRPLPNWKSPGPDGLHNFWLKWLISSHTCLASQFQSSLESGSLPQFLTTGVTHLLHKSGSPAEPKNYRPITCLSTVYKLLTSILRAKINMHIESNSIMSASQNGCRNGSRGTKELLLIDMAISQQVRRSRKDLSTCWIDYKKAYDSVPHTWLMRVLELHKIDATLRTFLESCMGQWKTVFRYPGCRQIQGNDEPVWIKRGIFQGDSLSPLWFCLALNPLSTLLEDSGLGYRLRRGGQVISHLLYMDDLKLFAPNKLRLMELLKVTETFSSAIRMQFGVDKCAVMHVKRGEIKESEGIQLSDSISFRSLSSSESYKYLGMSEALGINDADMKQSLKERFFCRLKKVLISLLSGGNKVRAFNGWVMPVLMYSFGILKWTQTELDALDRRVRTLLTANRMHHPRSSVMRLYIPRKCGGRGFLNAKTLHNREVCSLREYFLKAEVGMHRDVVAVDKGLTPLSMAKENWRKPVVLSTDDRKKVWQSKELHGRFYRALHEPGVDFIASVSWLRFGDLFGETEGFVCAIMDEVILTNNYRRHIMKDGTVDVCRACHRPGESIRHIISGCSRLANGEYLHRHNQVARIIHQQLALKYKLVDSEVPYYKYVPDPVLENDHVTLYWDRSIITDRTIVANKPDIVVIDRLARRTMIVDVTIPHDGNLVKAEKEKEIKYQDLAHEVVDMWNVSSAIIVPIVVSANGLMAESLDQHLSRLSLGGWIKGLIQKAVLLDTARIVRRFLSLEP

SEQ ID NO: 28679 - protein, 1201 aa, Mesoligia furuncula
MLTRSAARRAHLPPPDSSLSPAPPPPEPSPIESAVTPAVAVASSSSDEYFSPPTSPTPVRRQGRGRPPNSLGLRGHPAPSRVPATGGCVQRMRWTQSMNENVMRAYYGSTEGGINLTAYRDRMLSLFQELEPTVNVSAQRLSDQVRVIQRNHRLDDIALDRLRSEVLSNHIVSTSAQTAAQVSTVDAIPPRFNRVEEEDDRVDTVSSQCNVRLRSALEDALREYRSTPTELRPRLPRLPMHKKNRALVCALDSQLKNFFESSEDLVDTHSILYCAAVAACRLANVKFSSCDGATRPKPAVPAWQRRIERRIDGARVLIGKLYCFREGNTRPRVMRFVRRAFSGTGISPREYMSRVTERIDFLKQKVCAWASRIRRYKRRVDRYTQNRMFQSDERWVYRAWERPEQNVTDVCRPDDAATSAFWCSIWSVPVCHTEAGWMQDVERVCESVPEMEKVLITPSDVARAVRPLSNWKSPGPDGLHNFWLKWLISSHTCLASQFQSSLESGSLPQFLTTGVTHLLHKSGSPAEPKNYRPITCLSTVYKLLTSILRAKINKHIESNSIMSASQNGCRNGSRGTKELLLIDMAISQQVRRSRKDLSTCWIDYKKAYDSVPHTWLMRVLELYKIDATLRTFLESCMGQWKTVLRYPGCRQIQGNDEPVWIKRGIFQGDSLSPLWFCLALNPLSTLLEDSGLGYRLRRGGQVISHLLYMDDLKLFAPNKLRLMELLKVTKTFSSAIKMEFGVDKCAVMHVKRGEIMESEGIQLSDSISLRSLSSSESYKYLGMSEALGINDADMKQSLKERFFCRLKKVLISLLSGGNKVRAFNGWVMPVLMYSFGILKWTQTELDALDRRVRTLLTANRMHHPRSSVMRLYIPRKCGGRGFLNAKTLHNREVCSLREYFLKAEVGMHRDVVAVDKGLTPLSMAKENWRKPVVLSTDDRKRVWQSKELHGRFYRALHEPGVDFIASVSWLRFGDLFGETEGFVCAIMDEVILTNNYRRHIMKDGTVDVCRACHRPGESIRHIISGCSRLANGEYLHRHNQVARIIHQQLALKYKLVDSEVPYYKYVPDPVLENDHVTLYWDRSIITDRTIVANKPDIVVIDRLARRTMIVDVTIPHDGNLVKAEKEKQIKYLDLAHEVVDMWNVSSAIIVPIVVSANGLMAESLDQHLSRLSLGGWIKGLIQKAVLLDTARIVRRFLSLEP

SEQ ID NO: 28680 - protein, 1111 aa, Mesoligia furuncula
MRWTQSMNENVMRAYYGSTEGGINLTAYRDRMLSLFQELEPTVNVSAQRLSDQVRVIQRNHRLDDIALDRLRSEVLSNHIVSTSAQTAAQVSTVDAIPPRFNRVEEEDDRVDTVSSQCNVRLRSALEDALREYRSTPTELRPRLPRLPMHKKNRALVCALDSQLKNFFESSEDLVDTHSILYCAAVAACRLANVKFSSCDGATLPKPAVPAWQRRIERRIDGARVLIGKLYCFREGNTRPRVMRFVRRAFSGTGTSPREYMSRVTVRIDFLKQKVCAWASRIRRYKRRVDRYTQNRMLQSDERWVYRAWERPEQNVTDVCRPDDAATSAFWCSIWSVPVCHTEAGWMQDVERVCESVPEMEKVLITPSDVARAVRPLSNWKSPGPDGLHNFWLKWLISSHTCLASQFQSSLESGSLPQFLTTGVTHLLHKSGSPAEPKNYRPITCLSTVYKLLTSILRAKINKHIESNSIMSASQNGCRNGSRGTKELLLIDMAISQQVRRSRKDLSTCWIDYKKAYDSVPHTWLMRVLELYKIDATLRTFLESCMGQWKTVLRYPGCRQIQGNDEPVWIKRGIFQGDSLSPLWFCLALNPLSTLLEDSGLGYRLRRGGQVIYHLLYMIDLKLFAPNKLRLMELLKVTKTFSSAIKMEFGVDKCAVMHVKRGEIMESEGIQLSDSISLRSLSSSESYKYLGMSEALGINDADMKQSLKERFFCRLKKVLISLLSGGNKVRAFNGWVMPVLMYSFGILKWTQTELDALDRRVRTLLTANRMHHPRSSVMRLYIPRKCGGRGFLNAKTLHNREVCSLREYFLKAEVGMHRDVVAVDKGLTPLSMAKENWRKLVVLSTDDRKRVWQSKELHGRFYRALHEPGVDFIASVSWLRFGDLFGETEGFVCAIMDEVILTNNYRRHIMKDGTVYVCRACHRPGESIRHIIISGCSRLANGEYLHRHNQVARIIHQQLALKYKLVDSEVPYYKYVPDPVLENDHVTLYWDRSIITDRTIVANKPDIVVIDRLARRTMIVDVTIPHDGNLVKAEKEKQIKYLDLANEVVDMWDVSSAIIVPIVVSANGLMAESLDQHLSRLSLGGWIKGLIQKAVLLDTARIVRRFLSLEP

SEQ ID NO: 28681 - protein, 1201 aa, Mesoligia furuncula
MLTRSAARRAHLPPPDSSLSPAPPPPEPSPIESAVTPAVAVASSSSDEYFSPPTSPTPVRRQGRGRPPNSLGLRGHPAPSRVPATGGCVQRMRWTQSMNENVMRAYYGSTEGGINLTAYRDRMLSLFQELEPTINVSAQRLSDQVRVIQRNHRLDDIALDRLRSEVLSNHIVSTSAQTAAQVSTVDAIPPRFNRVEEEDDRVETVSSQCNVRLRSALEDALREYRSTPTELRPRLPRLPMHKKNRALVCALDSQLKNFFESSEDLVDTHSILYCAAVAACRLANVKFSSCDGATRPKPAVPAWQRRIERRIDGARVLIVKLYCFREGNTRPRVMRFVRRAFSGTGISPREYMSRVTERIDFLKQKVCAWASRIRRYKRRVDRYTQNRMFQSDERWVYRAWERPEQNVTDVCRPDDAATSAFWCSIWSVPVCHTEAGWMQDVERVCESVPEMEKVLITPSDVARAVRPLLNWKSPGPDGLHNFWLKWLISSHTCLASQFQSSLESGSLPQFLTTGVTHLLHKSGSPAEPKNYRPITCLSTVYKLLTSILRAKINKHIESNSIMSASQNGCRNGSRGTKELLLIDMAISQQVRRSRKDLSTCWIDYKKAYDSVPHTWLMRVLELYKIDATLRTFLESCMGQWKTVLRYPGCRQIQGNDEPVWIKRGIFQGDSLSPLWFCLALNPLSTLLEDSGLGYRLRRGGQVISHLLYMDDLKLFAPNKLRLMELLKVTKTFSGAIKMEFRVDKCAVMHVKRGEIMESEGIQLSDSISLRSLSSSESYKYLGMSEALGINDADMKQSLKERFFCRLKKVLISLLSGGNKVRAFNGWVMPVLMYSFGILKWTQTELDALDRRVRTLLTANRMHHPRSSVMRLYIPRKCGGRGFLNAKTLHNREVCSLREYFLKAEVGMHRDVVAVDKGLTPLSMAKENWRKPVVLSTDDRKRVWQSKELHGRFYRALHEPGVDFIASVSWLRFGDLFGETEGFVCAIMDEVILTNNYRRHIMKDGTVDVCRACHRPGESIRHIISGCSRLANGEYLHRHNQVARIIHQQLALKYKLVDSEVPYYKYVPDPVLENDHVTLYWDRSIITDRTIVANKPDIVVIDRLARRTMIVDVTIPHDGNLVKAEKEKQIKYLDLAHEVVDMWNVSSAIIVPIVVSANGLMAESLDQHLSRLSLGGWIKGLIQKAVLLDTARIVRRFLSLEP

SEQ ID NO: 28682 - protein, 1200 aa, Xestia c-nigrum
MITRAASRRRARLPSPDSSLSSASPPPDPGSPVSTVAAVASSSSDEYFSPPTSPTPVRRAGRGRPPRSLGLRGQQAPSRVPATGGCVQRMRWTQSMNENAMRAYYGSTEGGTNLTAYRVRMLSLFQDLEPAVNVSAQRLSDQVRVIQRNHMLDDAALDRLRSEVLSNRIILTPAQTVVQASAIDATPPRSNPAVVEEDGRVATVSSQCNDRLRSALEDALREYRSTPTELRPRLPRLPMHKKNRALVCALDSQLKNVFESSEDLVDTHSILFCGAVAACRLANVKFPNCDLATRPKPAVPVWQRRIERRIDGARVLIGKLYCFREGNTRPRVMRFVRRAFSGTEISPQEYMSRVTERIDFLKQKVYAWASRIRRYKRRVDRYSQNRMFQCDERWVYRAWERPDQNVTDVCHPGDAATSSFWRSIWSVPVCHSEADWMRDVERVCEPIPEMAPVVITSLDIARAVRPLPNWKSPGPDGLHNFWLKWLSSSHTCLASQFQSSLESGSLPQFLTTGVTHLLHKSGSPTEPQNYRPITCLSTVYKLLTSILRTKINTHIDNNSIMSASQNGCRNGSRGTKELLLIDMAISQQVRRSRKDLSTCWIDYKKAYDSVPHSWLMRVLELYKIDATLCTFLKSCMGQWRTVLRYPGCRQIQGNDESVWIKRGIFQGDSLSPLWFCLALNPLSTLLENSGLGYQLRKDGQVISHLLYMDDLKLFAPNKLRLMELLKVTETFSNAIRMEFGVDKCAVMYVKRGEIMESEGLQLSDSIYLRSLSSSESYKYLGMSEALGINVTDMKQSLRERFFGRLKKVLNSLLSGGNKVRAFNGWVMPVLMYSCGILKWTQTELDALDRRVRTLLTENRMHHPRSSVMRLYIPRKCGGRGFLNAKTLHNREVCSLREYFLKAEVGMHRDVVAVDKGLTPLSMAKENWRKPVILTTDDRKKEWQGKVLHGRFYRALHGPDVDFLASVSWLRFGDLFGETEGFVCAIMDEVMLTNNYRKYIMKDGTVDVCRACHCPGESIRHIISGCSRLANGEYLHRHNQVARIIHQQLALKFKLVESEVPYYKYVPDPVLVKDHITLYWDQSIITDRTIVANKPDIVVIDRSARRVMIIDVTIPHDENLVKAEKEKQIKYLDLAHEVRDMVNMISVIIVSIVVTANGLIAKSLDEHLSKLSLGGWIKGLIQKAVLLDTARIVRRFLSLQP

SEQ ID NO: 28683 - protein, 1200 aa, Xestia c-nigrum
MITRAASRRRARPPTPDSSLSSASPPPDPGSPVPPVAAVASSSSDEYFSPPTSPTPVRRAGRGRPPRSLGLRGQQAPSRVPATGGCVQRMRWTQSMNENVMRAYYGSTEGGINLTAYRDRMLSLFQDLEPAVNVSAQRLSDQVRVIQRSHRLDDATLDRLRSEVLSNLITITPTQTAVHMSVVNATLPRSNPVVIEEDDRVALVSSQCNDRLRSALDNALREYRSISAELRPRLPRLPMHKKNRALVCALDSQLKNIFESSEDLVDTHSILFCGAVAACRLANVKFPNCDIAIRPKPAVPAWQRRIERRIDGARVLIGKLYCFREGNTRPRVMRFVRRAFSGTEISPQEYMSRVTERIDFLKQKVYAWASRIRRYKRRVDRYSQNRMFQSDERWVYRAWERPQQNMTDLCRPDDAATSSFWRSIWSVPVCHSEADWMRDVERVCEPIPTMEPILITPLDIARAVRPLPNWKSPGPDGLHNFWLKWFSSSHTCLASQFQSSLESGSLPQFLTTGVTHLLHKSGSPAEPKNYRPITCLSTVYKLLTSILRMKINTHVDSNSIMSASQNGCRNGSCGTKELLLIDMAISQQVRRARKDLSICWIDYKKAYDSVPHSWLKRVLELYKIDATLRAFLESCMGQWRTVLRYPGCRQIQGNDEPVWIKRGIFQGDSLSPLWFCLALNPVSTLLENSGLGYRLRKDGQVISHLLYMDDLKLFAPNKLQLMELLKVTETFSSAIGMEFGVDKCAVMYVKRGKIMGSEGLQLSDSIHLRSLSSSESYKYLGMSEALGINVTDMKQSLRERFFGRLKKVLNSLLSGGNKVRAFNGWVMPVLMYSFGILKWTQTELDALDRRVRTLLTENRMHHPRSSVTRLYIPRKCGGRGFLNAKTLHNREVCSLREYFLKADVGMHRDVAAVDKGLTPLSMAKENWRKPVVLTTDDRMKEWQGKELHGRFYRALHGPDVDFLASVSWLRFGDLFGETEGFVCAIMDEVMLTNNYRKYIMKDGTVDVCRACHLPGESIRHIISGCSRLANGEYLHRHNQVARIIHQQLALKFNLVELEVPYYKYVPDPVLVKDHVTLYWDQSIITDRTIVANKPDIVVIDRSARRVMIIDVTIPHDENLVKAEKEKQIKYLDLAHEVRDMWNMDSVIIVPIVVSANGLIAKSLDEHLSKLSLGGWIKGLIQKAVLLDTARIVRRFLSLQP

SEQ ID NO: 28684 - protein, 1202 aa, Sesamia nonagrioides
MLTRAATRRARPPPPDSSLSTASPPPVSSATVNAVRTPAVVVASSSSDEYFSPPTSPTPVRRQARGRPPKSLGLRGHPAPSRVPAAGGCVQRMRWTQTMNENVMRVYYGATEGGTNLTAYRERMLSLFQALEPTVNVSAQRLSDQVRVIQRNHRLDDIALDRLRSEVLSNQIAPTLTQTAAQASIIDAVPPRSNRVEEEVDRVETVSSQYNDRLRSALEDAFRDYRSTPTNLRPRLPRLPMHKKNRALVCALDSQLKNFFESSEDLIDTHSILYCAAVAACQLAKVKFPNCEEATRPKLAVPAWQRRIERRIDGTRVLIGKLYCFREGNTRPRVMRFVRQAFSGTGISPREYINNVTERIDFLKQKVCAWASRIRRYKKRVDRYTQNRMFQSDERWVYRAWERPEQNEADECRPDDATTSAFWRGIWSVSVCHTEGDWTQDVEQVCEAIPEMDNILITPLDVATAVRSLPNWKSPGPDGLHNFWLKWLSSSHTCLASQFQSSLESGSLPQFLTTGITHLLHKSGSTAEPKNYRPITCLPTVYKVLTSILKAKINNHLDSNSIMSVSQNGCRSGSRGTKELLLIDMAISQQVRRSRKDLSTCWIDYKKAYDSVPHTWLMRVLELYKINATLRTFLRSCMGQWKTVLRYPGSRQIQGNDEPVWIKRGIFQGDSLSPLWFCLALNPLSTLLEDSGLGYQLKRGGQVISHLLYMDDLKLFAPNKLHLMKLLNVTETFSSGIKMEFGVDKCAVMHVKRGQIMESEGITLPDSIHLRSLSSIESYKYLGMSEALGINDADMKQSLKERFFGRLKKVLNSLLSGGNKVRAFNGWVMPVLMYSFGILKWTQTELDALDRRVRTLLTANRMHHPRSSVMRLYIPRKCGGRGFLNAKTLHNREVFSLREYFFKTVVGMHHDVVTVDKGLTPLSMAKENWHKPIILTTDDRKMVWQSKELHGRFYRALHGPDVDFLASVSWLRFGDLFGETEGFVCAIMDEVILTNNYRRYIMKDGTIDVCRACHHPGESIRHIISGCSRLANSEYLHRHNQVARIIHQQLALKYKLVDSEVPYYKYVPDPVLENDHVTLYWDRSIITDRTIVANKPDIVVIDRLARLAMIVDVTIPHDGNLVKAEKEKQMKYLDLAHEVVDMWNVNSAVIVPIVVSANGLIAKSLDQHLLRLSLGSWIKGLIQKAVLLDTARIVRRFLSLEP

SEQ ID NO: 28685 - protein, 1202 aa, Sesamia nonagrioides
MLTRQAARRARSPPPDSSPSSASPPPVPSANVSAVTTPAAVVASSSSDEYFSPPTSPRPVRRQGRGRPPKSLGLRGHPAPSRVPAAGGCVQRMRWTQTMNENVMRAYYRATEGGTNLTAYRERMLSLFQALEPTVNVSAQRLSDQVRVIQRNHRLDDIALDRLRSEVLSNQITPTLTQTAAQASIIDAAPPRSNRVEEEDDRVETVSSQYNDRLRNALEDAFRDYRSTPTDLRPRLPRLPMHKKNRALVCALDSLLKNFFESSEDLIDTHSILYCAAVAACRLAKVKFPNCEEAARPKPAVPAWQRRIERRIDGTRVLIGKLYCFRDGNTRPRVMRFVRQAFSGTGISPREYINHLTERIDFLKQKVCAWASRIRRYKRRVDRYTQNRMFQSDERWVYRAWERPEQNEADVCRPDDATTSAFWRGIWSVSVCHTEVNWIQNVEQVCETIPEMDTILITPSDVAAAVRSLPNWKSPGPDGLHNFWLKWLSSSHTCLASQFQSSLESGSLPQFLTTGITHLLHKSGSTAEPKNYRPITCLPTVYKVLTSILKAKINKHLNSNSIMSVSQNGCKNGSRGTKELLLIDMAISQQVRRSRKDLSTCWIDYKKAYDSVPHTWLMRVLELYKVNATLRTFLRSCMGQWKTVLRYPGSRRIQGNDEPVWIKRGIFQGDSLSPLWFCLALNPLSTLLEDSGLGYRLKRGGQVISHLLYMDDLKLFAPNKLHLMKLLNVTETFSSGIKMEFGVDKCAVMHVKRGQIMESEGITLPDSIHLRSLSSFESYKYLGMSEALGINDADMKQSLKERFFGRLKKVLKSLLSGGNKVRAFNGWVMPVLMYSFGILKWTQTELDALDRRVRTLLTANRMHHPRSSVMRLYIPRKCGGRGFLNAKTLHNREVCSLREHFFKTVVGMHHDVVTVDKGLTPLSMAKENWHKPIILTTDDRKMIWQSKELHGRFYRALHEPDVDFLASVSWLRFSDLFGETEGFVCAIMDEVILTNNYRRYIMKDGTIDVCRACHHPGESIRHIISGCSRLANSEYLHRHNQVARIIHQQLALKYKLVDSEVPYYKYVPDPVLENDHVTLYWDRPIITDRTIVANKPDIVVIDRLARLAMIVDVTIPHDGNLVKAEKEKQIKYLDLAHEIVDMWNVNSAVIVPIVVSANGLIAKSLDQHLLRLSLGSWIKGLIQKAVLLDTARIVRRFLSLEP

SEQ ID NO: 28686 - protein, 962 aa, Sesamia nonagrioides
MHKKNRALVSALDSQLKNVFESSEDLIDTHSILFCGAVAACRLANIKFPNCDEANRPRPAVPAWQHRIERRIDGARVLIGKLYCFREGNTRPRVMRFVRQAFSGTGISPREYISHVTERIDFLKQKVCAWASRIRRYKRRVDRYTQNRMFQSDERWVYRAWERTEQNEADVCRPDDAATSAFWRSIWSVPVCHAEGDWIQDVEQVCEMIPEMDTILITPIDVATAVRSLPNWKSPGPDGLHNFWLKWLSSSHTCLASQFQSSLESGSLPQFLTTGITHLLHKSGSTAEPNNYRPITCLPTVYKVLTSILKAKINKHLDSNSIMSVSHNGCRSGSRGTKELLLIDMAISQQVRRSRKDLSTCWIDYKKAYDSVPHTWLMRVLELYKVNATLRTFLRSCMGQWKTVLRYPGSRRIQGNDEPVWIKRGIFQGDSLSPLWFCLALNPLSTLLEDSGLGYRLRRGGQVISHLLYMDDLKLFAPNKLHLVKLLNVTETFSSGIKMEFGVDKCAVMHVKRGQIMESEGITLPDSIHLRSLSSVESYKYLGMSEALGINDADMKQSLKERFFGRLKKVLKSLLSGGNKVRAFNGWVMPVLMYSFGILKWTQTELDALDRRVRTLLTANRMHHPRSSVMRLYIPRKCGGRGFLNAKTLHNREVCSLREHFLKTVVGMHHDVVTVDKGLTPLSMTKENWHKPLILTTNDRKMIWQSKELHGRFYRALHEPDVDFLASVSWLRFSDLFGETEGFVCAIMDEVILTNNYRRYIMRDGTIDVCRACHHPGESIRHIISGCSRLANGEYLHRHNQVARIIHQQLALKYKLVDSEVPYYKYVPDPVLENDHATLYWDRSIITDRTIVANKPDIVVIDRLARLAMIVDVTIPHDGNLVKAEKEKQIKYLDLAHEVVDMWNVNSAVIVPIVVSANGLIAKSLDQHLLRLSLGSWIKGLIQKAVLLDTARIVRRFLSLEP

SEQ ID NO: 28687 - protein, 1202 aa, Sesamia nonagrioides
MLTRAAKRRARPPPPDSSLSTASPPPVSSATVNAVRTPAVVVASSSSDEYFSPPTSPTPVRRQGRGRPPKSLGLRGHPAPSRVPAAGGCVQRMRWTQTMNENVMRAYYGATEGGTNLTAYRERMLSLFQALEPTVNVSAQRLSDQVRVIQRNHRLDDIALDRLRSEVLSNQIAPTLTQTAAQASIIDAVPPRSNRVEEEDDRVETVSSQYNDRLRSALEDAFRDYRSTPTNLRPRLPRLPMHKKNRALVCALDSQLKNFFESSEDLIDTHSILYCAAVAACRLAKVKFPNCEEATRPKLAVPAWQRRIERRIDGTRVLIGKLYCFREGNTRPRVMRFVRQAFSGTGISPREYINNVTERIDFLKQKVCAWASRIRRYKKRVDRYTQNRMFQSDERWVYRAWERPEQNEADECRPDDATTSAFWRGIWSVSVCHTEGDWTQDVEQVCEAIPEMDNILITPLDVATAVRSLPNWKSPGPDGLHNFWLKWLSSSHTCLASQFQSSLESGSLPQFLTTGITHLLHKSGSTAEPKNYRPITCLPTVYKVLTSILKAKINNHLDSNSIMSVSQNGCRSGSRGTKELLLIDMAISQQVRRSRKDLSTCWIDYKKDYDSVPHTWLMRVLELYKINATLRTFLRSCMGQWKTVLRYPGSRQIQGNDEPVWIKRGIFQGDSLSPLWFCLALNPLSTLLEDSGLGYRLKRGGQVISHLLYMDDLKLFAPNKLHLMKLLNVTETFSSGIKMEFGVDKCAVMHVKRGQIMESEGITLPDSIHLRSLSSIESYKYLGMSEALGINDADMKQSLKERFFGRLKKVLNSLLSGGNKVRAFNGWVMPVLMYSFGILKWTQTELDALDRRVRTLLTANRMHHPRSSVMRLYIPRKCGGRGFLNAKTLHNREVFSLREYFLKTVVGMHHDVVTVDKGLTPLSMAKENWHKPIILTTDDRKMVWQSKELHGRFYRALHGPDIDFLASVSWLRFGDLFGETEGFVCAIMDEVILTNNYRRYIMKDGTIDVCRACHHPGESIRHIISGCSRLANSEYLHRHNQVARIIHQQLALKYKLVDSEVPYYKYVPDPVLENDHVTLYWDRSIITDRTIVANKPDIVVIDRLARLAMIVDVTIPHDGNLVKAEKEKQMKYLDLAHEVVDMWNVNSAVIVPIVVSANGLIAKSLDQHLLRLSLGSWIKGLIQKAVLLDTARIVRRFLSLEP

SEQ ID NO: 28688 - protein, 1203 aa, Sesamia nonagrioides
MLTRSAARQRARPPSPDSLLSSASPPPVSSATVNAVTTPAAAVALSSSDEYFSPPTSPTPVRRQGRGRPPKSLGLRGHPAPSRVPAAGGCVQRMRWSQTMNENVMRAYYGATEGGTNLTAYRERMLSLFQALEPTVNVSVQRLSDQVRVIQRNHRLDDTALDRLRSEVLSNQIAPTLTQTAALASIIDAVPPRSNRVEEEDDRVETVSSQYNDRLRSTLEDAFREYRSTPTDLRPRLPRLPMHKKNRALVSALDSQLKNVFESSEDLIDTHSILFCAAVAACRLANIKFPNCDEANRPKPAVPAWQHRIERRIDGARVLIGKLYCFREGNTRPRVMRFVRQAFSGTGISPREYLTHVTERIDFLKQKVCAWANRIRRYKRRVDRYTQNRMFQSDERWVYRAWERSELNEADVCRPDVAATSAFWRSIWSVPVCHAEGDWIQNVEQVCEMIPEMDTILITPIDVATAVRSLPNWKSPGPDGLHNFWLKWLSSSHTCLASQFQSSLESGSLPQFLTTGITHLLHKSGSTAEPNNYRPITCLPTVYKVLTSILKAKINKHLDSNSIMSVSQNGCKSGSRGTKELLLIDMAISQQVRRSRKDLSTCWIDYKKAYDSVPHTWLMRVLELYKINATLRTFLRSCMGQWKTVLRYPGSRRIQGNDEPVWIKRGIFQGDSLSPLWFCLALNPLSTLLEDSGLGYRLKRGGQVISHLLYMDDLKLFAPNKLHLMKLLNVTETFSSGIKMEFGVDKCAVMHVERGQIMESEGITLPDSIHLRSLSSFESYKYLGMSEALGINDADMKQSLKERFFGRLKKVLKSLLSGGNKVRAFNGWVMPVLMYSFGILKWTQTELDALDRRVRTLLTANRMHHPRSSVMRLYIPRKCGGRGFLNAKTLHNREVCSLREHFLKTVVGMHHDVVTVDKGLTPLSMAKENWHKPIILTTDDRKMIWQSKELHGRFYRALHGPDVDFLASVSWLRFGDLFGETEGFVCAIMDEVILTNNYRRYIMKDGTIDVCRACHHPGESIRHIISGCSRLANSEYLHRHNQVARIIHQQLALKYKLVDSEVPYYKYVPDPVLENDHVTLYWDRSIITDRTIVANKPDIVVIDRLARLAMIVDVTIPHDGNLVKAEKEKQMKYLDLAHEVVDMWNVNSAVIVPIVVSANGLIAKSLDQHLLRLSLGSWIKGLIQKAVLLDTARIVRKFLSLEP

SEQ ID NO: 28689 - protein, 1199 aa, Mamestra configurata
MLTRAALQRARPPPPDPSLSSASPPPDIGSPLSPAVAVASSSSDEYFSPPTSPTPVRRQGRGRPPRGLGPRGQPAPSRVPATGGCVQRMRWTQSMNENVMRAYYGSTEGGTNLTAYRVRMLSLFQDLEPTVNVSAQRLSDQVRVIQRNHRLDDAALDRLRSEVLNNLIISTPTQTAVHAPVNGRITPRPNNVSDEVDDRVVTVSSQCNDRLRSALEDALREYRSTPTELRPRLPRLPMHKKNRALVCALDSLLQNIFESSESLVDTHSILYCGAVAACRIANVKFPGCDEAIRPKPAAPAWQRRIERRIDETRALIGKLYCFREGNTRPRVMRFVRRAFSGTEISPRDFTSRVTERIDFLKQKVCAWASRIRRYKRRVDRYSQNRMFQSDERWVYRAWERPEQSVTDVCRPDDVATSIFWRSIWSVPICHAEGGWMRDVERVCEAIPQMEKITITTLDVAKAVRPLPNWKSPGPDGLHNFWLKWYSSSHALLASQFQSSLDSGSLPQFLTTGVTHLLHKTGSPTEPKNYRPITCLSTVYKLLTSILRAKINEHIESNSIMSASQNGCRKGSRGTKELLLIDMAISQQVRRSRKDLSTCWIDYKKAYDSVPHTWLMKVLELYKIDATLRTFLESCMRQWKTVLRYPGCRPIQGSDEPVWIKRGIFQGDSLSPLWFCLALNPLSTLLEDSGLGYRLRRGGQAISHLLYMDDLKLFAPNNLRLMELLKVTETFSSAIRMEFGVDKCAVMHVKKGEIMESEGIHLSDSIQVRSLSSTETYKYLGMLEALGINGTDMKQSLRERFFGRLKKVLNSLLSGGNKVRAFNGWVMPVLMYTFGILKWTQTELDALDRRVRTLLTANRMHHPRSSVMRLYIPRKCGGRGFLNAKTLHNREMCSLREYFLKADVGMHRDVVAVDKGLTPLSMAKENWRTPVILTTDDRKEVWKGKELHGRFYRALHGSDVDFSASVAWLRFGDLFGETEGFVCAIMDEVILTNNYRRHIMKDGTVDMCRACHRPGESIRHIISGCSRLANGEYLHRHNQVARIIHQQLALKYNLVDSEVPYYKYVPDPVLENDHVTLYWDRSIITDRTIVANKPDIVVIDRLARRTMIIDVTIPHDENLVKAEKEKQIKYLDLAHEVVDMWNVESAVIVPIVVTANGLMAKSFDDHLSKLALRSWVKGLIQKAVLLDTARIVRRFLSLEP

SEQ ID NO: 28690 - protein, 1199 aa, Noctua janthe
MITRAAYRRARLTTPDSSLSSASPPPDPGSPVSPAAAVASSSSDEYFSPPTSPTPVRRQGRGRPPKSLGLRGHPAPSRVPAAGGCVQRMRWTQTINENVMRAYYGSTEGGTNLTAYRVRMLSLFQVLEPIVNVSAQRLSDQVRVIQRNHMLDDAALDRLRSEVLSNRIVLTPAQTAVQASTIDATPPRSNPAVVEEDDRVAMVSSQCNDRLRSALEDALREYRSTPTKLRPRLPRLPMHNKNRALVCALDSQLKNIFESSENLVDTHSILYCGAVAACRLANVKFPNYDVAIRPKPAVPTWQRRIECRIDEARVLIGKLHCFREGNTRPRVMRFVRRAFSGTGISPQEYMSRVTERIDFLKQKVYAWANRIRRYKRRVDRYSQNRIFQSDERWVYRAWERPEQNMTDVCRPDDAATSSFWRSIWSVPVCHTEADWLRDVERACEPIPEMEPILITSIDITRAVRPLPNWKSPGPDGLHNFWLKWLSSSHTCLASQFQSSLESGSLPQFLTTGVTHLLHKSGSPAEPKNYRPITCLSTVYKLLTSILRVKINTHIDKNFIMSASQNGCRNRSRGTKELLLIDMAISQQVRRSRKDLSTCWIDYKKAYDSVPHTWLMRVLELYKIDATLRAFLESCMGQWRTVLRYPGCRQIQGNDEPVWIKRGIFQGDSLSPLWFCLALNPLSTLLEDSGLGYRLRRGGQVISHLLYMDDLKLFAPNKLRLMELLKVTETFSNAIRMEFGVDKCAVMYVKRGEIMESEGIQLSDSIHLRSLSSSESYKYLGMSESLGINVTDMKQSLRERFFGRLNKVLNSLLSGGNKVRAFNGWVMPVLMYSFGVLKWTQTELDALDRRVRTLLTANRMHHPRSSVMRLYIPRKCGGRGFLNAKTLHNREICSLREYFLKTEVGMHRDVVAVDKGLTPLSMAKENWRKPVVLTTDDRKEVWQGKELHGRFYRALHGPDVDFLASVSWLRFGDLFGETEGFVCAIMDEVMLTNNYRKYIMKDGTVDVCRACHRPGESIRHIISGCSRLANGEYLHRHNQVARIIHQQLALKYKLVESEVPYYKYVPDPVLEKDHVTLYWDRSIITDRTIVANKPDIVVIDRLARRVMIVDVTIPHDENLVKAEKEKQIKYLDLAHEVVDMWNVNSAIIVPIVVTANGLIAKSLDDHLSRLSLGGWIKGLIQKAVLLDTARIVRRFLSLEP

SEQ ID NO: 28691 - protein, 931 aa, Mythimna ferrago
MYLYNNNNNKKKRMLKFPNIDGTIRPKTAVPAWQCRIERRIDEARILIGKLHCFREGNTRPRVMRFVRRAFLGTGISPQGYMSRVTERIDFLKQKVCAWASRIRRYKRRVDRYSQNRMFQSDERWVYRAWERPEHSVTDECRPDDLATITFWRNIRSVPVSHTEGGWMRDVERVCEAIPEMEKVTITPEDVARAVRPLPNWKSPGPDGLQNFWLKWYSSSHAPLASQFQSILESGSLPEYLTTGVTHLLHKTGNPVDPKNYRPITCLSTVYKLLKSILRAKINIHIENNQIISPSQNGCRNGSRGTKELLLIDMAISQQTRRSRKDLSTCWIDYKKAYDSVPHTWLMRVLELYKIDITLRTFLESCMRQWKTVLRYPGCRPIQGNDEPIWIKRGIFQGDSLSPLWFCLALNPLSTLLKDSGLGYRLRRGGQVISHLLYMDDLKLFAPSNLQLMELLKVTETFSSAIRMEFGVDKCAGMHVKRGEIMESEGIHLLDSIHLRSLSSTETYRYLGMSEALGINNADMKQSLKERFFGRLKKVLNSLLSGGNKMRAFNGWVMPVLMYSFGILKWTQTELDALDRRVRTLLTANRMHHPRSSVMRLYIPRKCGGRGFLNAKTLHNREVCSLREYFLKTDVGMHRDVVAVDKGLTPLSMAKEDWHKPVIMTTDNRMEIWKGKELHGRFFRALHEPDVDFLASVAWLRFSDLFGETEGFVCAIMDEVILTNNYRRYIMKDGTVDVCRACHRPGESIRHIISGCSRLANGEYLHRHNQVARIIHQQLALKYNLVDLEVPYYKYVPDPVLENDHVTLYWDRSIITDRTIVANKPDIVVIDRLARRAMIVDVTIPHDENLVKAEKEKQIKYLDLAHEVVDMWNVDSAIIVPIVVTVNGLIAKSFDDHLSKLSLRGWIKGLIQKAVLLDTARIVRRFLSLEP

SEQ ID NO: 28692 - protein, 1200 aa, Mythimna ferrago
MLTRSATRRARHPPTGSLLSSASPPPDPGSPVSPVAAVASSSSDEYFSPPTSPTPVRRPGRGRPPNGLGPRGQPAPSRVPAAGGCVQRMKWTQSINENVMRAYYRATEGGTNLTAYRVRMLSLFQELEPSVNVTTQRLSDQVRVIQRNHRLDDAALDRLRSEVLSNRIISTPIQTQTAAPRATDTIMPRPNYSDDEADDRVVTVSSQCNDQLRSALEDALREYRSTPIALRPCLPRLPMHKKNRALVCALDSLLENVFESSVNLVDTHSILYCGAIAACRLANVKLPSCDGATRPKPAVPAWQCRIERRIDGARALIGKLYCFREGNTRPRVMRYVRRAFSGTGVSPREYLAHVTERIDFLKQKVCAWANRIRRYKRRVDRYSQNRMFQSDERWVYRDWERPEQSVTDVLRPDVAATNEFWRSIWSVPVCHTEGGWMRDIERVCEAIPEMEKVFISPIDVARAVRPLPNWKSPGPDGLQNFWLKWYSSSHALLASQFQSSLESGSLPQFLTTGVTHLLHKTGSTAEPKNYRPITCLSTVYKLLTSILRTKINNHIENNSIMSASQNGCRNGSRGTKELLLIDMAISQQVRRSRKDLSTCWIDYKKAYDSVPHTWLMRVLELYKIDATLRTFLESCMGEWNTVLRYPGCRSIRGDDEPIWIKRGIFQGDSLSPLWFCLALNPLSTLLEDSGLGYRLRRGGQVLSHLLYMDDLKLIAPNKLQLMELLKVTETFSSAIRMEFGVDKCAVMHVKRGEIMESEGIQLSDSIHLRSLSSTETYKYLGMSEALGINVTDMKQSLRERFFSRLKKVLNSLLSGGNKVRAFNGWVMPVLMYSFGILKWTQTELDALDRRVRTLLTANRMHHPRSSVMRLYIPRKCGGRGFLNAKTLHNREVCSLREYFQKTDVGMHRDVVAVDKGLTPLSMAKENWRKPMVLTTDDRREVWKNKELHGRFYRALHEPDVDFGASVAWLRFSNLFGETEGFICAIMDEVILTNNYRRYIMKDGTVDVCRACHRPGESIRHIISGCSRLANGEYLHRHNQVARIIHQQLALKYKLMESEVPYYRYVPDPVLENDHVTLYWDRSIITDRTIIANKPDIVVIDRLARRAMIVDVTIPHDENLVKAEKEKKIKYLDLAHEVVDLWNVDSAVIVPIVVSVNGLIAKSFDDHLSKLALRGWIKGLIQKAVLLDTARIVRRLMSLEP

SEQ ID NO: 28693 - protein, 868 aa, Mythimna ferrago
MRFVRRAFSGTGISPREYSSHVTERIDFLKQKVCAWASRIRRYKRRVDRYSQNRMFQSDERWVYRAWERPEQNVTDVLRPDDAATNAFWRSIWSVPVCHTEGGWMRDVERVCEAIPEMEKVIISSTDVARAVRPLPNWKSPGPDGLQNFWLKWYSSSHALLASQFQSSLESGSLPQFLTTGVTHLLHKTGSTAEPKNYRPITCLSTVYKLLTSILRTKINKHIENNSIMSASQNGCRNGSRGTKELLLIDMAISQQVRRSRKDLSTCWIDYKKAYDFVPHTWLMRVMELYKIDATLRTFLESCMGGWNTVLRYPGCRTMRGDDEPIWIKRGIFQGDSLSPLWFCLALNPLSTLLEDSGLGYRLRRGGQVLSHLLYMDDLKLIAPNKLRLMELLKVTENFSSAIRMEFGVDKCAVMHVKRGEIMESEGVQLSDSIHLRSLSSTETYKYLGMSEALGINITDMKQSLKERFFGRLKKVLNSLLSGGNKVRAFNGWVMPVLMYSFGILKWTQTELDALDRRVRTLLTANRMHHPRSSVMRLYIPRKCGGRGFLNAKTLHNREVCSLREYFLKTDVGMHRDVVAVDKGLTPLSMAKENWRKPVVLTTDDRKEVWKGKELHGRFFRALHEPDVDFSASVAWLRFSNLFGETEGFVCAIMDEVILTNNYRRHIMKDGTIDVCRACHRPGESIRHIISGCSRLANGEYLHRHNQVARILHQQLALKYNLVDSEVPYYKYVPDPVLENDHVTLYWDRSIITDRTIVANKPDIVVIDRLARRAMIVDVTIPHDENLVKAEKEKQIKYLDLAHEVVDMWNVDSAIIVPIVVTANGLIAKSFDDHLSKLSLHGWIKGLIQKAVLLDTARIVRRFLSLEP

SEQ ID NO: 28694 - protein, 868 aa, Mythimna ferrago
MRFVRRAFLGTGISPQGYMSRVTERIDFLKQKVCAWASRIRRYKRRVDRYSQNRMFQSDERWVYRAWERPEHSVIDECRPDDLATITFWRNIWSVPVSHTEGDWMRDVERVCEAIPEMEKVTITPEDVAKAVRPLPNWKSPGPDGLQNFWLKWYSSSHAPLASQFQSILESGSLPEYLTTGVTHLLHKTGNPVDPKNYRPITCLSTVYKLLTSILRAKINIHIENNQIISPSQNGCRNGSRGTKELLLIDMAISQQTRRSRKDLSTCWIDYKKAYDSVPHTWLMRVLELYKIDITLRTFLESCMRQWKTVLRYPGCRPIQGNDEPIWIKRGIFQGDSLSPLWFCLALNPLSTLLEDSGLGYRLRRGGQVISHLLYMDDLKLFAPNKLRLMELLKVTENFSSAIRMEFGVDKCAVMHVKRGEIMESEGVQLSDSIHLRSLSSTETYKYLGMSEALGINVTDMKQSLKERFVGRLKKVLNSLLSGGNKVRAFNGWVMPVLMYSFGILKWTQTELDALDRRVRTLLTANRMHHPRSSVMRLYIPRKCGGRGFLNAKTLHNREVCSLREYFLKTDVGMHRDVVAVDKGLTPLSMAKENWRKPVVLTTDDRKEVWKGKELHGRFFRALHEPDVDFSASVAWLRFSNLFGETEGFVCAIMDEVILTNNYRRHIMKDGTVDVCRACHRPGESIRHIISGCSRLANGEYLHRHNQVARILHQQLALKYNLVDSEVPYYRYVPDPVLENDHVTLYWDRSIITDRTIVANKPDIVVIDRLARRVMIVDVTIPHDENLVKAEKEKQIKYLDLAHEVVDMWNVDSAIIVPIVVTANGLIAKSFDDHLSKLSLHGWIKGLIQKAVLLDTARIVRRFLSLEP

SEQ ID NO: 28695 - protein, 1206 aa, Ochropleura plecta
MLTRRRAQEQQALPPSPGSSLSSASQSPGRATRVSAVSPVAAVASSSSDEFFSPPSSPPPPTRQRRGRGRPPAGLGSRGQQAPIRVPAAGGNVSRMRWTSSINANVMRAYYGSTEGGTNLTAYRVRMLSLFQDLEPTINVSAQRLSDQVRVIQRNHMLDDAALDRLRSEVLSNRIILTTPQTAVQASVIDGMQPRSDPAVVEEDDRVATVSSQCNERLRSALEDALRDYRSTPAELRPRLPRLPMHKKNRALVCALDSQLKNLFESSEDLVDTHSILYCGAVAVCRLANVKFPSCDVATRPKPSVPAWQCRIERRIDEARVLIGKLYCFREGNTRPRVMSFVRRAFSGTGISPQEYMSRTTERIDFLKQKVYAWANRIRRYKRRVDRYSQNRIFRSDERWVYRAWERPEQSVTDVCRPDDVATSSFWHSIWSVPVCHTEADWMRDVERVCETIPDMEPILITSLDIASAVRPLPNWKSPGPDGLHNFWLKWLTSSHTRLASQFQSCLESGSMPQFLTTGVTHLLYKSGSPAEPKNYRPITCLSTVYKLLTSILRAKINSHIDKNSIMSASQNGCRNGSRGTKELLLIDMAISQQVRRSRKDLSTCWIDYKKAYDSVPHTWLKRVLELYKIDATLRAFLESCMGQWRTVFRYPGCRQIQGNNEPVWIKRGIFQGDSLSPLWFCLALNPLSTLLEDSGLGYRLRRGGQVISHLLYMDDLKLFASNKLRLMELLKVTETFSNAIRMEFGVDKCAVMYVKRGEIMESEGIQLSDSIHLRSLSSSESYKYLGMSEALGINVADMKQLLRERFFGRLKKVLKSLLSGGNKVRAFNSWVMPVIMYSFGILKWTQTELDALDRRVRTLLTGNRMHHPRSSVMRLYIPRKCGGRGFLNAKTLHNREVCSLREYFLKTDVGMHRDVVAVDKGLTPLSMAKENWRKPVVLTTDDRKVVWQGKELHGRFYKALHGPDVDFLASVSWLRFGDLFGETEGFVCAIMDEVMLTNNYRKYIMKDGTVDVCRACHRPGESIRHIISGCSRLANSEYLHRHNQVARIIHQQLALKYNLVESEVPYYKYVPDPVLEKDHVTLYWDRSIITDRTIVANKPDIVVIDRSARRVMIIDVTIPHDENLVKAEKEKQLKYLDLAHEVVDMWNVNSAIIVPIVVTANGLIAKSLDEHLSKLSLGGWIKGLIQKAVLLDTARIVRRFLSLEP

SEQ ID NO: 28696 - protein, 1206 aa, Ochropleura plecta
MLTRRRAQEQKALPPSPGSPLSSALQPPGRATRVSAVSPVAAVASSSSDEFFSPPSSPPPPTRQRRGRGRPPAGLGSRSQQAPIRVPAVGGNVSRMRWTSSINANVMRAYYGSTEGGTNLTAYRVRMLSLFQDLEPTINVSAQRLSDQVRVIQRNHMLDDAALDRLRSEVLSNRIILTTPQTAMQASVIDGMQPRSDPAVVEEDDRVATVSSQCNERLRSALEDALRDYRSTPAELRPRLPRLPMRKKNRALVCALDSQLKNLFESSEDLVDTHSILYCGAVAVCRLTNVKFPSCDVATRPKPSVPAWQCRIERRIDEARVLIGKLYCFREGNTRPRVMRFVRRAFLGTGISPQEYMSRTTERIDFLKQKVYAWANRIRRYKRRVDRYSQNRMFRSDERWVYRAWERPEQSVTDVCRPDDVATSSFWHSIWSVPVCHTEADWMRDVERVCETIPEMEPILITSLDIASAVRPLPNWKSPGPDGLHNFWLKWLSSSHTRLASQFQSCLESGSLPQFLTTGVTHLLYKSGSPAEPKNYRPITCLSTVYKVLTSILRAKINSHIDNNSIMSASQNGCRNGSRGTKELLLIDMAISQQVRRSRKDLSTCWIDYKKAYDSVPHTWLKRVLELYKIDATLRAFLESCMGQWRTVLRYPGCRQIQGNDEPVWIKRGIFQGDSLSPLWFCLALNPLSTLLEDSGLGYRLRRGGQVISHLLYMDDLKLFAPNKLRLLELLKVTETFSNAIRMEFGVDKCAVMYVKRGEIMESEGIQLSDSIHLRSLSSSESYKYLGMSEALGINVADMKQLLRERFFGRLKKVLKSLLSGGNKVRAFNSWVMPVIMYSFGILKWTQTELDALDRRVRTLLTGNRMHHPRSSVMRLYIPRKCGGRGFLNAKTLHNREVCSLREYFLKTDVGMHRDVVAVDKGLTPLSMAKENWRKPVVLTTDDRKVVWQGKELHGRFYKALHGPDVDFLASVSWLRFGDLFGETEGFVCAIMDEVMLTNNYRKYIMKDGTVDVCRACHRPGESIRHIISGCSRLANSEYLHRHNQVARIIHQQLALKYNLVESEVPYYKYVPDPVLEKDHVTLYWDRSIITDRTIVANKPDIVVIDRSARRVMIIDVTIPHDENLVKAEKEKQLKYLDLAHEVGDMWNVNSAIIVPIVVTANGLIAKSLDEHLSKLSLGGWIKGLIQKAVLLDTARIVRRFLSLEP

SEQ ID NO: 28697 - protein, 868 aa, Hecatera dysodea
MRFVRRAFAGTGISPHEYTSRLTERIDFLKQKVCAWANRIRRYKRRADRYSQNRMFQSDERWVYRAWERPEQSVTDVCRPDDIATTTFWRSIWSVPVRHTEGDWMRDVERVCEAIPQMEKITITPTDIATAVRPLPNWKSPGPDGLHNFWLKWYSSSHAVLASQFQSSLESGSLPQFLTTGITHLLHKTGSPAEPKNYRPITCLSTVYKLLTSILRVKINEHIESNSIMSSSQNGCRKGSRGTKELLLIDMAISQQVRRSRKDLSTCWIDYKKAYDSVPHTWLMKVLELYKIDATLRTFLESCMRQWKTVLRYPGCRPIQGSDEPIWIKRGIFQGDSLSPLRFCLALNPLSTLLEDSGLGYRLRRGGQAMSHLLYMDDLKLFAPNNLRLMELLKVTETFSSDIRMEFGVDKCAVMHVKKGEIMESEGIQLSDSIQVRSLSSTETYKYLGMSEALGINGADMKQSLKERFFGRLKKVLNSLLSGGNKVRAFNGWVMPVLMYSFGILKWTQTELDALDRRVRTLLTANRMHHPRSSVMRLYIPRKCGGRGFLNAKTLHNREMCSLREYFLETDVGMHRDVVAVDKGLTPLSMAKENWRKPVIHTTDDRKEVWKGKELHGRFYRALYGSDVDFSASVAWLRFGDLFGETEGFVCAIMDEVILTNNYRRHIMKDGTVDVCRACHRPGESIRHIISGCSRLANSEYLHRHNQVARIIHQQLALKYKLVNSEVPYYKYVPDPVLENDHVTLYWDRSIITDRTIVANKPDIVVIDRLVRRTMIIDVSIPHDENLVKAEKEKQIKYLDLAHEVVDMWEVDSAVIVPIIVTANGLMAKSFDDHLSKLALRSWVKGLIQKAVLLDTARIVRRFLSLQP

SEQ ID NO: 28698 - protein, 1200 aa, Hecatera dysodea
MMLTRAATLRARHPPPGSPLSSASPPPDIESQVSPTAAVASSSSDEYFSPPTSPTPVRRQGRGRPPRSLGSRGQPAPSRVPAAGGCVQRMRWTQSMNENVMRAYYGSTEGGTNLTAYRVRMLSLFQDLEPAVNVSAQRLSDQVRVIQRSHRLDDAALERLRSEVLNNLIISTQTQTAVQAPVSGANTPQANNDSDEVDDRVVTVSSQYNNRLRSALEDALREYRSTPTELRPRLPRLPMHKKNRALVCALDSLLQNTFVSSENLVDTHSILYCGAVAACRLANVKFPSGDEAIRPKPAAPAWQCRIERRIDEARALIGKLYCFREGNTRPRVMRFVRRAFAGTGISPHEYTSRLTERIDFLKQKVCAWANRIRRYKRRADRYSQNRMFQSDERWVYRTWERPEQSVTDVCRPDDIATTTFWRSIWSVPVRHTEGDWMRDVERVCEAIPQMEKITITPTDIATAVRPLPNWKSPGPDGLHNFWLKWYSSSHAVLASQFQSSLESGSLPQFLTTGITHLLHKTGRPAEPKNYRPITCLSTVYKLLTSILRVKINEHIESNSIMSSSQNGCRKGSRGTKELLLIDMAISQQVRRSRKDLSTCWIDYKKAYDSVPHTWLMKVLELYKIDATLRTFLESCMRQWKTVLRYPGCRPIQGNDEPIWIKRGIFQGDNLSPLWFCLALNPLSTLLEDSGLGYRLRRGGQAISHLLYMDDLKLFAPNNLRLMELLKVTETFSSDIRMEFGVDKCAVMHVKKGEIMESEGIQLSDSIQVRSLSSTETYKYLGMSEALGINGADMKQSLKERFFGRLKKVLNSLLSGGNKVRAFNGWVMPVLMYSFGILKWTQTELDALDRRVRTLLTANRMHHPRSSVMRLYIPRKCGGRGFLNAKTLHNREMCSLREYFLETDVGMHRDVVAVDKGLTPLSMAKENWRKPVIHTTDDRKEVWKGKELHGRFYRALYGSDVDFSASVAWLRFGDLFGETEGFVCAIMDEVILTNNYRRHIMKDGTVDVCRACHRPGESIRHIISGCSRLANSEYLHRHNQVARIIHQQLALKYKLVNSEVPYYKYVPDPVLENDHVTLYWDRSIITDRTIVANKPDIVVIDRLVRRTMIIDVSIPHDENLVKAEKEKQIKYLDLAHEVVDMWEVDSAVIVPIIVTANGLMAKSFDDHLSKLALRSWVKGLIQKAVLLDTARIVRRFLSLQP

SEQ ID NO: 28699 - protein, 982 aa, Hecatera dysodea
MSISQSVSGFLIIYNIIIIIMHKKNRALVCALDSLLKNIFESSENLVDTHSILYCGAVAACRVANVKFSNSDGATRPKNAAPAWQCRIERRIDEARVLIGKLYCFREGNTRPRVMRFVRRAFLGTEISPQEYMSRVTERIDFLKQKVCAWANRSRRYKRRVDRYSQNRMFQSDERWVYRAWERPEQSVTDVCRPDDVTTNTFWRSIWSVPVCHAEGGWMRDVERVCEAIPQMEKITITTVDIATAVRPLPNWKSPGPDGLHNFWLKWYSSSHALLASQFQSSLDSGSLPQFLTTGITHLLHKTGSPAEPKNYRPITCLSTVYKLLTSILRVKINEHIESNSIMSYSQNGCRKGSRGTKELLLIDMAISQQVRRSRKDLSTCWIDYKKAYDSVPHTWLLKVLELYKVDATLRTFLESCMRQWKTVLRYPGCRPIQGNEEPVWIKRGIFQGDSLSPLWFCLALNPLSTLLEDSGLGYRLRRGGQTISHLLYMDDLKLFAPNNLRLMELLKVTETFSSAIRMEFGVDKCAVMHVKKGEIMESEGIQLSDSIQVRSLSSTETYKYLGMSEALGIIGADMKQSLKERFFGRLKKVLNSLLSGGNKVRAFNGWVMPVLMYSFGILKWTQTELDALDRRVRTLLTANRMHHPRSSVMRLYIPRKCGGRGFLNAKTLHNREMCSLREYFLKADVGMHRDVVAVDKGFTPLSMAKENWRKPVIPTTDDRREVWRGKELHGRFYRALHGSDVDFSASVAWLRFGDLFGETEGFVCAIMDEVILTNNYRRHIMKDGTVDVCRACHRPGESIRHIISGCSRLANGEYLHRHNQVARIIHQQLALKYKLVDSEVPYYKYVPDPVLENDHATLYWDRSIITDRTIIANKPDIVVIDRLARRTMIIDVTIPHDENLVKAEKEKQIKYLDLAHEVVDMWNVDSAVIVPIVVTANGLMAKSFDEHLSKLALHGWLKGLIQKAVLLDTARIVRRFLSLEP

SEQ ID NO: 28700 - protein, 1202 aa, Mythimna impura
MIMLTRAATRRARPSPLGSSLSSASPPPDLGSPVSPTAAVASSSSDEYFSPPTSPTPVRRPGRGRPPKSLGPRGQPAPSRVPATGGCVQRMKWTQSMNENVMRAYYGSTEGGTNLTAYRVRMLSLFQELEPTVNVTAQRLSDQVRVIQRNHRLDGAALDRLRSEVLSNRIISTPSQTQTEAPQATDAILPRSNHIDDEADDRVVTVSSQCNDRLRSALEDALREYRSTPIALRPRLPRLPMHKKNRALVCALDSLLENVFESSVNLADTHSILYCGAIAACRLANVKLPSCDGATRPKPAAPAWQCRIERRIDEARALIGKLYCFREGNTRPRVMRYVRRAFSGTEISPREYLSRVTERIDFLKQKVCAWANRIRRYKRRVDRYSQNRMFQSDERWVYRAWERPEQNVTDVTHPDAVATNTFWRNIWSVPVCHTEDGWMREVERVCEAIPEMEKIVISPIDVARAVRPLPNWKSPGPDGLQNFWLKWYSSSHALLASQFQSSLESGSLPQFLTTGVTHLLHKTGSTAEPKNYRPITCLSTVYKLLTSILRTKINKHIDSNSIMSASQNGCRNGSRGTKELLLIDMAISQQVRRSRKDLSTCWIDYKKAYDSVPHTWLMRVLELYKIDATLRTFLESCMGQWNTVLRYPGCRSIRRDDEPIWIKRGIFQGDSLSPLWFCLALNPLSTLLEESGLGYRLRRGGQVLSHLLYMDDLKLIAPNKLRLMELLKVTETFSSAIRMEFGVDKCAVMHVKRGEIMESEGIQLSDSIHFRSLSSTETYKYLGMSEALGINVADMKQSLKERFFGRLKKVLNSLLSGGNKVRAFNGWVMPVLMYSFGILKWTQTELDAVDRRVRTLLTANRMHHPRSSVMRLYIPRKCGGRGFLNAKTLHNREVCSLREYFHKTDVGMHRDVVAVDKGLTPLSMAKENWRKPVVLTTDDRKEVWKSKELHGRFYRALHESDIDFAASVAWLRFSNLFGETEGFICAIMDEVILTNNYRRYIMKDGTVDVCRACHRPGESIRHIISGCSRLANGEYLHRHNQVARIIHQQLALKYNLVDYEVPYYRYVPDPVLENDHVTLYWDRSIITDRTIVANKPDIVVIDRLARRVMIVDVTIPHDENLVKAEKEKQIKYLDLAHEVVDMWNVDSAVIVPIVVTANGLIAKSFDDHLSKLSLRGWIKGLIQKAVLLDTARIVRRFLSLEP

SEQ ID NO: 28701 - protein, 958 aa, Mythimna impura
MCKRNMALVCALDSLLKNVFESSEDLVDTHSILYCGAVAACRLANIKFSSCDVATRPKPAVPAWQCRIEGRIDEARALIGKLYCFREGNTRPRVMRFVRRAFSGTGITPREYMSRVTERIDFLKQKVCAWANRIRRYKRRVGRYSQNRMFQSDEWWVYRAWERPEQSVIDVVRPDDAATNAFWRSIWSVPVCHTEGGWMRDVERVCVDVPEMEKVEITPLDVARAVRPLPNWKSPGTDGLHNFWLKWYSSSHTLLASQFQSSLESGSLPQFLTTGITHLLHKTGSPTEPKNYRPITCLSTVYKLLTSILRAKIYIHIEKNLIMSASQNGCRNGSRGTKELLLIDMAISQQVRRSRKDLSTCWIDYKKAYDSVPHTWLMRVLELYKIDATLRTFLESYKRQWKTVLRYPGCRPIQGNDEPIWMKRGIFQGDSLSPIWFCLALNPLSTLPEDSGLGYRLRRGGQVLSHLLYMDDLKLFAHNNLQLMELLKVTETSSSAIRMEFGVEKCAVMHVKRGEIVESEGIQLSDSIHLRTLSSTETYKYLGMSEALGINVADMKQTLKERFFNRLKKVLNSLLSGGNKVRAFNGWVMPVLMYSFGILKWTQTELDALDKRVRTLLTANRMHHPRSSVMRLYIPRKCGGRGFLNAKTPHNREVCSLREYFLKTDVGMHRDVVSVDKGLTPLSMAKENWRKPVVLTTDDRKEVWKGKELHGRFYRALHEPDVDFLASVAWLRFSNLFGETEGFVCAIMDEVILTNNYRRHIMKDGTVDVCRACHRPGESIRHIISGCSRLANGEYLHRHNQVARIIHQQLALKYNLVDSEVPYYRYVPDPVLENDHVTLYWDRSIITDRTIVANKPDIVVIDRLARRAVIVDVTIPHDENLVKAEKEKQIKYLDLAHEVVDMWNVDSAIIVPIVVTANGLIAKSFDDHLSKLSLRGWIKGQKAVLLDTARIVRRFLSL

SEQ ID NO: 28702 - protein, 1200 aa, Mythimna impura
MLTRTAARRARHPPPGSPLSSASPPPVLGSPMSPAAAVASSSSDEYFSPPTSPTPVRRPGRGRPPKSLGPRGQPAPSRVPAAGGCVQRMRWTQSMNENVMRAYYGSTEGGTNLTAYRVRMLSLFQELEPTVNVTTQRLSDQVRVIQRNHRLDDAALDRLRSEVLSNRIISTPIQTQAAALRATDATLPQSNHVDDEADDRVVTVSSQCNDRLRSALEDALREYRSTPIALRPRLPRLPMHKKNRALVCALDSLLENVFESSVNLADTHSILYCGAIAACRLANVKLPSCDGATRPKPAAPAWQCRIERRIDGARALIGKLYCFREGNTRPRVMRYVRRAFSGTGISPREYLSRVTERIDFLKQKVCAWANRIRRYKRRVDRYSQNRMFQSDERWVYRAWERPEQNVTDVTRPDAVATNTFWRNIWSVPVCHTEDGWMREVERVCEAIPEMEKVVISPTDVATAVRPLPNWKSPGPDGLQNFWLKWYSSSHALLASQFQSSLESGSLPQFLTTGVTHLLHKTGSTAEPKNYRPITCLSTVYKLLTSILRTKINKHIETNSIMSASQNGCRNGSRGTKELLLIDMAISQQVRRSRKDLSTCWIDYKKAYDSVPHTWLMRVLELYKIDATLRTFLESCMGQWNTVLRYPGCRSIRRDDEPIWIKRGIFQGDSLSPLWFCLALNPLSTLLEESGLGYRLRRGGQVLSHLLYMDDLKLIAPNKLRLMELLKVTETFSSAIRMEFGVDKCAVMHVKRGEIMESEGIQLSDSIYLKSLSSTETYKYLGMSEALGINVADMKQSLKERFFDRLKKVLNSLLSGGNKVRAFNGWVMPVLMYSFGILKWTQTELDALDRRVRTLLTANRMHHPRSSVMRLYIPRKCGGRGFLNAKTLHNREVCSLREYFHKTDVGMHRDVVAVDKGLTPLSMAKENWRKPVVLTTDDRREVWKSKELHGRFYRALHESDVDFAASVAWLRFSNLFGETEGFICAIMDEVILTNNYRRYIMKDGTVDVCRACHRPGESIRHIISGCSRLANGEYLHRHNQVARIIHQQLALKYNLVYSEVPYYSYVPDPVLENDHVTLYWDRSIITDRTIVANKPDIVVIDRLARRVMIVDVTIPHDENLVKAEKEKQIKYLDLAHEVVDMWNVDSAIIVPIVVTANGLMAKSLDDHLSKLSLRGWIKGLIQKAVLLDTARIVRRFLSLQP

SEQ ID NO: 28703 - protein, 1082 aa, Phlogophora meticulosa
MSLFQVLEPTVNVSAQRLSDQVRVIQRNHRLDDTALDRLRSEVLNNHIVLNSTQTAVQAPIINATPSPSNHVSEEADDRVVTVSSQCNEKLRSALEDALREYRSTPTELRPRLPRLPMHKKNRALVCNLDSLLKDLFESSGDLVDTHSILYCAAVAACRLANVKFPNNDVAIRPKPAVPAWQSRIECRIDGARVLIGKLYCFREGNTRPRVMRFVRRAFAGTGISPREYMSRIVERIDFLKQKVYAWANRIRRYKRRVDRYSQNRMFQSDERWVYRAWERPEQDVADVHRPDDTTTNTFWRNIWSVPVCHTEAHWIRDVERVCETITEMEKNIITPLDVATAVRPFPNWKAPGPDGLHNFWLKWLGSSHTRLASQFQSCLESGSLPQFLTTGITHLLYKSGSTTEPKNYRPITCLSTVYKLLTSILRAKIAEHIVGNSIMSASQNGCRNGSRGTKELLLIDMAISQQVRRSHKDLSTCWIDYKKAYDSVPHAWLMRVLELYKIDATLRTFLESCMGQWRTVLRYPGCRQIQGNDEPIWIKRGIFQGDSLSPLWFCLALNPLSTLLEDSGLGYRLRRGGQVISHLLYMDDLKLFASNNLQLMELLKITESFSSTIRMEFGVDKCAVMHVKRGEIVESEGIQLPDSIQLRSLSSSDNYKYLGMSEALGINVTDMKQSLKERFFGRLKKVLNSLLSGGNKVRAFNGWVMPVLMYSFGILKWTQTELDALDRRVRTLLTANRMHHPRSSVMRLYIPRKCGGRGFLNAKTLYNREVCNLRDYFFKTEVGMHRDVVAVDKGLTPLSMAKENWRKPVVLTTDDRKQVWQSKELHGRFYRALHGPDVDFIASVSWLRFGDLFGETEGFVCAIMDEVILTNNYRKHIMKDGTVDMCRACHRPGESIRHIISGCSRLANGEYLHRHNQVARIIHQQLALRYKLVESEVPYYKYVPDPVLEDDHVTLYWDRSIITDRTIVANKPDIVVIDRLTRHAMIVDVTIPHDENLVKAEKEKQIKYLDLAHEVVDMWNVDSAVIVSSSYIVVTANGLLAKSLDDHLSRLSLHGWIKGLIQKAVLLDTARIVRRFLSLQP

SEQ ID NO: 28704 - protein, 868 aa, Phlogophora meticulosa
MRFVRRAFAGTGISPREYMSRIVERIDFLKQKVYAWANRIRRYKRRVDRYSQNRMFQSDERWVYRAWERPEQDVADVHRPDDTTTNTFWRNIWSVPVCHTEAHWIRDVERVCETITEMEKIIITPLDVATAVRPLPNWKAPGPDGLHNFWLKWLGSSHTRLASQFQSCLESGSLPQFLTTGITHLLYKSGSTTEPKNYRPITCLSTVYKLLTSILRAKIAEHIVGNSIMSASQNGCRNGSRGTKELLLIDMAISQQVRRSHKDLSTCWIDYKKAYDSVPHAWLMRVLELYKIDATLRTFLESCMGQWRTVLRYPGCRQIQGNDEPIWIKRGIFQGDSLSPLWFCLALNPLSTLLEDSGLGYRLRRGGQVISHLLYMDDLKLFASNNLQLMELLKITESFSSTIRMEFGVDKCAVMHVKRGEIVESEGIQLPDSIQLRSLSSSDNYKYLGMSEALGINVTDMKQSLKERFFGRLKKVLNSLLSGGNKVRAFNGWVMPVLMYSFGILKWTQTELDALDRRVRTLLTANRMHHPRSSVMRLYIPRKCGGRGFLNAKTLYNREVCNLRDYFLKTEVGMHRDVVAVDKGLTPLSMAKENWRKPVVLTTDDRKQVWQSKELHGRFYRALHGPDVDFIASVSWLRFGDLFGETEGFVCAIMDEVILTNNYRKHIMKDGTVDMCRACHRPGESIRHIISGCSRLANGEYLHRHNQVARIIHQQLALRYKLVESEVPYYKYVPDPVLEDDHVTLYWDRSIITDRTIVANKPDIVVIDRLARRAMIVDVTIPHDENLVKAEKEKQIKYLDLAHEVVDMWNVDSAVIVPIVVTANGLLAKSLDDHLSRLSLHGWIKGLIQKAVLLDTARIVRRFLSLQP

SEQ ID NO: 28705 - protein, 1199 aa, Xestia xanthographa
MLTRAAARRARLPSPESSLSSASPPPDPGSPVSPVAAVASSSSDEYFSPPTSPPPVRRAGRGRPPTSLGLRGQQAPSRVPATGGCVQRMKWTQSINENVMRAYYGSTEGGTNLTAYRVRMLSLFQDLEPTVNVSAQRLSDQVRVIQRNHRLDDAALDRLRSEVLSNLIILTPTQTAVHTSVNNVTLPRSNPDVVEEDDRVATVSSQCNYRLRSALEDAFREYRSTPTELRPRLPRLPMHKKNRALVSALDSQLKNIFESSENLVDTHSILFCGAVAACRLANVKFPNCDVATRPKPAVPAWQCRIERRIDEARVLIGKLYCFREGNTRPRVMRFVRRAFSGTEISPQEYMSRVTERIDFLKQKVYAWANRIRRYKRRVDRYSQNRMFQSDDSWVYRAWERPEQNMTDVCRPDDAATSSFWRSIWSVPVCHTESDWMRDVERVCEPIPEMEPILITPLDIAKAVRPLPNWKSPGPDGLHNFWLKWFSSSHTCLASQFQSALESGSLPQFLTTGVTHLLHKSGSPAEPKNYRPITCLSTIYKLLTSILRVKINTHIDKNSIMSASQNGCRNGSRGTKELLLIDMAISQQFRRSRKDLSTCWIDYKKAYDSVPHTWLMRVLELYKIDTTLRTFLESCMGQWKTVLRYPGCRQIQGSDEPVWIKRGIFQGNSLSPLWFCLALNPLSTLLENSGLGCRLRKDGQVISHLLYMDDLKLFAPNKLRLMELLIVTETFSSAIRMEFGVDKCAVMYVKRGEIMESEGLQLSESIHLRSLSSSETYKYLGMSEALGINVTDMKQSLKERFFGRLRKVLNSLLSGGNKVRAFNGWVMPVLMYSFGILKWTQTELDALDRRVRTLLTETRMHHPRSSVMRLYIPRKCGGRGFLNAKTLHNREVCSLREYFLKAEVGMHRDVVAVDKGLTPLSMAKENWHKPEVLTTDDRKEVWQGKELHGRFYRALHGPDVDFLASVFWLRFGDLFGETEGFVCAIMDEVMLTNNYRKYIMKDGTVDVCRACHLPGESIRHIISGCSRLANGEYLHRHNQVARIIHQQLALKYKLVESEVPYYKYVPDPVLEKDHVTLYWDRSIITDRTIVANKPDIVMIDRSARRVMIIDVTIPHDENLVKAEKEKQIKYLDLAHEVRDMWNMNSVIIVPIVVTANGLIAKSFDDHISKLSLGGWIKGLIQKAVLLDTARIVRRFLSLQP

SEQ ID NO: 28706 - protein, 1202 aa, Cosmia trapezina
MLTRSAARARPPPPDSSLSPASPPPVSSPIVGAVITPAAAVASSSSDEYFSPPTSPTPVRRQGRGRPPRSLGLRGQPAPSRVPAAGGCVQRMRWTQSMNENVMRAYYGSTEGGTNLTAYRVRMLSLFQELEPTVNVSAQRISDQVRVIQRNHRLDDAALDKLRSEVLSNHIISNPTQTAVQPSIIDALPPRSNHVVEEEDDRVATVSSQCNDRLRDALEDAFCEYRSTPTELRPRLPRLPMHKKNRALMCALDSLLKDFFESSENLVDTHSILYCAAVAACRLANVKFPNCDGATRPKPAVPAWQCRIERRIDGARVLIGKLYCFRQGNTRPRVMRFVRRAFSGTGISPPEYMSRVTERIDFLKQKVCAWASRIRRYKRRVDRYTQNRMFQSDERWVYRAWERPEQNVTDVCRPDDAATSAFWRSIWSVPVCHAEAGWMKDVEGVCEAIPEMEPVLITPLDVARAVRPLPNWKSPGPDGLHNFWLKWLISSHTRLASQFQSSLESGSLPQFLTTGVTHLLHKSGSPAEPKNYRPITCLSTIYKLLTSILRAKINMHIDSNSIMSTSQNGCRNGSRGTKELLLIDMAISQQVRRSRKDLSTCWIDYKKAYDSVSHAWLMRVLELYKIDATLRTFLESCMGQWRTVLRYPGCRRIRGNDEPVRIKRGIFQGDSLSPLWFCLALNPLSTLLEDSGLGYRLRRGGQVISHLLYMDDLKLFAPNKLRLMELLKVTESFSSAIRMEFGVDKCAVMHVKRGEIMESEGIQLSDSIHLRSLSSSETYKYLGMSEALGINVADMKQSLRERFFGRLKKVLISLLSGGNKVRAFNGWVMPVLMYSFGILKWTQTELDALDRRVRTLLTANRMHHPRSSVMRLYIPRKCGGRGFLNAKTLHNREVCSLREYFLKSDVGMHRDVVAVDKGLTPLSMAKENWRKPVVLTTDDRKKVWQSKELHGRFYRALHEPSVDFLASVSWLRFGDLFGETEGFVCAIMDEVILTNNYRRYIMKDGTVDVCRACHRPGESIRHIISGCSRLANGEYLHRHNQVARIIHQQLALKYKLVDSEVPYYKYVPDPVLENDHVTLYWDRSIITDRTIVANKPDIVVIDRLARRAMIVDVTIPHDGNLVKAEKEKQIKYLDLAHEVVDMWNVDSAVIVPIVVTANGLIADSLDQHLSRLSLGGWIKGQIQKAVLLDTARIVRRFLSLQP

SEQ ID NO: 28707 - protein, 1202 aa, Cosmia trapezina
MLTRSAARARPPPPDSSLSSASPPPVSSPIVGAVITPAAAVASSSSDEYFSPPTSPTPVRRQGRGRPPRSLGLRGQPAPSRVPAAGGCVQRMRWTQSMNENVMRAYYGSTEGGTNLTAYRVRMLSLFQELEPTVNVSAQRISDQVRVIQRNHRLDDAALDRLRSEVLSNHIISNPTQTAVQPSIIDALPPRSNHVVEEEDDRVATVSSQCNDRLRDALEDAFCEYRSTPTELRPRLPRLPMHKKNRALMCALDSLLKDFFESSENLVDTHSILYCAAVAACRLANVKFPNCDGATRPKPAVPAWQCRIERRIDGARVLIGKLYCFRQGNTRPRVMRFVRRAFSGTGISPPEYMSRVTERIDFLKQKVCAWASRIRRYKRRVDRYTQNRMFQSDERWVYRAWERPEQNVTDVCRPDDAATSAFWRSIWSVPVCHAEAGWMKDVERVCEAIPEMEPVLITPLDVARAVRPLPNWKSPGPDGLHNFWLKWLISSHTRLASQFQSSLESGSLPQFLTTGVTHLLHKSGSPAEPKNYRPITCLSTIYKLLTSILRAKINMHIDSNSIMSTSQNGCRNGSRGTKELLLIDMAISQQVRRSRKDLSTCWIDYKKAYDSVSHAWLMRVLELYKIDATLRTFLESCMGQWRTVLRYPGCRRIRGNDEPVRIKRGIFQGDSLSPLWFCLALNPLSTLLEDSGLGYRLRRGGQVISHLLYMDDLKLFAPNKLRLMELLKVTESFSSAIRMEFGVDKCAVMHVKRGEIMESEGIQLSDSIHLRSLSSSETYKYLGMSEALGINVADMKQSLRERFFGRLKKVLISLLSGGNKVRAFNGWVMPVLMYSFGILKWTQTELDALDRRVRTLLTANRMHHPRSSVMRLYIPRKCGGRGFLNAKTLHNREVCSLREYFLKSDVGMHRDVVAVDKGLTPLSMAKQNWRKPVVLTTDDRKKVWQSKELHGRFYRALHEPGVDFLASVSWLRFGDLFGETEGFVCAIMDEVILTNNYRRYIMKDGTVDVCRACHRPGESIRHIISGCSRLANGEYLHRHNQVARIIHQQLALKYKLVDSEVPYYKYVPDPVLENDHVTLYWDRSIITDRTIVANKPDIVVIDRLARRAMIVDVTIPHDGNLVKAEKEKQIKYLDLAHEVVDMWNVDSAVIVPIVVTANGLIADSLDQHLSRLSLGGWIKGQIQKAVLLDTARIVRRFLSLQP

SEQ ID NO: 28708 - protein, 1199 aa, Mamestra brassicae
MLTRAALQRARPPPPDPSLSSASPPPDIGSPLSPAVAVASSSSDEYFSPPTSPTPVRRQGRGRPPRGLGPRGQPAPSRVPATGGCVQRMRWTQSMNENVMRAYYGSTEGGTNLTAYRVRMLSLFQDLEPTVNVSAQRLSDQVRVIQRNHRLDDAALDRLRSEVLNNLIISTPTRTAVQAPVNGRITPRPNNVSDEVDDRVVTVSSQCNDRLRSALEDALREYRSTPTELRPRLPRLPMHKKNRALVCALDSLLQNIFESSESLVDTHSILYCGAVAACRIANVKFPGCDEAIRPKPAAPAWQRRIERRIDETRALIGKLYCFREGNTRPRVMRFVRRAFSGTEISPRDFTSRVTERIDFLKQKVCAWASRIRRYKRRVDRYSQNRMFQSDERWVYRAWERPEQSVTDVCRPDDVATSIFWRSIWSVPICHAEGGWMRDVERVCEAIPQMEKITITTLDVAKAVRPLPNWKSPGPDGLHNFWLKWYSSSHALLASQFQLSLDSGSLPQFLTTGVTHLLHKTGSPAEPKNYRPITCLSTVYKLLTSILRAKINEHIESNSIMSASQNGCRKGSRGTKELLLIDMAISQQVRRSRKDLSTCWIDYKKAYDSVPHTWLMKVLELYKIDATLRTFLESCMRQWKTVLRYPGCRPIQGSDEPVWIKRGIFQGDNLSPLWFCLALNPLSTLLEDSGLGYRLRRGGQAISHLLYMDDLKLFAPNNLRLMELLKVTETFSSAIRMEFGVDKCAVMHVKKGEIMESEGIHLSDSIQVRSLSSTETYKYLGMLEALGINGTDMKQSLRERFLGHLKKVLNSLLSGGNKVRAFNGWVMPVLMYTFGILKWTQTELDALDRRVRTLLTANRMHHPRSSVMRLYIPRKCGGRGFLNAKTLHNREMCSLREYFLKADVGMHRDVVAVDKGLTPLSMAKENWRTPVILTTDDRKEVWKGKELHGRFYRALHGSDVDFSASVAWLRFGDLFGETEGFVCAIMDEVILTNNYRRHIMKDGTVDMCRACHRPGESIRHIISDCSRLANGEYLHRHNQVARIIHQQLALKYNLVDSEVPYYKYVPDPVLENDHVTLYWDRSIITDRTIVANKPDIVVIDRLARRTMIIDVTIPHDENLVKAEKEKQIKYLDLAHEVVDMWNVESAVIVPIVVTANGLMAKSFDDHLSKLALRSWVKGLIQKAVLLDTARIVRRFLSLEP

SEQ ID NO: 28709 - protein, 1199 aa, Mamestra brassicae
MITRAAARRAHPPPPGSSLSSASPTPDIGSQVSPVVAVASSSSDEYFSPPTSPTPVRRQGRGRPPRSLGSRGQPAPSRVPAAGGCVQRMRWTQSMNENVMRAYYGSTEGGTNLTAYRVRMLSLFQDLEPTVNVSAQRLSDQVRVIQHNCRLDDAALERLRSEVLSNLIISTPTQTVVQAPASGAITPRPNNGSDEVDDRVVTVSSQCNDRLRTALEDALREYRLTPTELRPRLPRLPMHKKNRALVCALDSLLQNIFESSESLVDTHSILFCGAVAACRIANVKFPSCDEAIRPKPAAPAWQCRIERRIDEARALIGKLYCFREGNTRPRVMRFVRRAFSGTGIRPREYTFRVTERIDFLKQKVCAWANRIRRYKRRVDRYSQNRMFQSDERWVYRAWERPEQSVTDVYRPDDVATSTFWRSIWSVPICHAEGGWMRDVERVCEAIPQMEKITITTLDVAKAVRPLPNWKSPGPDGLHNFWLKWYSSSHALLASQFQSSLESGSLPQFLTTGITHLLHKTGSPAEPKNYRPITCLSTVYKLLTSILRAKINEHIESNSIMSASQNGCRKGSRGTKELLLIDMAISQQVRRSRKDLSTCWIDYKKAYDSVPHTWLMKVLELYKIDATLRTFLESCMRQWKTVLRYPGCQPIQGSDEPVWIKRGIFQGDSLSPLWFCLALNPLSTLLEDSGLGYRLRRGGQAISHLLYMDDLKLFAPNNLRLMELLKVTETFSSAIRMEFGVDKCAVMHVKKGEIMESEGIQLSDSIQVRSLSSTESYKYLGMSQALGINGTDMKQSLRERFFGRLKKVLNSLLSGGNKVRAFNGWVMPVLMYTFGILKWTQTELDALDRRVRTLLTANRMHHPRSSVMRLYIPRKCGGRGFLNAKTLHNREMCSLREYFLKADVGMHRDVVAVDKGLTPLSMAKENWRKPVILTTDDRKEVWKGKELHGRFYRALYGSDVDFSASVTWLRFGDLFGETEGFVCAIMDEVILTNNYRKHIMKDGTVDVCRACHRPGESIRHIISGCSRLANGEYLHRHNQVARIIHQQLALKYKLVDSEVPYYKYVPDPVLENDHVTLYWDRSIITDRTIVANKPDIVVIDRLARRTMIIDVTIPHDENLVKAEKEKQIKYLDLAHEVVDMWNVDSAVIVPIVVTANGLMAKSFDDHLSKLALRGWIKGLIQKAVLLDTARIVRRFLSLEP

SEQ ID NO: 28710 - protein, 1111 aa, Noctua fimbriata
MRWTHSINENVMRAYYGSTEGGTNLTAYRVGMLSLFQVLEPTINVSAQRLSDQVRVIQRNHMLDDAVLDRLRSEVLSNRIVLTPAQTAVQASVIDATPPRFNPAVVEEDDRVAVVSSQCNDRLRSALEDALREYRSTPTELRPRLPRLPMHNKNRALVCALDSQLKNLFESSENLVDTHSILYCGAVAACRLANVKFPNCDVATRPKPAVPAWQRRIECRIDGARVLIGKLHCFREGNTRPRVMRFVRRAFSGTGISPQEYMSRVTERIDFLKQKVYAWANRIRRYKRRVDRYSQNRMFQSDERWVYRAWERPDQNMTDMCRPDDAATSSFWRSIWSVPVCHTEADWMRDVEQVCEPIPEMEPILITPLDVARAVRPLPNWKSPGPDGLHNFWLKWLSSSHTCLASQFQSSLESGSLPQFLTTGVTHLLHKSGSPAEPKNYRPITCLSTVYKLLTSILRAKINTHIDKNSIMSASQNGCRNGSRGTKELLLIDMAISQQVRRSRKDLSTCWIDYKKAYDSVPHTWLMRVLELYKIDATLRAFLESCMGQWRTVLRYPGCRQIQGNDEPVWIKRGIFQGDSLSPLWFCLALNPLSTLLEDSGLGYRLRRGGQVISHLLYMDDLKLFAPNKLQLMELLKVTETFSSAIRMEFGVDKCAVMYVKQGEIMESEGIQLSDSIHLRTLSSTESYKYLGMSEALGINVTDMKQSLKERFFGRLNKVLHSLLSGGNKVRAFNGWVMPVLMYSFGVLKWTQTELDALDRRVRTLLTANRMHHPRSSVMRLYIPRKCGGRGFLNAKSLHNREMCSLREYFLKVEVGMHRDVVAVDKGLTPLSMAKENWRKPEVLTTDDRKEVWQGKELHGRFYRALHGPDVDFLASVSWLRFGDLFGETEGFVCAIMDEVMLTNNYRKYIMKDGTVDVCRACHRPGESIRHIISGCSRLANGEYLHRHNQVARIIHQQLALKYKLVESEVPYYKYVPDPVLEKDHVTLYWDQSIITDRTIVANKPDIVVIDRSARRVMIVDVTIPHDENLVKAEKEKQIKYLDLAHEVVDMWNVNSAIIVPIVVTANGLIAKSLDDHLSKLSLGGWIKGLIQKAVLLDTARIVRRFLSLEP

SEQ ID NO: 28711 - protein, 1202 aa, Noctua fimbriata
MITRAAYRRARLPPPDPSLSSASPPPESSPIVSAVTPAVAVASSSSDEYFSPPTSPTPVRRQGRGRPPRSLGLRGHPAPSRVPAAGGCVQRMRWTHSINENVMRAYYGSTEGGTNLTAYRVGMLSLFQVLEPTVNVSAQRLSDQVRVIQRNHMLDDAVLDRLRSEVLSNRIVLTPAQTAVQASAIDATPPRFNPAVVEEDDRVAVVSSQCNDRLRSALEDALREYRSTPTELRPRLPRLPMHNKNRALVCALDSQLENIFESSENLVDTHSILYCGAVAACRLANVKFPNCDVATRPKPAVPAWQRRIERRIDGARVLIGKLHCFREGNTRPRVMRFVRRAFSGTGISPQEYMSRVTERIDFLKQKVYAWANRIRRYKRRVDRYSQNRMFQSDERWVYRAWERPELNMTDVCRPDDAATSSFWRSIWSVPVCHTEADWMRDVERVCEPIPEMEPILITRLDIARAVRPLPNWKSPGPDGLHNFWLKWLSSSHTCLASQFQSSLESGSLPQFLTTGVTHLLHKSGSPAEPKNYRPITCLSTVYKLLTSILRAKINTHIDKNSIMSASQNGCRSGSRGTKELLLIDMAISQQVHRSRKDLSTCWIDYKKAYDSVPHTWLMRVLELYKIDATLRAFLESCMGQWRTVLRYPGCGQIQGNDEPVWIKRGIFQGDSLSPLWFCLALNPLSTLLEDSGLGYRLRRGGQVISHLLYMDDLKLFAPNKLQLMELLKVTETFSSAIRMEFGVDKCAVMYVKQGEIMESEGIQLSDSIHLRTLSSTESYKYLGMSEALGINVTDMKQSLKERFFGRLNKVLHSLLSGGNKVRAFNGWVMPVLMYSFGVLKWTQTELDALDRRVRTLLTANRMHHPRSSVMRLYIPRKCGGRGFLNAKSLHNREMCSLREYFLKVEVGMHRDVVAVDKGLTPLSMAKENWRKPEVLTTDDRKEVWQGKELHGRFYRALHGPDVDFLASVSWLRFGDLFGETEGFVCAIIDEVMLTNNYRKYIIKDGTVDVCRACHRPGESIRHIISGCSRLANGEYLHRHNQVARIIHQQLALKYKLVESEVPYYKYVPDPVLEKDHVTLYWDQSIITDRTIVANKPDIVVIDRSARRVMIVDVTIPHDENLVKAEKEKQIKYLDLAHEVVDMWNVNSAIIVPIVVTANGLIAKSLDDHLSKLSLGGWIKGLIQKAVLLDTARIVRRFLSLEP

SEQ ID NO: 28712 - protein, 868 aa, Noctua fimbriata
MRFVRRAFSGTGISPQEYMSRVTERIDFLKQKVYAWANRIRRYKRRVDRYSQNRMFQSDKRWVYRTWERPELNMADVCRPDDATTSSFWRSIWSVPVCHTEADWMHDVERVCEPIPEMEPVLITPLDIARAVRPLPNWKSPGPDGLHNFWLKWLSSSHTCLASQFQSSLESGSFPQFLTTGVTHLLHKSGSPAEPKNYRPITCLSTVYKLLTSILRAKINTHIDKNSIMSASQNGCRNGSRGTKELLLIDMAISQQVRRSRKDLSTCWIDYKKAYDSVPHTWLMRVLELYKIDATVRAFLESCMGQWRTVLRYPGCRQIQGNDEPVWIKRGIFQGDSLSPLWFCLALNPLSTLLEDSGLGYRLRRGGQVISHLLYMDDLKLFAPNKLRLMELLKVTETFSSAIRMEFGVDKCAVMYVKQGEIMESEGIQLSDSIHLRTLSSTESYKYLGMSEALGINVTDMKQSLKERFFGRLNKVLHSLLSGGNKVRAFNGWVMPVLMYSFGVLKWTQTELDALDRRVRTLLTANRMHHPRSSVMRLYIPRKCGGRGFLNAKSLHNREICSLREYFLKVEVGMHRDVVAVDKGLTPLSMAKENWRKPEVLTTDDRKEVWQGKELHGRFYRALHGPDVDFLASVSWLRFGDLFGETEGFVCAIMDEVMLTNNYRKYIMKDGTVDVCRACHRPGESIRHIISGCSRLANGEYLHRHNQVARIIHQQLALKYKLVESEVPYYKYVPDPVLEKDHVTLYWDQSIITDRTIVANKPDIVVIDRSARRVMIVDVTIPHDENLVKAEKEKQIKYLDLAHEVVDMWNVNSAIIVPIVVTANGLIAKSLDDHLSRLSLGGWIKGLIQKAVLLDTARIVRRFLSLEP

SEQ ID NO: 28713 - protein, 1202 aa, Noctua fimbriata
MLTRAAARRARLPPPDPSLSSASPPPESSHIVSAVTPAVAVASSSSDEYFSPPTSPTPVRRQGRGRPPRSLGLRGHPAPSRVPAAGGCVQRMRWTHSINENVMRAYYGSTEGGTNLTAYRVGMLSLFQVLEPTINVSAQRLSDQVRVIQRNHMLDDAVLDRLRSEVLSNRIVFTPAQTAVQASVIDATPPRFNPAVVEEDDRVAVVSSQCNDRLRSALEDALREYRSSPTELRPRLPRLPMHNKNRALVCALDSQLKNLFESSENLVDTHSILYCGAVAACRLANVKFPNCDVATRPKPAVPAWQRRIERRIDGARVLIGKLHCFREGNTRPLVMRFVRRAFSGTGISPQEYMSRVTERIDFLKQKVYAWANRIRRYKRRVDRYSQNRIFQSDERWVYRAWERPDQNMTDVCRPDDAATSSFWRSIWSVPVCHTEADWMRDVEQVCEPIPEMEPILITPLDVARAVRPLPNWKSPGPDGLHNFWLKWLSSSHTCLASQFQSSLESGSLPQFLTTGVTHLLHKSGSPAEPKNYRPITCLSTVYKLLTSILRAKINTHIDKNSIMSASQNGCRNGSRGTKELLLIDMAISQQVRRSRKDLSTCWIDYKKAYDSVPHTWLMRVLELYKIDATLRAFLESCMGQWRTVLRYPGCRQIQGNDEPVWIKRGIFQGDSLSPLWFCLALNPLSTLLEDSGLGYRLRRGGQVISHLLYMDDLKLFAPNKLRLMELLKITETFSSAIRMEFGVDKCAVMYVKQGEIMESEGIQLSDSIHLRTLSSTESYKYLGMSEALGINVTDMKQSLKERFFGRLNKVLHSLLSGGNKVRAFNGWVMPVLMYSFGVLKWTQTELDALDRRVRTLLTANRMHHPRSSVMRLYIPRKCGGRGFLNAKSLHNREMCSLREYFLKVDLGMHRDVVAVDKGLTPLSMAKENWRKPEVLTTDDRKEVWQGKELHGRFYRALHGPDVDFLASVSWLRFADLFGETEGFVCAIMDEVMLTNNYRKYIMKDGTVDVCRACHRPGESIRHIISGCSRLANGEYLHRHNQVARIIHQQLALKYKLVESEVPYYKYVPDPVLEKDHVTLYWDQSIITDRTIVANKPDIVVIDRSARRVMIVDVTIPHDENLVKAEKEKQIKYLDLAHEVVDMWNVNSAIIVPIVVTANGLIAKSLDDHLSKLSLGGWIKGLIQKAVLLDTARIVRRFLSLES

SEQ ID NO: 28714 - protein, 1202 aa, Noctua fimbriata
MITRAAYRRARLPPPDPSLSSASPPPESSPIVSAVTPAVAVASSSSDEYFSPPTSPTPVRRQGRGRPPRSLGLRGHPAPSRVPAAGGCVQRMRWTHSINENVMRAYYGSTEGGTNLTAYRVGMLSLFQVLEPTVNVSAQRLSDQVRVIQRNHMLDDAVLDRLRSEVLSNRIVLTPAQTAVQASVIDATPPRFNPAIEEEDDRVAVVSSQCNDRLRSALEDALREYRSTPTELRPRLPRLPMHNKNRALVCALDSQLENIFESSENLVDTHSILYCGAVAACRLANVKFSNCDVATRPKPAVPAWQRRIERRIDGARVLIGKLHCFREGNTRPRVMRFVRRAFSGTGISPQEYMSRVTERIDFLKQKVYAWANRIRRYKRRVDRYSQNRMFQSDERWVYRAWERPELNMTDVCRPDDAATSSFWRSIWSVPVCHTEADWMRDVERVCEPIPEMEPILITPLDIARAVRPLPNWKSPGPDGLHNFWLKWLSSSHTCLASQFQSSLESGSLPQFLTTGVTHLLHKSGSPAEPKNYRPITCLSTVYKLLTSILRAKINTHIDKNSIMSASQNGCRNGSRGTKELLLIDMAISQQVRRSRKDLSTCWIDYKKAYDSVPHTWLMRVLELYKIDATLRAFLESCMGQWRTVLRYPGCRQIQGNDEPVWIKRGIFQGDSLSPLWFCLALNPLSTLLEDSGLGYRLRRGGQVISHLLYMDDLKLFAPNKLQLMELLKVTETFSSAIRMEFGVDKCAVMYVKRGEIMESEGIQLSDFIHLRSLSSSESYKYLGMSEALGINVTDMKQSLKERFFGRLNKVLHSLLSGGNKVRAFNGWVMPVLMYFFGVLKWTQTELDALDRRVRTLLTANRMHHPRSSVMRLYIPRKCGGRGFLNAKSLHNREMCSLREYFFKVEVGMHRDVVAVDKGLTPLSMAKENWRKPEVLTTDDRKEVWQGKELHGRFYRALHGPDVDFLASVSWLRFGDLFGETEGFVCAIMDEVMLTNNYRKYIMMDGTVDVCRACHRPGESIRHIISGCSRLANGEYLHRHNQVARIIHQQLALKYKLVESEVPYYKYVPDPVLEKNHVTLYWDQSIITDRTIVANKPDIVVIDRSARRVMIVDVTIPHDENLVKAEKEKQIKYLDLAHEVVDMWHVNSAIIVPIVVTANGLIAKSLDDHLSKLSLGGWIKGLIQKAVLLDTARIVRRFLSLEP

SEQ ID NO: 28715 - protein, 1202 aa, Noctua fimbriata
MITRAAYRRARLPPPDPSLSSASPPPESSPIVSAVTPAVAVASSSSDEYFSPPTSPTPVRRQGRGRPPRSLGLRGHPAPSRVPAAGGCVQRMRWTHSINENVMRAYYGSTEGGTNLTAYRVGMLSLFQVLEPTVNVSAQRLSDQVRVIQRNHMLDNAVLDRLRSEVLSNRIVLTPAQTAVQASVIDATPPRFNPAVVEEDDRVAVVSSQCNDRLRSALEDVLREYRSTPTELRPRLPRLPMHNKNRALVCALDSQLENIFESSENLVDTHSILYCGAVAACRLANVKFPNCDVATRPKPAVPAWQRRIERRIDGARVLIGKLHCFREGNTRPRVMRFVRRAFSGTGISPQEYMSRVTERIDFLKQKVYAWANRIRRYKRRVDRYSQNRMFQSDERWVYRAWERPELNMTDVCRPDDAVTSSFWRSIWSVPVCHTEADWMRDVERVCEPIPEMEPILITRLDIARAVRPLPNWKSPGPDGLHNFWLKWLSSSHTCLASQFQSSLESGSLPQFLTTGVTHLLHKSGSPAEPKNYRPITCLSTVYKLLTSILRAKINTQIDKNSIMSASQNGCRSGSRGTKELLLIDMAISQQVRRSRKDLSTCWIDYKKAYDSVPHIWLMRVLELYKIDATLRAFLESCMGQWRTVLRYPGCGQIQGNDEPVWIKRGIFQGDSLSPLWFCLALNPLSTLLEDSGLGYRLRRGGQVISHLLYMDDLKLFAPNKLQLMELLKVTETFSSAIRMEFGVDKCAVMYVKQGEIMESEGIQLSDSIHLRTLSSTESYKYLGMSEALGINVTDMKQSLKERFFGRLNKVLHSLLSGGNKVRAFNGWVMPVLMYSFGVLKWTQTELDALDRRVRTLLTANRMHHPRSSVMRLYIPRKCGGRGFLNAKSLHNREMCSLREYFLKVEVGMHRDVVAVDKGLTPLSMAKENWRKPEVLTTDDRKEVWQGKELHGRFYRALHGPDVDFLASVSWLRFGDLFGETEGFVCAIMDEVMLTNNYRKYIMKDGTVDVCRACHRPGESIRHIISGCSRLANGEYLHRHNQVARIIHQQLALKYKLVESEVPYYKYVPDPVLEKDHVTLYWDQSIITDRTIVANKPDIVVIDRSARRVMIVDVTIPHDENLVKAEKEKQIKYLDLAHEVVDMWNVNSAIIVPIVVTANGLIAKSLDDHLSKLSLGGWIKGLIQKAVLLDTARIVRRFLSLEP

SEQ ID NO: 28716 - protein, 1202 aa, Atethmia centrago
MLTRSATRTRPPPPDPSLSSASPPPVPSATVSAMTTPTVAVASSSSDEYFSPPSSPTPVRRQGRSRPPKSLGLRGHPAPSRVPAAGGCVQRMKWTQSMNENVMRAYYGSTEGGTNLTAYRVKMLSLFQELEPAVNVSAQRLSDQVRVIQRNRRLDDAALDRLRSEVLSNHIISTPAQTAVHTPIIDVIPPRSNHGVEEEDDRAATVSSQCNVRLRSALEDAFREYRSTPTELRPRLPRLPMHKKNRALMCALDSQLKVFFESSEDLVDTHSILYCAAVAACRLAIVKFPNSDGATRPKPAVPAWQCRIERRIDGARVLIGKLYCFREGNTRPRVMRFVRRAFSGTGISPREYMSHITERIDFLKQKVCAWASRIRRYKRRVDRYTQNRMFQSDERWVYRAWERPKQNETDVCRPDDATTTAFWRSIWSVPVCHVEADWMQDVERVCETIPEMEVVIITPSDIARAVRPLPNWKSPGPDGLHNFWLKWLTSSHTCLASQFQSSLESGSLPQFMTTGITHLLHKSGSPAEPKNYRPITCLSTVYKLLTSILRAKINTHIDSNSIMSASQNGCRNGSRGTKELLLIDMAISQQVRRSRKDLSTCWIDYKKAYDSVPHTWLMRVLELYKIDMTLRTFLESCMGQWRTVLRYPGCRQIQGNDESVWIKRGIFQGDSLSPLWFCLALNPLSMQLEDSGLGYRLRRGGQVISHLLYMDDLKIFAPNKLQLMELLKVTETFSSAIRMEFGVDKCAVMHVKQGEIMESEGIRLSDSIHLRSLSSPESYKYLGMSEALGINVTDMKQSLKERFFGRLKKVLISLLSGGNKVRAFNGWVMPVLMYSFGILKWTQTELDALDRRVRTLLTANRMHHPRSSVMRLYIPRKCGGRGFLNAKTLHNREICSLREYFLKTEVGMHRDVVAVDKGLTPLSMAKENWCKPVVLTTDDRKEIWQNKELHGRFYRALHEPDVDFLASVSWLRFGDLFGETEGFVCAIMDEVILTNNYRRHIMKDGTVDVCRACHRPGESIRHIISGCSRLANGEYLHRHNQVARIIHQQLALKYKLVNSEVPYYKYVPDPVLENDHVTLYWDRSIITDRTIVANKPDIVVIDRLARRAMIVDVTIPHDDNLVKAEKEKQIKYLDLAHEVVDMWNVNSAVIVPIVVTANGLMARSLNHHLSRLTLDGWIKGLIQKAVLLDTARIVRRYLSLEP

SEQ ID NO: 28717 - protein, 962 aa, Atethmia centrago
MHKKNRALMCALDSQLKVFFESSEDLVDTHSILYCAAVAACRLANVKFPNSDGATRPKPAVPAWQCRIERRIDGARVLIGKLYCFREGNTRPRVMRFVRRAFSGTGISPREYMSHITERIDFLKQKVCAWASRIRRYKRRVDRYTQNRMFQSDERWVYTAWERPKQNETDVCRPDDATTTAFWRSIWSVPVCHVEADWMRDVERVCETIPEMEVVIITPSDIARAVRPLPNWKSPGPDGLHNFWLKWLTSSHTCLASQFQSSLESGSLPQFMTTGITHLLHKSGSPAEPKNYRPITCLSTVYKLLTSILRAKINTHIDSNSIMSASQNGCRNGSRGTKELLLIDMAISQQVRRSRKDLSTCWIDYKKAYDSVPHTWLMRVLELYKIDMTLRTFLESCMGQWRTVLRYPGCRQIQGNYESVWIKRGIFQGDSLSPLWFCLALNPLSMQLEDSGLGYRLRRGGQVISHLLYMDDLKIFAPNKLQLMELLKVTETFSSAIRMEFGVDKCAVMHVKRGEVMESEGIRLSDSIHLRSLSSPESYKYLGMSEALGINVTDMKQSLKERFFGRLKKVLISLLSGGNKVRAFNGWVMPVLMYSFGILKWTQTELDALDRRVRTLLTANRMHHPRSSVMRLYIPRKCGGRGFLNAKTLHNREICSLREYFLKTEVDMHRDVVAVDKGLTPLSMAKENWCKPVVLTTDDRKEIWQNKELHGRFYRALHEPDVDFLASVSWLRFGDLFGETEGFVCAIMDEVILTNNYRRHIMKDGTVDVCRACQRPGESIRHIISGCSRLANREYLHRHNQVARIIHQQLALKYKLVNSEVPYYKYVPDPVLENDHVTLYWDRSIITDRTIVANKPDIVVIDRLARRAMIVDVTIPHDDNLVKAEKEKQIKYLDLAHEVVDMWNVNSAVIVPIVVTANGLMARSLNHHLSRLTLDGWIKGLIQKAVLLDTARIVRRFLSLES

SEQ ID NO: 28718 - protein, 1202 aa, Atethmia centrago
MLTRSAARARPPPPDSSLSSASPPPVPSPTVSAVTTPAAVVASSSSDEYFSPPTSPTPVRRQGRGRPPKSLGLRGQLAPSRVPAAGGCVQRMRWTQSMNENVMRAYYGSTEGGTNLTAYRVRMLSLFQKLEPTVNVSAQRLSDQVRVIQRNHRLDDAALDRLRSEVLSNHIVSTPAQTATHAPIINAIPPRSNHDVEEEDDKVATVSSQCNVRLRSALEDAFREYRSTPTELRPRLPRLPMHKKNRALVCALDSLLKDFFESSEDLVDTHSILYCAAVAACRLANVKFPNCDGATRPKPAVPAWQCRIERRIDGARVLIGKLYCFREGNTRPRVMRFVRRAFSGTGISPREYMSRVTERIDFLKQKVCAWASRIRRYKRRVDRCTQNRMFQSDERWVYRSWERPEQNETDVCRPDDATTTAFWRSIWSVPVCHAEADWMRDVERVCETIPEMEVVIITPSDIARAVRPLPNWKSPGPDGLHNFWLKWLTSSHTCLASQFQSSLESGSLPQFLTTGITHLLHKSGSPAEPKNYRPITCLSTVYKLLTSILRAKINTHIDSNSIMSASQNGCRNGSRGTKELLLIDMAISQQVRRFRKDLSTCWIDYKKAYDSVPHTWLMRVLELYKIDTTLRTFLESCMGQWRTVLRYPGCRQIQGNDEPVWIKRRIFQGDSLSPLWFCLALNPLSTLLEDSGLGYRLRRGGQVISHLLYMDDLKIFAPNKLQLMELLKVTETFSSAIRMEFGVDKCAVMHVKRGKIMESEGIQLSDSIHLRSLSSPESYKYLGMSEALGINVTDMKQSLKERFFGRLKKVLISPLSGGNKVRAFNGWVMPVLMYSFGILKWTQTELDALDRRVRTLLTANRMHHPRSSVMRLYIPRKCGGRGFLNAKTLHNREICSLREYFLKTEVGMHRDVVAVDKGLTPLSMAKENWCKPVILTTDDRKEIWQNKELHGRFYRALHEPDVDFLASVSWLRFGDLFGETEGFVCAIMDEVILTNNYRRHIMKDGTVDVCRACHRPGESIRHIISGCSRLANGEYLHRHNQVARIIHQQLALKYKLVNSEVPYYKYAPDPVLENDHVTLYWDRSIITDRTIVANKPDIVVIDRLARRAMLVDVTIPHDENLVKAEKEKQIKYLDLAHEVVDMWNVDSAVIVPIVVTANGLMAENLNYHLSRLSLGGWIKGLIQKAVLLDTARIVRRFLSLES

SEQ ID NO: 28719 - protein, 1202 aa, Atethmia centrago
MLTRSAARARPPPPDSSLSSTSPPPVPSPTVSAVTTPAAVVASSSSDEYFSPPTSPTPVRRQGRGRPPKSLGLRGQLAPSRVPAAGGCVQRMRWTQSMNENVMRAYYGSTEGGTNLTAYRVRMLSLFQKLEPTVNVSAQRLSDQVRVIQRNHRLDDAALDRLRSEVLSNHIVSTPAQTATHAPIINAIPPRSNHDVEEEDDKVATVSSQCNVRLRSALEDAFREYRSTPTELRPRLPRLPMHKKNRALVCALDSLLKDFFESSEDLVDTHSILYCAAVAACRLANVKFPNCDGATRPKPAVPAWQCRIERRIDGARVLIGKLYCFREGNTRPRVMRFVRRAFSGIGISPREYMSRVTERIDFLKQKVCAWASRIRRYKRRVDRCTQNRMFQSDERWVYRSWERPEQNETDVCRPDDATTTAFWRSIWSVPVCHAEADWMRDVERVCETIPEMEVVIITPSDIARAVRPLPNWKSPGPDGLHNFWLKWLTSSHTCLASQFQSSLESGSLPQFLTTGITHLLHKSGSPAEPKNYRPITCLSTVYKLLTSILRAKINTHIDSNSIMSASQNGCRNGSRGTKELLLIDMAISQQVRRFRKDLSTCWIDYKKAYDSVPHTWLMRVLELYKIDTTLRTFLESCMGQWRTVLRYPGCRQIQGNDEPVWIKRGIFQGDSLSPLWFCSALNPLSTLLEDSGLGYRLRRGGQVISHLLYMDDLKIFAPNKLQLMELLKVTETFSSAIRMEFGVDKCAVMHVKRGEIMESEGIQLSDSIHLRSLSSPESYKYLGMSEALGINVTDMKQSLKERFFGRLKKVLISPLSGGNKVRAFNGWVMPVLMYSFGILKWTQTELDALDRRVRTLLTANRMHHPRSSVMRLYIPRKCGGRGFLNAKTLHNREICSLREYFLKTEVGMHRDVVAVDKGLTPLSMAKENWCKPVILTTDDRKEIWQNKELHGRFYRALHEPDVDFLASVSWLRFGDLFGETEGFVCAIMDEVILTNNYRRHIMKDGTVDVCRACHRPGESIRHIISGCSRLANGEYLHRHNQVARIIHQQLALKYKLVNSEVPYYKYAPDPVLENDHVTLYWDRSIITDGTIVANKPDIVVIDRLARRAMLVDVTIPHDENLVKAEKEKQIKYLDLAHEVVDMWNVDSAVIVPIVVTANGLMAESLNYHLSRLSLGGWIKGLIQKAVLLDTARIVRRFLSLES

SEQ ID NO: 28720 - protein, 1203 aa, Atethmia centrago
MLTRAALKRARPPPPDSSLSSASPPPVSSPTVSAVITPAAVVASSSSDEYFSPPTSPTPVRRQGRDRPPKRLGLRGHPAPSRVPAAGGCVQRMRWTQSMNENVMRAYYGSTEGGTNLTAYRVRMLSLFQELEPTVNVSAQRLSDQVRVIQRNRRLDDATLDRLRSEVLSNYIISTPAQTAVHTPIIDVIPPRSNHGVEEEDDRAATVSSQCNVRLRSALEDAFREYRSTPTELRPRLPRLPMHKKNRALMCALDSQLKVFFESSEDLVDTHSILYCAAVAACRLANVKFPNSDGATRPKPAVPAWQCRIERRIDKARVLIGKLYCFREGNTRPRVMRFVRRAFSGTGISPREYMSHITERIDFLKQKVCAWASRIRRYKRRVDRYTQNRMFQSDERWVYRAWERPKQNVTDVCRPDDATTTAFWRSIWSVPVCHVEADWMRDVERVCETIPEMEVVIITPSDIARAVRPLPNWKSPGPDGLHNFWLKWLTSSHTCLASQFQSSLESGSLPQFMTTGITHLLHKSGSPAEPKNYRPITCLSTVYKLLTSILRAKINTHIDSNSIMSASQNGCRNGSRGTKELLLIDMAISQQVRRSRKDLSTCWIDYKKAYDSVPHTWLMRVLELYKIDTTLRTFLESCMGQWRTVLRYPGCRQIQGNDEPVWIKRGIFQGDSLSPLWFCLALNPLSMQLEDSGLGYRLRRGGQIISHLLYMDDLKIFAPNKLQLMKLLKVTETFSSAIRMEFGVDKCALMHVKRGEIMESEGIQLSDSIHLRSLSSPESYKYLGMSEALGINVTDMKQSLKERFFGRLKKVLISLLSGGNKVRAFNSWVMPVLTYSFGILKWTQTELDALDRRLRTLLTANRMHHPRSSVMRLYIPRKCGGRGFLNAKTLHNREICSLREYFLKTEVGMHRDVVAVDKGLTPLSMAKENWCKPVVLTTDDRKEIWQSMELHGRFYRALHEPDADFLASVSWLRFGDLFGETEGFVCAIMDEVILTNNYRRHIMKDGTVDVCRACHRPGESIRHIISGCSRLANGEYLHRHNQVARIIHQQLALKYKLVKSEVPYYKYVPDPVLENDHVTLYWDRSIITDRTIVANKPDIVVIDRLARRAMIVDVTIPHDDNLVKAEKEKQIKYLDLAHEVVDMWNVNSAVIVPIVVTANGLMARSLNHHLSRLALDGWIKGLIQKAVLLDTARIVRRFLSLEP

SEQ ID NO: 28721 - protein, 962 aa, Mesoligia furuncula
MHKKNRALVCALDSQLKNFFESSEDLVDTHSILYCAAVAACRLANVKFSSCDGATRPKPAVPAWQRRIERRIDGARVLIGKLYCFREGNTRPRVMRFVRRAFSGTGISPREYMFRVTERIDFLKQKVCAWASRIRRYKRRVDRYTQNRMFQSDERWVYRAWERPEQNAADVCRPDDAATSAFWCSIWSVPVCHTEAGWMQDVERVCESIPEMEKVLITPSDVARAVRPLSNWKSPGPDGLHNFWLKWLISSHTCLASQFQSSLESGSLPQFLTTGVTHLLHKSGSPAEPKNYRPITCLSTVYKLLTSILRAKINKHIESNSIMSASQNGCRNGSRGTKELLLIDMAISQQVRRSRKDLSTCWIDYKKAYDSVPHTWLMRVLELYKIDATLRTFLESCMGQWKTVLRYPGCRQIQGNDEPVWIKRGIFQGDSLSPLWFCLALNPLSTLLEDSGLGYWLRRGGQVISHLLYMDDLKLFAPNKLRLMELLKVTKTFSSAIKMEFGVDKCAVMHVKRGEIMESEGIQLSDSISLRSLSSSESYKYLGMSEALGINDADMKQSLKERFFCRLKKVLISLLSGGNKVRAFNGWVMPVLMYSFGILKWTQTELDALDRRVRTLLTANRMHHPRSSVMRLYIPRKCGGRGFLNAKTLHNREVCSLREYFLKAEVGMHRDVVAVDKGLTPLSMAKENWRKPVVLSTDDRKRVWQSKELHGRFYRALHEPGVDFIASVSWLRFGDLFGETEGFVCAIMDEVILTNNYRRHIMKDGTVDVCRACHRPGESIRHIISGCSRLANGEYLHRHNQVARIIHQQLALKYKLVDSEVPYYKYVPDPVLENDHVTLYWDRSIITDRTIVANKPDIVVIDRLARRTMIVDVTIPHDVNLVKAEREKQIKYLDLAHEVVDMWNVSSAIIVPIVVSANGLMAESLDQHLSRLSLGGWIKGLIQKAVLLDTARIVRRFLSLEP

SEQ ID NO: 28722 - protein, 1210 aa, Xestia c-nigrum
MLTRHRAKLLRDAHPPSPGSSLSSASQPPGRATSVSTVSPVAAVASSSSDEFFSPPSTPPPPPPSRGRRRGRGRPPAGLGPRGQQASSRVPAAGGNVSRMRWTQSMNENVMRAYYGATEGGSNLIAYRGQMLSLFQVLEPAVNVDAQRLSDQVRVIQRNHMLDDTVLDRLRSESRSNLVTPASPMLAVQLQTIPSTPLRSDYDGEEDGDEVISVSTQCNAQLRSALEDAFREYRSTPPELRPRLPRLPMHKKNKALVCALDSQLSNCFDSSKDLADTHSILYCGAVAACRVAHVKFPNNDRTTRPKLAVPAWQCRIERRIGEARVLIGKLICFREGNTRPRVMRFVRRAFSGTDISFRDYLARITRRIDFLKQKICAWASRIRRYKQRVERYTQNRSFQSDERWVYRAWERPDQGVTNTRLPDDDAMCSFWRSIWSVPVSHTEGDWIRKVEQVCDQIQEMGAIIISLQDVACAVRPLPNWKSPGPDGLHNFWIKWFQRSHACLASQFQSALESGSLPQFMTTGITHLLHKSGSTAEPKNYRPITCLPTVYKVLTSILRAKINKHIESNSIMSTSQNGCRNGSRGTKELLLIDMAISQQVRRSRKNLSTCWIDYKKAYDSVPHTWLMRVLELYKINATLRAFLESCMGQWKTVLRYPGCRQIQGNDEPVWIKRGIFQGDSLSPLWFCLALNPLSTLLENSGLGYRLRKDGQVISHLLYMDELKLFAPNKLQLLELLKVTETFSNAIRMEFGVDKCAVMYVKRGEIMESEGLQLSDSIHLRSLSSSESYKYLAMSEALGINVTDMKQSLRERFFGRLKKVLNSLLSGGNKVRAFNGWVMPVLMYSFGILKWTQTELDALDRRVRTLLTANRMHHPRSSMMRLYIPRKCGGRGFLNVKNLHNREVCSLREYFLEADVGMHRDVVSVDKGLTPLSLANGNWRKPKVLDTNDRREEWQGKELHGRFYRALHGPDVDFLASVSWLRFGDLFGETEGFICAIMDEVMMTKNYRKYIVKDGTVDICRACHRPGESIRHIISGCSSLANGEYLHRHNLVARIIHQQLALKYNLVESEVPYYKYAPDPVLVNGNITLYWDRPITTDRTVVANRPDIVVIDRLERRTMIVDITVPHDENLVKAEQDKKNKYLDLAREVVDMWDVSTAIIVPIVVSANGLIAKSLDQHLRRLSLGSWIKGLIQKAVLLDTARIVRRFLSQEP

SEQ ID NO: 28723 - protein, 1111 aa, Xestia c-nigrum
MRWTQSMNENAMRAYYGSTEGATNLTAYRVRMLSLFQDLEPAVNVSAQRLSDQVRVIQRNHMLDDAALDRLRSEVLSNLIILTPAQTAVQASAIDATPPRSNPAVVEEDGRVATVSSQCNDRLRSALEDALREYRSTPTELRPRLPRLPMHKKNRALVCALDSQLKNVFESSEDLVDTHSILFCGAVAACRLANVKFPNCDLATRPKPAVPVWQRRIERRIDGARVLIGKLYCFREGNTRPRVMRFVRRAFSGTEISPQEYMSRVTERIDFLKQKVYAWASRIRRYKRRVDRYSQNRMFQCDERWVYRAWERPDQNVTDVCHPGDAATSSFWRSIWSVPVCHSEADWMRDVERVCEPIPEMAPVVITSLDIARAVRPLPNWKSPGPDGLHNFWLKWLSSSHTCLASQFQSSLESGSLPQFLTTGVTHLLHKSGSPTEPQNYRPITCLSTVYKLLTSILRTKINTHIDNNSIMSASQNGCRNGSRGTKELLLIDMAISQQVRRSRKDLSTCWIDYKKAYDSVPHSWLMRVLELYKIDATLCTFLKSCMGQWRTVLRYPGCRQIQGNDESVWIKRGIFQGDSLSPLWFCLALNPLSTLLENSGLGYQLRKDGQVISHLLYMDDLKLFAPNKLRLMELLKVTETFSNAIRMEFGVDKCAVMYVKRGEIMESEGLQLSDSIHLRSLSSSESYKYLGMSEALGINVTDMKQSLRERFFGRLKKVLNSLLSGGNKVRAFNGWVMPVLMYSFGILKWTQTELDALDRRVRTLLTENRMHHPRSSVMRLYIPRKCGGRGFLNAKTLHNREVCSLREYFLKAEVGMHRDVVAVDKGLTPLSMAKENWRKPVILTTDDRKKEWQGKVLHGRFYRALHGPDVDFLASVSWLRFGDLFGETEGFVCAIMDEVMLTNNYRKYIMKDGTVDVCRACHCPGESIRHIISGCSRLANGEYLHRHNQVARIIHQQLALKFKLVESEVPYYKYVPDPVLVKDHITLYWDQSIITDRTIVANKPDIVVIDRSARRVMIIDVTIPHDENLVKAEKEKQIKYLDLAHEVRDMWNMNSVIIVPIVVTANGLIAKSLDEHLSKLSLGGWIKGLIQKAVLLDTARIVRRFLSLQP

SEQ ID NO: 28724 - protein, 1058 aa, Xestia c-nigrum
MKLGRVSTNYNKNKTKVKKNYNNKKTITPASPMLAVQLQTIPSTPLRSDYDGEEDGDEVISVSTQCNAQLRSALEGAFREYRSTPPELRPRLPRLPMHKKNKALVCALDSQLSNCFDSSKDLADTHSILYCGAVAACRVAHVKFPNNDRTTRPKLAVPAWQCRIERRIGEARVLIGKLICFREGNTRPRVMRFVRRAFSGTDISFRDYLARITERIDFLKQKICAWASRIRRYKRRVERYTQNRSFQSDERWVYRAWERPDQGVTNTRLPDDDAMCSFWRSIWSVPVSHTEGDWIRKVEQVCDQIQEMGAIIISPQDVACAVRPLPNWKSPGPDGLHNFWIKWFQRSHACLASQFQSALESGSLPQFMTTGITHLLHKSGSTAEPKNYRPITCLPTVYKVLTSILRAKINKHIESNSIMSTSQNGCRNGSRGTKELLLIDMAISQQVRRSRKNLSTCWIDYKKAYDSVPHTWLMRVLELYKINATLRAFLESCMGQWKTVLRYPGCRQIQGNDEPVWIKRGIFQGDSLSPLWFCLALNPLSTLLENSGLGYRLRKDGQVISHLLYMDDLKLFAPNKLQLLELLKVTETFSNAIRMEFGVDKCAVMYVKRGEIMESEGLQLSDSIHLRSLSSTESYKYLGMSEALGINVTDMKQSLRERFFGRLKKVLNSLLSGGNKVRAFNGWVMPVLMYSFGILKWTQTELDALDRRVRTLLTANRMHHPRSSMMRLYIPRKCGGRGFLNVKNLHNREVCSLREYFLEADVGMHRDVVSADKGLTPLSLANGNWRKPKVLDTNDRREEWQGKELHGRFYRALHGPDVDFLASVSWLRFGDLFGETEGFICAIMDEVMMTKNYRKYIVKDGTVDICRACHRPGESIRHIISGCSSLANGEYLHRHNLVARIIHQQLALKYNLVESEVPYYKYAPDPVLVNGNITLYWDRPITTDRTVVANRPDIVVIDRLERRTMIVDITVPHDENLVKAEQDKKNKYLDLAREVVDMWDVSTAIIVPIVVSANGLIAKSLDQHLRRLSLGSWIKGLIQKAVLLDTARIVRRFLSQEP

SEQ ID NO: 28725 - protein, 1202 aa, Omphaloscelis lunosa
MLTRSAARSARLPPPDSPLSSASPPPVPSPIVNAVSTPAAVVASSSSDEYFSPPTSPTPVRRQGRGRPPRSLGLRGQPAPSRVPAAGGCVQRMRWTQLMNENVMRAYYGSTEGGTNLTAYRVRMLSLFQELEPTVNVSAQRLSDQVRVIQRNHRLDDIALDRLRSEVLSNHIVSTRAQTAAQESNIDPTPPRCNHGVEEDDRVATVSSQCNDRLRSALEDAFREYRYTPTELRPRLPRLPMHKKNRALVCALDSQLTNFFESSEDLIDTHSILYCAAVAACRLANVKFPNYDGATRPKPVVPAWQCRIERRIDGARVLIGKLYCFREGNTRPRVMRFVRRAFLGTGISPQEYMSRVTERIDFLKQKVCAWASRIRRYKRRVDRYTQNRMFQSDERWVYRAWERPEQNVTDVCRPDDAATSAFWRSIWSVPVCHTEAGWMQDVERVCETIPEMDAVFITPLDVARAVRPLPNWKSPGPDGLHNFWLKWLSSSHTRLASQFQSSLESGLLPQFLTTGVTHLLHKSGNPAEPKNYRPITCLPTVYKLLTSILRTKINTHIDSNSIMSASQNGCRNGSRGTKELLLIDMAISQQVRRSRKDLSTCWIDYKKAYDSVPHTWLMRVLELYKVDTTLRTFLMSCMGQWRTVLRYPGCRQTQGNDEPVWIKRGIFQGDSLSPLWFCLALNPLSTLLEGSGLGYRLRRGGQVISHLLYMDDLKLFAPNKLRLMELLKVTETFSGAIRMEFGVDKCAVMHVKRGEIMESEGTQLSDSIHLRSLSSAENYRYLGMSESLGINVADMKQSLKERFFGRLKKVLISFLSGGNKVRAFNGWVMPVLMYSFGILKWTQTELDALDRRVRTLLTANRMHHPRSSVMRLYIPRKCGGRGFLNAKTLHNREVCSLREYFFKADVGMHRDVVAVDNGLTPLSMAKENWRKPVVLTTDDRKEVWQSKALHGRFYRALHEPGVDFLASVSWLRFGDLFGETEGFICAIMDEVILTNNYRRHIMKDGTVDVCRACHRPGESIRHIISGCSRLANGEYLHRHNQVARIIHQQLALKYKLVDSEVPYYKYVPDPVLENDHVTLYWDRSIITDRTIIANKPDIVVIDRLARRAMIVDVTIPHDENLVKAEKEKQIKYLDLAHEVVDMWNVSSAIIVPIVVTANGLMAESLDQHLSRLSLGGWIKRLIQKAVLLDTARIVRRFLSLQP

SEQ ID NO: 28726 - protein, 868 aa, Sesamia nonagrioides
MRFVRQAFSGTGISPREYINNVTERIDFLKQKVCAWASRIRRYKKRVDRYTQNRMFQSDERWVYRAWERPEQNEADECRPDDATTSAFWRGIWSVSVCHTEGDWTQDVEQVCEAIPEMDNILITPLDVATAVRSLPNWKSPGPDGLHNFWLKWLSSSHTCLASQFQSSLESGSLPQFLTTGITHLLHKSGSTAEPKNYRPITCLPTVYKVLTSILKAKINNHLDSNSIMSVSQNGCRSGSRGTKELLLIDMAISQQVRRSRKDLSTCWIDYKKAYDSVPHTWLMRVLELYKINATLRTFLRSCMGQWKTVLRYPGSRQIQGNDEPVWIKRGIFQGDSLSPLWFCLALNPLSTLLEDSGLGYRLKRGGQVISHLLYMDDLKLFAPNKLHLMKLLNVTETFSSGIKMEFGVDKCAVMHVKRGQIMESEGITLPDSIHLRSLSSIESYKYLGMSEALGINDADMKQSLKERFFGRLKKVLNSLLSGGNKVRAFNGWVMPVLMYSFGILKWTQTELDALDRRVRTLLTANRMHHPRSSVMRLYISRKCGGRGFLNAKTLHNREVFSLREYFLKTVVGMHHDVVTVDKGLTPLSMAKENWHKPIILTTDDRKMVWQSKELHGRFYRALHGPDVDFLASVSWLRFGDLFGETEGFVCAIMDEVILTNNYRRYIMKDGTIDVCRACHHPGESIRHIISGCSRLANSEYLHRHNQVARIIHQQLALKYKLVDSEVPYYKYVPDPVLENDHVTLYWDRSIITDRTIVANKPDIVVIDRLARLAMIVDVTIPHDGNLVKAEKEKQMKYLDLAHEVVDMWNVNSAVIVPIVVSANGLIAKSLDQHLLRLSLGSWIKGLIQKAVLLDTARIVRRFLSLEP

SEQ ID NO: 28727 - protein, 1202 aa, Sesamia nonagrioides
MLTRAAKRRARPPPPDSSLSTASPPPVSSATVNAVRTPAVVVASSSSDEYFSPPTSPTPVRRQGRGRPPKSLGLRGHPAPSRVPAAGGCVQRMRWTQTMNENVMRAYYGATEGGTNLTAYRERMLSLFQALEPTVNVSAQRLSDQVRVIQRNHRLDDIALDRLRSEVLSNQIAPTLTQTAAQASIIDAVPPRSNRVEEEDDRVETVSSQYNDRLRSALEDAFRDYRSTPTNLRPRLPRLPMHKKNRALVCALDSQLKNFFESSEDLIDTHSILYCAAVAACRLAKVKFPNCEEATRPKLAVPAWQRRIERRIDGTRVLIGKLYCFREGNTRPRVMRFVRQAFSGTGISPREYINNVTERIDFLKQKVCAWASRIRRYKKRVDRYTQNRMFQSDERWVYRAWERPEQNEADVCRPDDATTSAFWRGIWSVSVCHTEGDWTQDVEQVCEAIPEMDNILITPLDVATAVRSLPNWKSPGPDGLHNFWLKWLSSSHTCLASQFQSSLESGSLPQFLTTGITHLLHKSGSTAEPKNYRPITCLPTVYKVLTSILKAKINNHLDSNSIMSVSQNGCRSGSRGTKELLLIDMAISQQVRRSRKDLSTCWIDYKKAYDSVPHTWLMRVLELYKINATLRTFLRSCMGQWKTVLRYPGSRQIQGNDEPVWIKRGIFQGDSLSPLWFCLALNPLSTLLEDSGLGYRLKRGGQVISHLLYMDDLKLFAPNKLHLMKLLNVTETFSSGIKMEFGVDKCAVMHVKRGQIMESEGITLPDSIHLRSLSSIESYKYLGMSEALGINDADMKQSLKERFFGRLKKVLNSLLSGGNKVRAFNGWIMPVLMYSFGILKWTQTELDALDRRVRTLLTANRMHHPRSSVMRLYIPRKCGGRGFLNAKTLHNREVFSLREYFLKTVVGMHHDVVTVDKGLTPLSMAKENWHKPITLTTDDRKMVWQSKELHGRFYRALHGPDVDFLASVSWLRFGDLFGETEGFVCAIMDEVILTNNYRRYIMKDGTIDVCRACHHPGESIRHIISGCSRLANSEYLHRHNQVARIIHQQLALKYKLVDSEVPYYKYVPDPVLENDHVTLYWDRSIITDRTIVANKPDIVVIDRLARLAMIVDVTIPHDGNLVKAEKEKQMKYLDLAHEVVDMWNVNSAVIVPIVVSANGLIAKSLDQHLLRLSLGSWIKGLIQKAVLLDTARIVRRFLSLEP

SEQ ID NO: 28728 - protein, 868 aa, Sesamia nonagrioides
MRFVRQAFSGTGISPREYISHVTERIDFLKQKVCAWASRIRRYKRRVDRYTQNRMFQSDERWVYRAWERTEQNEADVCRPDDAATSAFWRSIWSVPVCHAEGEWIQDVEQVCEMIPEMDTILITPIDVATAVRSLPNWKSPGPDGLHNFWLKWLSSSHTCLASQFQSSLESGSLPQFLTTGITHLLHKSGSTAEPNNYRPITCLPTVYKVLTSILKAKINKHLDSNSIMSVSQNGCRSGSRGTKELLLIDMAISQQVRRSRKDLSTCWIDYKKAYDSVPHTWLMRVLELYKVNATLRTFLRSCMGQWKTVLRYPGSRRIQGNDEPVWIKRGIFQGDSLSPLWFCLALNPLSTLMEDSGLGYRLRRGGQVISHLLYMDDLKLFAPNKLHLMKLLNVTETFSSGIKMEFGVDKCAVMHVKRGQIMESEGITLPDSIHLRSLSSVESYKYLGMSEALGINDADMKQSLKGRFFGRLKKVLKSLLSGGNKVRAFNGWVMPVLMYSFGILKWTQTELDALDRRVRTLLTANRMHHPRSSVMRLYIPRKCGGRGFLNAKTLHNREVCSLREHFFKTVVGMHHDVVTVDKGLTPLSMAKENWHKPIILTTDDRKMIWQSKELHGRFYRALHEPDVDFLASVSWLRFSDLFGETEGFVCAIMDEVILTNNYRRYIMRDGTIDVCRACHHPGESIRHIISGCSRLANGEYLHRHNQVARIIHQQLALKYKLVDSEVPYYKYVPDPVLENDHATLYWDRSIITDRTIVANKPDIVVIDRLARLAMIVDVTIPHDGNLVKAEKEKQIKYLDLAHEVVDMWNVNSAVIVPIIVSANGLIAKSLDQHLLRLSLGSWIKGLIQKAVLLDTARIVRRFLSLEP

SEQ ID NO: 28729 - protein, 1199 aa, Mamestra configurata
MITRAAARRAHPPFPGSSLSSASPTPDIGSQVSPVVAVASSSSDEYFSPPTSPTPVRRQGRGRPPRSLGSRGQPAPSRVPAAGGCVQRMRWTQSMNENVMRAYYGSTEGGTNLTAYRVRMLSLFQDLEPTVNVSAQRLSDQVRVIQHNCRLDDAALERLRSEVLSNLIISTPTQTVVQAPASGAITPRPNNGSDEVDDRVVTVSSQCNDRLRSALEDALREYRLTPTELRPRLPRLPMHKKNRALVCALDSLLQNIFESSESLVDTHSILFCGAVAACRIANVKFPSCDEAIRPKPAAPAWQCRIERRIDEARALIGKLYCFREGNTRPRVMRFVRRAFSGTGISPREYTFRVTERIDFLKQKVCAWANRIRRYKRRVDRYSQNRMFQSDERWVYRAWERPEQSVTDVYRPDDVATSTFWRSIWSVPICHAEGGWMRDVERVCEAIPQMEKITITTLDIAKAVRPLPNWKSPGPDGLHNFWLKWYSSSHALLASQFQSSLESGSLPQFLTTGITHLLHKTGSPAEPKNYRPITCLSTVYKLLTSILRAKINEHIESNSIISASQNGCRKGSRGTKELLLIDMAISQQVRRSRKDLSTCWIDYKKAYDSVPHTWLMKVLELYKIDATLRTFLESCMRQWKTVLRYPGCQPIQGSDEPVWIKRGIFQGDSLSPLWFCLALNPLSTLLEDSGLGYRLRRGGQAISHLLYMDDLKLFAPNNLRLMELLKVTETFSSAIRMEFGVDKCAVMHVKKGEIMESEGIQLSDSIQVRSLSSTETYKYLGMSEALGINGTDMKQSLRERFFGRLKKVLNSLLSGGNKVRAFNGWVMPVLMYTFGILKWTQTELDALDRRVRTLLTANRMHHPRSSVMRLYIPRKCGGRGFLNAKTLHNREMCSLREYFLKADVGMHRDVVAVDKGLTPLSMAKENWRTPVILTTDDRKEVWKGKELHGRFYRALHGSDVDFSASVAWLRFGDLFGETEGFVCAIMDEVILTNNYRRHIMKDGTVDMCRACHRPGESIRHIISGCSRLANGEYLHRHNQVARIIHQQLALKYKLVDSEVPYYKYVPDPVLENDHVTLYWDRSIITDRTIVANKPDIVVIDRLARRTMIIDVTIPHDENLVKAEKEKQIKYLDLAHEVVDMWNVNSAVIVPIVITANGLMAKSFDDHLSKLALRGWIKGLIQKAVLLDTARIVRRFLSLEP

SEQ ID NO: 28730 - protein, 1199 aa, Noctua janthe
MITRAAYRRARLTTPDSSLSSASPPPDPGSPVSPAAAVASSSSDEYFSPPTSPTPVRRQGRGRPPKSLGLRGHPAPSRVPAAGGCVQRMRWTQTINENVMRAYYGSTEGGTNLTAYRVRMLSLFQVLEPIVNVSAQRLSDQVRVIQRNHMLDDAALDRLRSEVLSNRIVLTPAQTAVQASTIDATPPRSNPAVVEEDDRVAMVSSQCNDRLRSALEDALREYRSTPTKLRPRLPRLPMHNKNRALVCALDSQLKNIFESSENLVDTHSILYCGAVAACRLANVKFPNDDVAIRPKPAVPTWQRRIECRIDEARVLIGKLHCFREGNTRPRVMRFVRRAFSGTGISPQEYMSRVTERIDFLKQKVYAWANRIRRYKRRVDRYSQNRIFQSDERWVYRAWERPEQNMTDVCRPDDAATSSFWRSIWSVPVCHTEADWMRDVERACEPIPEMEPILITSIDITRAVRPLPNWKSPGPDGLHNFWLKWLSSSHACLASQFQSSLESGSLPQFLTTGVTHLLHKSGSPAEPKNYRPITCLSTVYKLLTSILRVKINTHIDKNFIMSASQNGCRNRSRGTKELLLIDMAISQQVRRSRKDLSTCWIDYKKAYDSVPHTWLMRVLELYKIDATLRAFLESCMGQWRTVLRYPGCRQIQGNDEPVWIKRGIFQGDSLSPLWFCLALNPLSTLLEDSGLGYRLRRGGQVISHLLYMDDLKLFAPNKLRLMELLKVTETFSNAIRMEFGVDKCAVMYVKRGEIMESEGIQLSDSIHLRSLSSSESYKYLGMSESLGINVTDMKQSLRERFFGRLNKVLNSLLSGGNKVRAFNGWVMPVLMYSFGVLKWTQTELDALDRRVRTLLTANRMHHPRSSVMRLYIPRKCGGRGFLNAKTLHNREICSLREYFLKTEVDMHRDVVAVDKGLTPLSMAKENWRKPVVLTTDDRKEVWQGKELHGRFYRALHGPDVDFLASVSWLRFGDLFGETEGFVCAIMDEVMLTNNYRKYIMKDGTVDVCRACHRPGESIRHIISGCSRLANGEYLHRHNQVARIIHQQLALKYKLVESEVPYYKYVPDPVLEKDHVTLYWDRSIITDRTIVANKPDIVVIDRLARRVMIVDVTIPHDENLVKAEKEKQIKYLDLAHEVVDMWNVNSAIIVPIVVTANGLIAKSLDDHLSRLSLGGWIKGLIQKAVLLDTARIVRRFLSLEP

SEQ ID NO: 28731 - protein, 868 aa, Noctua janthe
MRFVRRAFSGTGISPQEYMSRVTERIDFLKQKVYAWANRIRRYKRRVDRYSQNRIFQSDERWVYRAWERPEQNMTDVCQPDDAATSSFWRSIWSVPVCHTEADWIRDVERTCEPIPEMEPILITPIDIARAVRPLPNWKSPGPDGLHNFWLKWLSSSHTCLASQFQSSLESGSLPQFLTTGVTHLLHKSGSPTEPKNYRPITCLSTVYKLLTSILRVKINTHIDKNFIMSASQNGCRNRSRGTKELLLIDMAISQQVRRSRKDLSTCWIDYKKAYDSVPHTWLMRVLELYKIDATLRAFLESCMGQWRTVLRYPGCRQIQGNDEPVWIKRGIFQGDSLSPLWFCLALNPLSTLLEDSGLGYRLRRGGQVISHLLYMDDLKLFAPNKLRLMELLKVTETFSNAIRMEFGVDKCAVMYVKRGEIMESEGIQLSDSIHLRSLSSSESYKYLGMSESLGINVTDMKQSLRERFFGRLNKVLNSLLSGGNKVRAFNGWVMPVLMYSFGVLKWTQTELDALDRRVRTLLTANRMHHPRSSVMRLYIPRKCGGRGFLNAKTLHNHEICSLREYFLKTEVGMHRDVVAVDKGLTPLSMAKENWRKPVVLTTDDRKEVWQGKELHGRFYRALHGPDVDFLASVSWLRFGDLFGETEGFVCAIMDEVMLTNNYRKYIMKDGTVDVCRACHRPGESIRHIISGCSRLANGEYLHRHNQVARIIHQQLALKYKLVESEVPYYKYVPDPVLEKDHVTLYWDRSIITDRTIVANKPDIVVIDRLARRVMIVDVTIPHDENLVKAEKEKQIKYLDLAHEVVDMWNVNSAIIVPIVVTANGLIAKSLDDHLSRLSLGGWIKGLIQKAVLLDTARIVRRFLSLEA

SEQ ID NO: 28732 - protein, 1199 aa, Noctua janthe
MITRAAYRRARLTTPDSSLSSASPPPDPGSPVSPAAAVVSSSSDEYFSPPTSPTPVRRQGRGRPPKSLGLRGHPAPSRVSAAGGCVQRMRWTQTINENVMRAYYGSTEGGTNLTAYRVRMLSLFQVLEPIVNVSAQRLSDQVRVIQRNHMLDDAALDRLRSEVLSNRIVLTPAQTAVQASTIDATPPRSNPAVVEEDDRVAMVSSQCNDRLRSALEDALREYRSTPTKLRPRLPRLPMHNKNRALVCALDSQLKNIFESSENLVDTHSILYCGAVAACRLANVKFPNYDVAIRPKPAVPTWQRRIECRIDEARVLIGKLHCFREGNTRPRVMRFVRRAFSGTGISPQEYMSRVTERIDFLKQKVYAWANRIRRYKRRVDRYSQNRIFQSDERWVYRAWERPEQNMTDVCRPDDAATSSFWRSIWSVPVCHTEADWMRDVERACEPIPEMEPILITSIDITRAVRPLPNWKSPGPDGLHNFWLKWLSSSHACLASQFQSSLESGSLPQFLTTGVTHLLHKSGSPAEPKNYRPITCLSTVYKLLTSILRVKINTHIDKNFIMSASQNGCRNRSRGTKELLLIDMAISQQVRRSRKDLSTCWIDYKKAYDSVPHTWLMRVLELYKIDATLRAFLESCMGQWRTVLRYPGCRQIQGNDEPVWIKRGIFQGDSLSPLWFCLALNPLSTLLEDSGLGYRLRRGGQVISHLLYMDDLKLFAPNKLRLMELLKVTETFSNAIRMEFGVDKCAVMYVKRGEIMESEGIQLSDSIHLRSLSSSESYKYLGMSESLGINVTDMKQSLRERFFGRLNKVLNSLLSGGNKVRAFNGWVMPVLMYSFGVLKWTQTELDALDRRVRTLLTANRMHHPRSSVMRLYIPRKCGGRGFLNAKTLHNREICSLREYFLKTEVGMHRDVVAVDKGLTPLSMAKENWRKPVVLTTDGRKEVWQGKELHGRFYRALHGPDVDFLASVSWLRFGDLFGETEGFVCAIMDEVMLTNNYRKYIMKDGTVDVCRACHRPGESIRHIISGCSRLANGEYLHRHNQVARIIHQQLALKYKLVESEVPYYKYVPDPVLEKDHVTLYWDRSIITDRTIVANKPDIVVIDRLARRVMIVDVTIPHDENLVKAEKEKQIKYLDLAHEVVDMWNVNSAIIVPIVVTANGLIAKSLDDHLSRLSLGGWIKGLIQKAVLLDTARIVRRFLSLEP

SEQ ID NO: 28733 - protein, 1200 aa, Mythimna ferrago
MLTRTAARRARHPPPGSSLSSASPPPDPGSPVSPAAAVASSSSDEYFSPPTSPTPVRRPGRGRPPKSMGPRGQPAPSRVPAAGGCVQRMRWTQSMNENVMRAYYGSTEGGTNLTAYRERMLSLFQVLEPTVNVSAQRLSDQVRVIQRNHRLDDAALDRLRLEILSNQIVSTSTQTQTAATPTTNAISPRSDHNNDDADDRVVTVSSQCNERLRSALEDALCEYMSTPTELRPRLPRLPMHKKNRALVCALDSLLKNIFESSENLVDTHSILYCGAVAACRLAKIKFPNIDGTIRPKTAVPAWQCRIERRIDEARVLIGKLHCFREGNTRPRVMRFVRRAFLGTGISPQGYMSRVTERIDFLKQKVCAWASRIRRYKRRVDRYSQNRMFQSDERWVYRAWERPEHSVIDECRPDDLATITFWRNIWSVPVSHTEGGWMRDVERVCDAIPEMEKVTITPEDVAKAVRPLPNWKSPGPDGLQNFWLKWYSSSHAPLASQFQSILESGSLPEYLTTGVTHLLHKTGNPVDPKNYRPITCLSTVYKLLTSILRAKINIHIENNQIISPSQNGCRNGSRGTKELLLIDMAISQQTRRSRKDLSTCWIDYKKAYDSVPHTWLMRVLELYKIDITLRTFLESCMRQWKTVLRYPGCRPIQGNDEPIWIKRGIFQGDSLSPLWFCLALNPLSTLLEDSGLGYRLRRGGQVISHLLYMDDLKLFAPSNLQLMELLKVTETFSSAIRMEFGVDKCAGMHVKRGEIMESEGIQLPDSIHLRSLSSTETYRYLGMSEALGINNADMKQSLKERFFGRLKKVLNSLLSGGNKVRAFNGWVMPVLMYSFGILKWTQTELDALDRRVRTLLTANRMHHPRSSVMRLYIPRKCGGRGFLNAKTLHNREVCSLREYFLKTDVGMHRDVVAVDKGLTPLSMAKEDWHKPVIMTTDNRKEIWKGKELHGRFFRALHEPDVDFLASVAWLRFSDLFGETEGFVCAIMDEVILTNNYRRYIMKDGTVDVCRACHRPGESIRHIISGCSRLANGEYLHRHNQVARIIHQQLALKYNLVDLEVPYYKYVPDPVLENDHVTLYWDRSIITDRTIVANKPDIVVIDRLARRAMIVDITIPHDENLVKAEKEKQIKYLDLAHEIVAMWNVDSAIIVPIVVTANGLIAKSFDDHLSKLSLRGWIKGQIQKAVLLDTARIVRKFLSLEP

SEQ ID NO: 28734 - protein, 1201 aa, Hydraecia micacea
MLTRLAAKRARLTPPDSSLSSAPPPPEPSPIESAVTPTVAVASSSSDEYFSPPTSPTPVRRQGRGRPPRSLGLRGQPAPSRVPATGGCVQRMRWTQSMNENVMRAYYGSTEGGTNLTAYRDRMLSLFQELEPTVNVSAQRLSDQVRVIQRNHRLDDIALDRLRSEVLSNHIVSTPAQTAAQTSTVDAIPPRSNHVEEEDDRVDTVSSQCNVRLRSALEDAFHEYRLTPTELRPRLPRLPMHKKNRALVCALNSQLKNFFENSEDLVDTHSILYCAAVAACRLANVKFPICDGATRPKPAVPAWQHRIERRIDGARVLIGKLYCFREGNTRPRVMRFVKRAFSGTGISPREYISHVTERIDFLKQKVCAWASRIRRYKRRIDRYTQNRMFQSDERWVYRAWERPEQNMTDVCRPDDAATSAFWRSIWSVPVCHTEAGWIQDVERVCETVPEMETVLITPLDVARAVRPLPNWKSPGPDGLHNFWLKWLNSSHTCLASQFQSSLESGSLPQFLTTGVTHLLHKSGSPAEPKNYRPITCLSTVYKLLTSILRAKINTHIENNSIMSASQNGCRNGSRGTKELLLIDMAISQQVRRSRKDLSTCWIDYKKAYDSVPHTWLMRVLELYKIDATLRTFLESCMGQWKTVLRYPGCRQIQGNDEPVWIKRGIFQGDSLSPLWFCLALNPLSTLLEDSGLGYRLRRGGQVISHLLYMDDLKLFAPIRLHLMELLKVTETFSSAIRMEFGVDKCAVMHVKRGEIMESEGIQLSDSINLRSLSSSESYKYLGMSEALGINVTDMKQSLKERFFCRLRKVLISLLSGGNKVRAFNGWVMPVLMYSFGILKWTQTELDALDRRVRTLLTANRMHHPRSSVMRLYIPRKCGCRGFLNAKTLHNREVCSLREYFLKAEVGMHRDVVAVDKGLTPLSMAKENWRKPVVLTTDDRRKVWQSKELHGRFYRALHEPGVDFLASVSWLRFGDLFGETEGFVCAIMDEVILTNNYRRHIMKDGTVDVCRACHRPGESIRHIISGCSRLANGEYLHRHNQVARIIHQQLALKYKLVDSEVPYYKYVPDPVLENDHVTLYWDRSIITDRTIVANKPDIVVIDRLARRTMIVDVTIPHDGNLVKAEKEKQMKYLDLAHEVVDMWNVSSAVIVPIVVSANGLMAEGLDEHLSRLSLGGWIKSLIQKAVLLDTARIVRRFLSLEP

SEQ ID NO: 28735 - protein, 1202 aa, Noctua pronuba
MLTRAAARRARLSPPDSSLSSASPLPESSPIVSAVTPAVAVASSSSDEYFSPPTSPTPVRRQGRGRPPTSLGLRGQPAPSRVPATGGCVQRMRWTHSINENVMRAYYGSTEGGTNLTAYRVRMLSLFQVLEPTVNVSGQRLSDQVRVIQRNHMLDDAVLDRLRSEVLSNRIVLTPSQTVVQTTAIDVSPPRSNPAVVEEDDRVATVSSQCNDRLRSALEDALREYRYTPTELRPRLPRLPMHKKNRALVCALDSQLKNLFESSEDLVDTHSILYCGAVAACRLANVKFTNSDAATRPKPAVPAWQCRIERRIDGARVLIGKLHCFREGNTRPRVMRFVRRAFSGTGIGPQEYMSRVTERIDFLKQKVYAWANRIRRYKRRVDRYSQNRMFQSDERWVYRAWERPEQNMTDVCRPDDATTSSFWSSIWSVPVCHTEGDWMRAVERVCEPIPEMEPILITSLDVARSVRPLPNWKSPGPDGLHNFWLKWLSSSHTCLASQFQSSLESGALPQFLPTGVTHLLHKSGNPAEPKNYRPITCLSTVYKLLTSILRAKINTHIDKNSIMSASQNGCRNGSRGTKELLLIDMAISQQVRRSRKDLSTCWIDYKKAYDSVPHTWLMRVLELYKIDATLRTFLESCMGQWRTVLRYPGCRQIQGNDEPVWIKRGIFQGDSLSPLWFCLALNPLSTLLEDSGLGYRLRRGGQVISHLLYMDDLKLFAPNKLQLMELLKVTETFSSAIRMEFGVDKCAVMYVKRGEIMESEGIQLSDSIHLRSLSSSESYKYLGMSEALGINVTDMKQSLRERFFGRLKKVLNSLLSGGNKVRAFNGWVMPVLMYSIGILKWTQTELDALDRRVRTLLTANRMHHPRSSVMRLYIPRKCGGRGFLNAKTLHNRELCSLREYFLKAEVGMHRDVVAVDKGLTPLSMAKENWRKPVVLTTDDRKEVWQGKELHGRFYRALHGPDVDFLASVSWLRFGDLFGETEGFVCAIMDEVMLTNNYRKYIMKDGTVDVCRACHRPGESIRHIISGCSRLANGEYLHRHNQVARIIHQQLALKYKLVESEVPYYKYVPDPVLEKDHVTLYWDRSIITDRTIVANKPDIVVIDRSARRVMIVDVTIPHDENLVKAEKEKQIKYLDLAHEVVDMWNVNSAIIVPIVVTANGLIAKSLDDHLSRLSLGGWIKGLIQKAVLLDTARIVRRFLSLEP

SEQ ID NO: 28736 - protein, 1202 aa, Noctua pronuba
MLTRAAARRARLSPPDSSLSSASPLPESSPIVSAVTPAVAVASSSSDEYFSPPTSPTPVRRQGRGRPPTSLGLSGHPAPSRVPATGGCVQRMRWTHPINENVMRAYYGSTEGGTNLTAYRVRMLSLFQVLEPTVNISAQRLSDQVRVIQRNHMLDDAVLDRLRSEVLSNRIVLTPSQTVVQTTAIDVSPPRSHPAVVEVDDRVATVSSQCNDRLRSALEDALREYRYTPTELRPRLPRLPMHKKNRALVCALDSQLKNLFESSEDLVDTHSILYCGAVAACRLAKLKFTNSDAATRPKPAVPAWQCRIERRIDGARVLIGKLHCFREGNTRPRVMRFVRRAFSGTGISPQEYMSRVTERIDFLKQKVYAWANRIRRYKRRVDRYSQNRMFQSDERWVYRAWERPEQNMTDVYRPDDATTSSFWSSIWSVPVCHTEGDWMRAVERVCEPIPEMEPILITSLDVARSVRPLPNWKSPGPDGLHNFWLKWLSSSHTCLASQFQSSLESGALPQFLTTGVTHLLHKSGNPAEPKNYRPITCLSTVYKLLTSILRAKINTHIDKNSIMSASQNGCRNGSRGTKELLLIDMAISQQVRRSRKDLSTCWIDYKKAYDSVPHTWLMRVLELYKIDATLRTFLESCMGQWRTVLRYPGCRQIQGSDEPVWIKRGIFQGDSLSPLWFCLALNPLSTLLEDSGLGYRLRRGGQVISHLLYMDDLKLFAPNKLRLMELLKVTETFSSAIRMEFGVDKCAVMYVKRGEIMESEGIQLSDSIHLRSLSSSESYKYLGMSEALGINVTDMKQSLRERFFGRLKKVLNSLLSGGNKVRAFNGWVMPVLMYSFGILKWTQTELDALDRRVRTLLTANRMHHPRSSVMRLYIPRKCGGRGFLNAKTLHNRELCSLREYFLKAEVGMHRDVVAVDKGLTPLSMAKENWRKPVVLTTDDRKEVWQGKELHGRFYRALHGPDVDFLASVSWLRFGDLFGETEGFVCAIMDEVMLTNNYRKYIMKDGTVDVCRACHRPGESIRHIISGCSRLANGEYLHRHNQVARIIHQQLALKYKLVESEVPYYKYVPDPVLEKDHVTLYWDRSIITDRTIVANKPDIVVIDRSARRVMIVDVTIPHDENLVKAEKEKQIKYLDLAHEVVDMWNVNSAIIVPIVVTANGLMAKSLDDHLSRLSLGGWIKGLIQKAVLLDTARIVRRFLSLEP

SEQ ID NO: 28737 - protein, 1169 aa, Noctua pronuba
MLTRAAARRARLSPPDSSLSSASPLPESSPIVSAVTPAVAVASSSSDEYFSPPTSPTPVRRQGRGRPPTSLGLRGQPAPSRVPATGGCVQRMRWTHSINENVMRAYYGSTEGGTNLTAYRVRMLSLFQVLEPTVNVSAQRLSDQVRVIQRNHMLDDAVLDRLRSEVLSNRIVLTPSQTVVQTTAIDVSPPRSNPAVVEEDDRVATVSSQYNDRLRSALEDALREYRYTPTELRPRLPRLPMHKKNRALVCALDSQLKNLFESSEDLVDTHSILYCGAVAACRLANVKFTNSDAATRPKPAVPAWQCRIERRIDGARVLIGKLHCFREGNTRPRVMRFVRRAFSGTGISPQEYMSRVTERIDFLKQKVYAWANRIRRYKRRVDRYSQNRMFQSDERWVYRAWERPEQNMTDVCRPDDATTSSFWSSIWSVPVCHTEGDWMRAVERVCEPIPEMEPILITSLDVARSVRPLPNWKSPGPDGLHNFWLKWLSSSHTCLASQFQSSLESGALPQFLTTGVTHLLHKSGNPAEPKNYRPITCLSTVYKLLTSILRAKINTHIDKNSIMSASQNGCRNGSRGTKELLLIDMAISQQVRRSRKDLSTCWIDYKKAYDSVPHTWLMRVLELYKIDATLRTFLESCMGQWRTVLRYPGCRQIQGNDEPVWIKRGIFQGDSLSPLWFCLALNPLSTLLEDSGLGYRLRRGGQVISHLLYMDDLKLFAPNKLRLMELLKVTETFSSAIRMEFGVDKCAVMYVKRGEIMESEGIQLSDSIHLRSLSSSESYKYLGMSEALGINVTDMKQSLRERFFDRLKKVLNSLLSGGNKVRAFNGWVMPVLMYSFGILKWTQTELDALDRRVRTLLTANRMHHPRSSVMRLYIPRKCGGRGFLNAKTLHNRELCSLREYFLKAEVGMHRDVVAVDKGLTPLSMAKENWRKPVVLTTDDRKEVWQGKELHGRFYRALHGPDVDFLASVSWLRFGDLFGETEGFVCAIMDEVMLTNNYRKYIMKDGTVDVCRACHRPGESIRHIISGCSRLANGEYLHRHNQVARIIHQQLALKYKLVESEVPYYKYVPDPVLEKDQVTLYWDRSIITDRTIVANKPDIVVIDRSARRVMIVDVTIPHDENLVKAEKEKQIKYLDLAHEVVDMWNVNSAIIVPIVVTANGLIAKSLDDHL

SEQ ID NO: 28738 - protein, 1207 aa, Ochropleura plecta
MLTRRRAQEQQALPSSPGSSLSSASQPPGRATRVSAVSPVAAVASSSSDEFFSPPSSPPPPPTRQRRGRGRPPAGLGSRGQQAPIRVPAAGGNVSRMRWTSFINANVMRAYYGSTEGGTNLTAYRVRMLSLFQDLEPTINVSAQRLSDQVRVIQRNHLLDDAALDRLRSEVLSNRVILTTPQTAVQASAIDVTQPRSNPAVVEEDDRVATVSSQCNDRLRSALEDALRDYRSTPAELRPRLPRLPMHKKNRALVCALDSQLKNLFESSEDLVDTHSILYCGAVAVCRLANVKFPNCDVATRPKPSVPAWQCRIERRIDEARALIGKLYCFREGNTRPRVMRFVRRAFSGTGISPQEYMSRTTERIDFLKQKVYAWANRIQRYKRRVDRYSQNSMFRSDERWVYRAWERPEQSVTDVCRPDDVATSSFWHSIWSVRVCHTEAGWMRDVERVCETIPEMEPILITSLDIASAVRPLPNWKSPGPDGLHNFWLKWLSSSHTRLASQFQSCLESGSLPQFLTTGVTHLLYKSGSPAEPKNYRPITCLSTVYKLLTSILRAKINSHIVKNSIISASQNGCRNGSRGTKELLLIDMAISQQVRRSRKDLSTCWIDYKKAYDSVPHTWLKRVLELYKIDTTLRTFLESCMGQWRTVLRYPGCRQIQGNDEPVWIKRGIFQGDSLSPLWFCLALNPLSTLLEDSGLGYRLRRGGQVISHLFYMDDLKLFAPNKLQLMELLKVTETFSNAIRMEFGVDKCAVMYVKRGEIMESEGIHLSDSIHLRSLSSSESYKYLGMSEALGINVADMKQLLRERFFGRLKKVLKSLLSGGNKVRAFNSWVMPVLMYSFGILKWTQTELDALDRRVRTLLTANRMHHPRSSVMRLYIPRKCGGRGFLNAKTLHNREVCSLREYFLKTDVGMHRDVVAVDKGLTPLSMAKENWRKPVVLTTDYRKEVWQGKELHGRFYKALHGPDVDFLASVSWLRFGDLFGETEGFVFAIMDEVMLTNNYRKYIMKDGTVDVCRACHRPGESIRHIISGCSRLANGEYLHRHNQVARIIHQQLALKYNLVESEVPYYKYVPDPVLEKDHVTLYWDRSIITDRTIVANKPDIVVIDRSARRVMIIDVTIPHDENLVKAEKEKQLKYLDLAHEVVDMWNVNSAIIVPIVITANGLIAKSLDEHLSKLSLGGWIKGLIQKAVLLNTARIVRRFLSLEP

SEQ ID NO: 28739 - protein, 1080 aa, Ochropleura plecta
MLSLFQDLEPTINVSAQRLSDQVRVIQRNHLLDDAALDRLRSEVLSNRVILTTPQTAVQASAIDVTQPRSNPAVVEEDDRVATVSSQCNERLRSALEDALRDYRSTPTELRPRLPRLPMHKKNRALVCALDSQLKNLFESSENLVDTHSILYCGAVAVCRVANVKFQNSDVATRPKPSVPVWQCRIERRIDEARVLIGKLYCFREGNTRPRVMRFVRRAFSGTGISPQEYLSCTTERIDFLKQKVYAWANRIRRYKRRVDRYSQNRMFRSDERWVYRAWERPEQSVTDVCRPDDVATSSFWHSIWSVPVCHTEADWMRDVERVCETIPEMEPILITSIDIASAVRPLPNWKSPGPDGLHNFWLKWLSSSHTRLASQFQSCLESGSLPQFLTTGITHLLYKSGSPAEPKNYRPITCLSTVYKLLTSILRAKINSHIDKNSIMSASQNGCRNGSRGTKELLLIDMAISQQVRRSRKDLSTCWIDYKKAYDSVPHTWLKRVLELYKIDATLRAFLESCMGQWRTVLRYPGCRQIQGNDEPVWIKRGIFQGDSLSPLWFCLALNPLSTLLEDSGLGYRLRRGGKVISHLLYMDDLKLFAPNKLRLMELLKVTETFSNAIRMEFGVDKCAVMYVKRGEIMESEGIQLSDSIHLRSLSSSESYKYLGMSEALGINVADMKQLLRERFFGRLKKVLKSLLSGGNKVRAFNSWVMPVLMYSFGILKWTQTELDALDRRVRTLLTGNRMHHPRSSVMRLYIPRKCGGRGFLNAKTLHNREVCSLREYFLKTDVGMHRDVVAVDKGLTPLSMAKENWRKPVVLTTNDRKVVWQGKELHGRFYKALHGPDVDFLASVSWLRFGDLFGETEGFVCAIMDEVMLTNNYRKYIMKDGTVDVCRACHRPGESIRHIISGCSRLANSEYLHRHNQVARVIHQQLALKYNLVESEVPYYKYVPDPVLEKDHVTLYWDRSIITDRTIVANKPDIVVIDRSARRVMIIDVTIPHDENLVKAEKEKQLKYLDLAHEVVDMWNVNSAIIVPIVVTANGLIAKSLDEHLSKLSLGGWIKGLIQKAVLLDTARIVRRFLSLEP

SEQ ID NO: 28740 - protein, 1111 aa, Ochropleura plecta
MRWTSFINANVMRAYYGSTEGGTNLTAYRVRMLSLFQDLEPTINVSAQRLSDQVRVIQRNHLLDDAALDRLRSEVLSNRVILTTPQTTVQASAIDVTQPRSNPAVVEEDDRVATVSSQCNDRLRSALEDALRDYRSTPAELRPRLPRLPMHKKNRALVCALDSQLKNLFESSEDLVDTHSILYCGAVAVCRLANVKFPNCDVATRPKPSVPAWQCRIERRIDEARALIGKLYCFREGNTRPRVMRFVRRAFSGTGISPQEYMSRTTERIDFLKQKVYAWANRIQRYKRRVDRYSQNRMFRSDERWVYRAWERPEQSVTDVCRPDDVATSSFWHSIWSVRVCHTEAGWMRDVERVCETIPEMEPILITSLDIASAVRPLPNWKSPGPDGLHNFWLKWLSSSHTRLASQFQSCLESGSLPQFLTTGVTHLLYKSGSPAEPKNYRPITCLSTVYKLLTSILRAKINSHIVKNSIISASQNGCRNGSRGTKELLLIDMAISQQVRRSRKDLSTCWIDYKKAYDSVPHTWLKRVLELYKIDTTLRTFLESCMGQWRTVLRYPGCRQIQGNDEPVWIKRGIFQGDSLSPLWFCLALNPLSTLLEDSGLGYRLRRGGQVISHLFYMDDLKLFAPNKLRLMELLKVTETFSNAIRMEFGVDKCAVMYVKRGEIMESEGIHLSDSIHLRSLSSSESYKYLGMSEALGINVADMKQLLRERFFGRLKKVLKSLLSGGNKVRAFNSWVMPVLMYSFGILKWTQTELDALDRRVRTLLTANRMHHPRSSVMRLYIPRKCGGRGFLNAKTLHNREVCSLREYFLKTDVGMHRDVVAVDKGLTPLSMAKENWRKPVVLTTDYRKEVWQGKELHGRFYKALHGPDVDFLASVSWLRFGDLFGETEGFVCAIMDEVMLTNNYRKYIMKDGTVDVCRACHRPGESIRHIISGCSRLANGEYLHRHNQVARIIHQQLALKYNLVESEVPYYKYVPDPVLEKDHVTLYWDRSIITDRTIVANKPDIVVIDRSARRVMIIDVTIPHDENLVKAEKEKQLKYLDLAHEVVDMWNVNSAIIVPIVITANGLIAKSLDEHLSKLSLGGWIKGLIQKAVLLDTARIVRRFLSLEP

SEQ ID NO: 28741 - protein, 962 aa, Hecatera dysodea
MHKKNRALVCALDSLLQNTFVSSENLVDTHSILYCGAVAACRLANVKFPSGDEAIRPKPAAPAWQCRIERRIDEARALIGKLYCFREGNTRPRVMCFVRRAFAGTGISPHEYTSRITERIDFLKQKVCAWANRIRRYKRRADRYSQNRMFQSDERWVYRTWERPEQSVTDVCRPDDIATTTFWRSIWSVPVRHTEGDWMRDVERVCEAIPQMEKITITPTDIATAVRPLPNWKSPGPDGLHNFWLKWYSSSHAVLASQFQSSLESGSLPQFLTTGITHLLHKTGSPAEPKNYRPITCLSTVYKLLTSILRVKINEHIESNSIMSSSQNGCRKGSRGTKELLLIDMAISQQVRRSRKDLSTCWIDYKKAYDSVPHTWLMKVLELYKIDATLRTFLESCMRQWKTVLRYPGCRPIQGSDEPIWIKRGIFQGDSLSPLWFCLALNPLSTLLEDSGLGYRLRRGGQAISHLLYMDDLKLFAPNNLRLMELLKVTETFSSAIRMEFGVDKCAVMHVKKGEIMESEGIQLSDSIQVRSLSSTETYKYLGMSEALGINGADMKQSLKERFFGRLKKVLNSLLSGGNKVRAFNGWVMPVLMYSFGILKWTQTELDALDRRVRTLLTANRMHHPRSSVMRLYIPRKCGGRGFLNAKTLHNREMCSLREYFLETDVGMHRDVVAVDKGLTPLSMAKENWRKPVIHTTDDRKEVWKGKELHGRFYRALYGSDVDFSASVAWLRFGDLFGETEGFVCAIMDEVILTNNYRRHIMKDGTVDVCRACHRPGESIRHIISGCSRLANSEYLHRHNQVARIIHQQLALKYKLVNSEVPYYKYVPDPVLENDHVTLYWDRSIITDRTIVANKPDIVVIDRLARRTMIIDVSIPHDENLVKAEKEKQIKYLDLAHEVVDMWDVDSAVIVPIIVTANGLMAKSFDDHLSKLALRSWVKGLIQKAVLLDTARIVRRFLSLQP

SEQ ID NO: 28742 - protein, 962 aa, Hecatera dysodea
MHKKNRALVCALDSLLKNIFESSENLVDTHSILYCGAVAACRVANVKFSNSDGATRPKNAAPAWQCRIERRIDEARVLIGKLYCFREGNTRPRVMRFVRRAFLGTEISPQEYMSRVTERIDFLKQKVCAWANRIRRYKRRVDRYSQNRMFQSDERWVYRAWERPEQSVTDVCRPDDVTTNTFWRSIWSVPVCHAEGGWMRDVERVCEAIPQMEKITITTVDIATAVRPLPNWKSPGPDGLHNFWLKWYSSSHALLASQFQSSLDSGSLPQFLTTGITHLLHKTGSPAEPKNYRPITCLSTVYKLLTSILRVKINEHIESNSIMSYSQNGCRKGSRGTKELLLIDMAISQQVRRSRKDLSTCWIDYKKAYDSVPHTWLLKVLELYKVDATLRTFLESCMRQWKTVLRYPGCRPIQGNEEPVWIKRGIFQGDSLSPLWFCLALNPLSTLLEDSGLGYRLRRGGQTISHLLYMDDLKLFAPNNLRLMELLKVTETFSSAIRMEFGVDKCAVMHVKKGEIMESEGIQLSDSIQVRSLSSTETYKYLGMSEALGINGADMKQSLKERFFGRLKKVLNSLLSGGNKVRAFNGWVMPVLMYSFGILKWTQTELDALDRRVRTLLTANRMHHPRSSVMRLYIPRKCGGRGFLNAKTLHNREMCSLREYFLKADVGMHRDVVAVDKGFTPLSMAKENWRKPVIPTTDDRREVWRGKELHGRFYRALYGSDVDFSASVAWLRFGDLFGETEGFVCAIMDEVILTNNYRRHIMKDGTVDVCRACHRPGESIRHIISGCSRLANGEYLHRHNQVARIIHQQLALKYKLVDSEVPYYKYVPDPVLENDHATLYWDRSIITDRTIIANKPDIVVIDRLARRTMIIDVTIPHDENLVKAEKEKQIKYLDLAHEVVDMWNVDSAVIVPIVVTANGLMAKSFDEHLSKLALHGWLKGLIQKAVLLDTARIVRRFLSLEP

SEQ ID NO: 28743 - protein, 1200 aa, Hecatera dysodea
MMLTRAATLRARHPPPGSPLSSASPPPDIESQVSPTAAVASSSSDEYFSPPTSPTPVRWQGRGRPPRSLGSRGQPAPSRVPAAGGCVQRMRWTQSMNENVMRAYYGSTEGGTNLTAYRVRMLSLFQDLEPAVNVSAQRLSDQVRVIQRSHRLDDAALERLRSEVLNNLIISTQTQTAVQAPVRGANTPQANNDSDEVDDRVVTVSSQYNNRLRSALEDALREYRSTPTELRPRLPRLPMHKKNRALVCALDSLLQNTFVSSENLVDTHSILYCGAVAACRLANVKFPSGDEAIRPKPAAPAWQCRIERRIDEARALIGKLYCFREGNTRPRVMRFVRRAFAGTGISPHEYTSRITERIDFLKQKVCAWANRIRRYKRRVDRYSQNRMFQSDERWVYRTWERPEQSVTDVCRPDDIATTTFWRSIWSVPVRHTEGDWMRDVERVCEAIPQMEKITITPTDIATAVRPLPNWKSPGPDGLHNFWLKWYSSSHAVLASQFQSSLESGSLPQFLTTGITHLLHKTGSPAEPKNYRPITCLSTVYKLLTSILRVKINEHIESNSIMSSSQNGCRKGSRGTKELLLIDMAISQQVRRSRKDLSTCWIDYKKAYDSVPHTWLMKVLELYKIDATLRTFLESCMRQWKTVLRYPGCRPIQGSDEPIWIKRGIFQGDSLSPLWFCLALNPLSTLLEDSGLGYRLRRGGQAISHLLYMDDLKLFAPNNLRLMELLKVTETFSSAIRMEFGVDKCAVMHVKKGEIMESEGIQLSDSIQVRSLSSTETYKYLGMSEALGINGADMKQSLKERFFGRLKKVLNSLLSGGNKVRAFNGWVMPVLMYSFGILKWTQTELDALDRRVRTLLTANRMHHPRSSVMRLYIPRKCGGRGFLNAKTLHNREMCSLREYFLETDVGMHRDVVAVDKGLTPLSMAKENWRKPVIHTTDDRKEVWKGKELHGRFYRALYGSDVDFSASVAWLRFGDLFGETEGFVCAIMDEVILTNNYRRHIMKDGTVDVCRACHRPGESIRHIISGCSRLANSEYLHRHNQVARIIHQQLALKYKLVDSEVPYYKYVPDPVLENGHVTLYWDRSIITDRTIVANKPDIVVIDRLARRTMIIDVSIPHDENLVKAEKEKQIKYLDLAHEVVDMWDVDSAVIVPIIVTANGLMAKSFDDHLSKLALRSWVKGLIQKAVLLDTARIVRRFLSLQP

SEQ ID NO: 28744 - protein, 1112 aa, Mythimna impura
MRWTQSMNENVMRAYYGSTEGGTNLTAYRVRMLSLFQVLEPTVNVTTQRLSDQVRVIQRNHRLDDAALDRLRSEVLSNRIISTPIQTQTAAPRATDAILPQSNHVDDEADDRVVTVSSQCNDRLRSALEDALREYRSTPIDLRPRLPRLPMHKKNRALVCALDSLLENVFESSVNLADTHSILYCGAIAACRLANVKLPSCDGATRPKSVAPAWQCRIEKRIDGARALIGKLYCFREGNTRPRVMRYVRRAFSGTGISPPEYLSRVTERIDFLKQQVCAWANRIRRYKRRVDRYSQNRMFQSDERWVYRAWERPEQNVTDVTRPDAVATNAFWRNIWSVPVCHTEDGWMREVERVCEAIPEMEKVVISPTDVARAVRPLPNWKSPGPDGLQNFWLKWYSSSHALLASQFQSSLESGSLPQFLTTGVTHLLHKTGSTAEPKNYRPITCLSTVYKLLTSILRTKINQHIDNNSIMSASQNGCRNGSRGTKELLLIDMTISQQVRRSRKDLSTCWIDYKKAYDSVPHTWLMRVLELYKIDATLRTFLESCMGQWNTVLRYPGCRSIRRDDEPIWIKRGIFQGDSLSPLWFCLALNPLSTLLEESGLGYRLRRDGQVLSHLLYMDDLKLIAPNKLRLMELLKVTETFSSAIRMEFGVDKCAVMHVKRGEIMESEGIQLSDSIHLRSFSSTETYKYLGMSEALGINVADMKQSLKERFFGRLKKVLNSLLSGGNKVRAFNGWVMPVLMYSFGILKWTQTELDALDRRVRTLLTANRMHHPRSSVMRLYIPRKCGGRGFLNTKTLHNREVCSLREYFHKTDVGMHRDVVAVDKGLTPLSMAKENWRKPVVLTTDDRKEVWKSKELHGRFYRALHESDVDFAASVAWLRFSNLFGETEGFICAIMDEVILTNNYRRYIMKDGTVDVCRACHRPGESIRHIISGCSRLANGEYLHRHNQVARIIHQQLALKYNLVYSEVPYYRYVPDPVLENDHVTLYWDRSIITDRTIVANKPDIVVIDRLARRAMIVDVTIPHDENLVKAEKEKQIKYLDLAHEVVDMWNVDSAVIVPIVVTANGLIAKSFDDHLSKLSLRGWIKGLIQKAVLLDTARIVRRFLSLEP

SEQ ID NO: 28745 - protein, 868 aa, Mythimna impura
MRYVRRAFSGTGISPREYLSRVTERIDFLKQKVCAWANRIRRYKRRVDRYSQNRMFQSDERWVYRAWERPEQNVTDVTRPDAVATNTFWRNIWSVPVCHTEDGWMREVERVCEAIPEMEKVVISPTDVATAVRPLPNWKSPGPDGLQNFWLKWYSSSHALLASQFQSSLESGSLPQFLTTGVTHLLHKTGSTAEPKNYRPITCLSTVYKLLTSILRTKINKHNETNSIMSASQNGCRNGSRGTKELLLIDMAISQQVRRSRKDLSTCWIDYKKAYDSVPHTWLMRVLELYKIDATLRTFLESCMGQWNTVLRYPGCRSIRRDDEPIWIKRGIFQGDSLSPLWFCLALNPLSTLLEESGLGYRLRRGGQVLSHLLYMDDLKLIAPNKLRLMELLKVTETFSSAIRMEFGVDKCAVMHVKRGEIMESEGIQLSDSIYLKSLSSTETYKYLGMSEALGINVADMKQSLKERFFDRLKKVLNSLLSGGNKVRAFNGWVMPVLMYSFGILKWTQTELDALDRRVRTLLTANRMHHPRSSVMRLYIPRKCGGRGFLNAKTLHNREVCSLREYFHKTDVGMHRDVVAVDKGLTPLSMAKENWRKPVVLTTDDRREVWKSKELHGRFYRALHESDVDFAASVAWLRFSNLFGETEGFICAIMDEVILTNNYRRYIMKDGTVDVCRACHRPGESIRHIISGCSRLANGEYLHRHNQVARIIHQQLALKYNLVYSEVPYYSYVPDPVLENDHVTLYWDRSIITDRTIVANKPDIVVIDRLARRVMIVDVTIPHDENLVKAEKEKQIKYLDLAHEVVDMWNVDSAIIVPIVVTANGLMAKSLDDHLSKLSLRGWIKGLIQKAVLLDTARIVRRFLSLQP

SEQ ID NO: 28746 - protein, 868 aa, Mythimna impura
MRYVRRAFSGTGISPREYLSRVTERIDFLKQKVCAWANRIRRYKRRVDRYSQNRMFQSDERWVYRAWERPEQNVTDVTRPDAVATNTFWRNIWSVPVCHTEDGWMREVERVCEAIPEMEKVVISPTDVATAVRPLPNWKSPGPDGLQNFWLKWYSSSHALLASQFQSSLESGSLPQFLTTGVTHLLHKTGSTAEPKNYRPITCLSTVYKLLTSILRTKINKHIETNSIMSASQNGCRNGSRGTKELLLIDMAISQQVRRSRKDLSTCWIDYKKAYDSVPHTWLMRVLELYKIDATLRTFLESCMGQWNTVLRYPGCRSIRRDDEPIWIKRGIFQGDSLSPLWFCLALNPLSTLLEESGLGYRLRRGGQVLSHLLYMDDLKLIAPNKLRLMELLKVTETFSSAIRMEFGVDKCAVMHVKRGEIMESEGIQLSDSIYLKSLSSTETYKYLGMSEALGINVADMKQSLKERFFDRLKKVLNSLLSGGNKVRAFNGWVMPVLMYSFGILKWTQTELDALDRRVRTLLTANRMHHPRSSVTRLYIPRKCGGRGFLNAKTLHNREVCSLREYFHKTDVGMHRDVVAVDKGLTPLSMAKENWRKPVVLATDDRREVWKSKELHGRFYRALHESDVDFAASVAWLRFSNLFGETEGFICAIMDEVILTNNYRRYIMKDGTVDVCRACHRPGESIRHIISGCSRLANGEYLHRHNQVARIIHQQLALKYNLVYSEVPYYSYVPDPVLENDHVTLYWDRSIITDRTIVANKPDIVVIDRLARRVMIVDVTIPHDENLVKAEKEKQIKYLDLAHEVVDMWNVDSAIIVPIVVTANGLMAKSLDDHLSKLSLRGWIKGLIQKAVLLDTARIVRRFLSLQP

SEQ ID NO: 28747 - protein, 1199 aa, Phlogophora meticulosa
MLTRAAKRRARPPSPDSPLSSASPPPDLGSPVTPTVAAASSSSDEYFSPPTSPTPVRRQGRGRPPKSLGSRGQPAPSQVPATGGCVQRMRWTQSMNENVMRAYYGSTEGGTNLTAYRARMLSLFQVLEPTVNVSAQRLSDQVRVIQRNHRLDDTALDRLRSEVLNNHIVLTSTQTAVQAPIINATPSPSNHVSEEADDRVVTVSSQCNEKLRSALEDALREYRSTPTELRPRLPRLPMHKKNRALVCALDSLLKDLFESSGDLVDTHSILYCAAVAACRLANVKFPNNDVAIRPKPAVPAWQSRIERRIDGARVLIGKLYCFREGNTRPRVMRFVRRAFAGTGISPREYMSRIVERIDFLKQKVCAWANRIRRYKRRVDRYSQNRMFQSDERWVYRAWERPEQDVADVHRPDDTTTNAFWRNIWSVPVCHTEAHWMRDVERVCETITEMEKIIITPLDVTTAVRPLPNWKAPGPDGLHNFWLKWLGSSHTRLASQFQSCLESGSLPQFLTTGITHLLYKSGSTTEPKNYRPITCLSTVYKLLTSILRAKIAQHIVGNSIMSASQNGCRNGSRGTKELLLIDMAISQQVRRSHKDLSTCWIDYKKAYDSVPHAWLMRVLELYKIDATLRTFLESCMGQWRTVLRYPGCRQIQGNDEPIWIKRGIFQGDSLSPLWFCLALNPLSTLLEDSGLGYRLRRGGQVISHLLYMDVLKLFAPNNLQLMELLKITESFSSTIRMEFGVDKCAVMHVKRGEIVESEGIQLSDSIQLRSLSSSDNYKYLGMSEALGINVTDMKQSLKERFFGRLKKVLNSLLSGGNKVRAFNGWVMPVLMYSFGILKWTQTELDALDRRVRTLLTANRMHHPRSSVMRLYIPRKCGGRGFLNAKTLYNREVYNLRDYFLKTEVGMHRDVVAVDKGLTPLSMAKENWRKPVVLTTDDRKQVWQSKELHGRFYRALHGPDVDFIASVSWLRFGDLFGETEGFVCAIMDEVILTNNYRKHIMKDGTVDMCRACHRPGESIRHIISGCSRLANGEYLHRHNQVARIIHQQLALRYKLVESEVPYYKYVPDPVLEDDHVTLYWDRSIITDRTIVANKPDIVVIDRLARRAMIVDVTIPHDENLVKAEKEKQIKYLDLAHEVVDMWNVDSAVIVPIVVTANGLLAKSLDDHLSRLSLHGWIKGLIQKAVLLDTARIVRRFLSLQP

SEQ ID NO: 28748 - protein, 1111 aa, Cosmia trapezina
MRWTQSMNENVMRAYYGSTEGGTNLTAYRVRMLSLFQELEPTVNVSAQRISDQVRVIQRNHRLDDAALDRLRSEVLSNHIISNPTQTAVQSSIIDALPPRSNHVVEEVDDRVATVSSQYNDRLRNALEDAFCEYRSTPTELRPRLPRLPMHKKNRALMCALDSLLKDFFESSENLVYTHSILYYAAVAACRLANVKFPNCDGATRPKPAVPAWQCRIERRIDGARVLIGKLYCFRQGNTRPRVMRFVRRAFSGTGISPPEYMSRVTERIDFLKQKVCAWASRIRRYKRRVDRYTQNRMFQSDERWVYRAWERPEQNVTDVCRPDDAATSAFWRSIWSVPVCHAEAGWMKDVERVCEAIPEMEPVLITPLDVARAVRPLPNWKSPGPDGLHNFWLKWLISSHTRLASQFQSSLESGSLPQFLTTGVTHLLHKSGSPAEPKNYRPITCLSTIYKLLTSILRAKINMHIDSNSIMSTSQNGCRNGSRGTKELLLIDMAISQQVRRSRKDLSTCWIDYKKAYDSVSHAWLMRVLELYKIDATLRTFLESCMGQWRTVLRYPGCRRIQGNDEPVRIKRGIFQGDSLSPLWFCLALNPLSTLLEDSGLGYRLRRGGQVISHLLYMDDLKLFAPNKLRLMELLKVTETFSSAIRMEFGVDKCAVMHVKRGEIMESEGIQLSDSIHLRSLSSSETYKYLGMSEALGINVADMKQSLRERFFGRLTKVLISLLSGGNKVRAFNGWVMPVLMYSFGILKWTQTELDALDRRVRTLLTANRMHHPRSSVMRLYIPRKCGGRGFLNAKTLHNREVCSLREYFLKSDVGMHRDVVAVDKGLTPLSMAKENWRKPVVLTTDDRKKVWQSKELHGRFYRALHEPDVDFLASVSWLRFGDLFGETEGFVCAIMDEVILTNNYRRYIMKDGTVDVCRACHRPGESIRHIISGCSRLANGEYLHRHNQVARIIHQQLALKYKLVDSEVPYYKYVPDPVLENDHVTLYWDRSIITDRTIVANKPDIVVIDRLARRAMIVDVTIPHDGNLVKAEKEKQIKYLDLAHEVVDMWNVDSAVIVPIVVTANGLIADSLDQHLSRLSLGGWIKGQIQKAVLLDTARIVRRFLSLQP

SEQ ID NO: 28749 - protein, 962 aa, Cosmia trapezina
MHKKNRALMCALDSLLKDFFESSENLVDTHSILYCAAVAACRLANVKFPNCDGATRPKPAVPAWQCRIERRIDGARVLIGKLYCFRQGNTRPRVMRFVRRAFSGTGISPPEYMSRVTERIDFLKQKVCAWASRIRRYKRRVDRYTQNRMFQSDERWVYRAWERPEQNVTDVCRPDDATTSAFWRSIWSVPVCHAEAGWMKDVERVCEAIPEMEPVLITPLDVARAVRPLPNWKSPGPDGLHNFWLKWLISSHTRLASQFQSSLESGSLPQFLTTGVTHLLHKSGSPAEPKNYRPITCLSTIYKLLTSILRAKINMHIDSNSIMSTSQNGCRNGSRGTKELLLIDMAISQQVRRSRKDLSTCWIDYKKAYDSVSHAWLMRVLELYKIDATLRTFLESCMGQWRTVLRYPGCRRIQGNDEPVRIKRGIFQGDSLSPLWFCLALNPLSTLLEDSGLGYRLRRGGQVISHLLYMDDLKLFAPNKLRLMELLKVTETFSSAIRMEFGVDKCAVMHVKRGEIMESEGIQLSDSIHLRSLSSSETYKYLGMSEALGINVADMKQSLRERFFGRLTKVLISLLSGGNKVRAFNGWVMPVLMYSFGILKWTQTELDALDRRVRTLLTANRMHHPRSSVMRLYIPRKCGGRGFLNAKTLHNREVCSLREYFLKSDVGMHRDVVAVDKGLTPLSMAKENWRKPVVLTTDDRKKVWQSKELHGRFYRALHEPDVDFLASVSWLRFGDLFGETEGFVCAIMDEVILTNNYRRYIMKDGTVDVCRACHRPGESIRHIISGCSRLANGEYLHRHNQVARIIHQQLALKYKLVDSEVPYYKYVPDPVLENDHVTLYWDRSIITDRTIVANKPDIVVIDRLARRAMIVDVTIPHDGNLVKAEKEKQIKYLDLAHEVVDMWNVDSAVIVPIVVTANGLIADSLDQHLSRLSLGGWIKGQIQKAVLLDTARIVRRFLSLQP

SEQ ID NO: 28750 - protein, 1199 aa, Mamestra brassicae
MITRAAARRAHPPPPGSSLSSASPTPDIGSQVSPVVAVASSSSDEYFSPPTSPTPVRRQGRGRPPRSLGSRGQPAPSRVPAAGGCVQRMRWTQSMNENVMRAYYGSTEGGTNLTAYRVRMLSLFQDLEPTVNVSAQRLSDQVRVIQHNCRLDDAALERLRSEVLSNLIISTPTQTVVQAPASGAITPRPNNGSDEVDDRVVTVSSQCNDRLRSALEDALREYRLTPTELRPRLPRLPMHKKNRALVCALDSLLQNIFESSESLVDTHSILFCGAVAACRIANVKFPSCDEAIRPKPAAPAWQCRIERRIDEARALIGKLYCFREGNTRPRVMRFVRRAFSGTGISPREYTFRVTERIDFLKQKVCAWANRIRRYKRRVDRYSQNRMFQSDERWVYRAWERPEQSVTDVYRPDDVATSTFWRSIWSVPICHAEGGWMRDVERVCEAIPQMEKITITTLDIAKAVRPLPNWKSPGPDGLHNFWLKWYSSSHALLASQFQSSLESGSLPQFLTTGITHLLHKTGSPAEPKNYRPITCLSTVYKLLTSILRAKINEHIESNSIMSASQNGCRKGSRGTKELLLIDMAISQQVRRSRKDLSTCWINYKKAYDSVPHTWLMKVLELYKIDATLSTFLESCMRQWKTVLRYPGCQPIQGSDEPVWIKRGIFQGDSLSPLWFCLALNPLSTLLEDSGLGYRLRRGGQAISHLLYMDDLKLFAPNNLRLMELLKVTETFSSAIRMEFGVDKCAVMHVKKGEIMESEGIQLSDSIQVRSLSSTESYKYLGMSEALGINGTDMKQSLRERFFGRLKKVLNSLLSGGNKVRAFNGWVMPVLMYTFGILKWTQTELDALDRRVRTLLTANRMHHPRSSVMRLYIPRKCGGRGFLNAKTLHNRDMCSLREYFLKADVGMHRDVVAVDKGLTPLSMAKENWRKPVILTTDDRKEVWKGKELHGRFYRALYGSDVDFSASVAWLCFGDLFGETEGFVCAIMDEVILTNNYRKHIMKDGTVDVCRACHRPGESIRHIISGCSRLANGEYLHRHNQVARIIQQQLALKYELVDSEVPYYKYVPDPVLENDHVTLYWDRSIITDRTIVANKPDIVVIDRLARRTMIIDVTIPHDENLVKAEKEKQIKYLDLAHEVVDMWNVDSAVIVPIVITANGLMAKSFDDHLSKLALRGWIKGLIQKAVLLDTARIVRRFLSLEP

SEQ ID NO: 28751 - protein, 1167 aa, Mamestra brassicae
MLTRAALQRARPPPPDPSLSSASPPPDIGSPLSPAVAVASSSSDEYFSPPTSPTPVRRQGRGRPPRGLGPRGQPAPSRVPATGGCVQRMRWTQSMNENVMRAYYGSTEGETNLTAYRVRMLSLFQDLEPTVNVSAQRLSDQVRVIQRNHRLDDAALDRLRSEVLNNLIISTPTQTAVLQAPVNGRITPRPNNVSDEVDDRVVTVSSQCNDRLRSALEDALREYRSTPTELRPRLPRLPMHKKNRALVCALDSLLQNIFESSETLVDTHSILYCGAVAARRIANVKFPGYDEAIRPKPAAPAWQRRIERRIDETRALIGKLYCFREVCAWASRIRRYKRRVDRYSQNRMFQSYERWVYRAWERPEQSVTDVCRPDDVATSIFWRSIWSVPICHAEGGWMRDVERVCEAIPQMEKNTITTLDVSKAVRPLPNWKSPGPDGLHNFWLKWYSSSHALLASQFQSSLDSGSLPQFLITGVTHLLYKTGSPTEPKNYRPITCLSTVYKLLTSILRAKINEHIESNSIMSASQNGCRKGSRGTKELLLIDVAISQQVRRSRKDLSTCWIDYKKAYDSVPHTWLMKVLELYKIDATLRTFLESCMRQWKTVLRYPGCRPIQGSDEPVGIKRGIFQGDSLSPLWFCLALNPLSTLLEDSGLGYRLRRGGQAISHLLYMDDLKLFTPNNLRLMELLKVTETFSSAIRMEFGVDKCAVMHVKKGEIMESEGIHLSDSIQVRSLSSTETYKYLGMLEALGINGTDMKQSLRERFFGRLKKVLNSLLSGGNKVRAFNGWVMPVLMYTFGILKWTQTKLDALDRRVRTLLTANRMHHPRSSVMRLYIPRKCGGRGFLNAKTLHNREMCSLREYFLKADVGMHRDVVAVDKGLTPLSMAKENWRTPVILTTDDRKEVWKGKELHGRFYRALHGSDVDFSASVAWLRFGDLFGETEGFVCAIMDEVILTNNYRRHIMKDGTVDMCRACHLPGESIRHIISGCSRLANGEYLHRHNQVARIIYQQLALKYNLVDSEVPYYKYVPDPVLENDHVTLYWDRSIITDRTIVANKPDIVVIDRLARRTMIIDVTIPHDENLVKAEKEKQIKYLDLAHEVVDMWNVESAVIVLIVVTANGLMAKSFDDHLSKLALRSWVKGLIQKAVLLDTARIVRRFLSLESYRTSRN

SEQ ID NO: 28752 - protein, 1199 aa, Mamestra brassicae
MLTRAALQRARPPPPDPSLSSASPPPDIGSPLSPAVAVASSSSDEYFSPPTSPTPVRRQGRGRPPRGLGPRGQPAPSRVPATGGCVQRMRWTQSMNENVMRAYYGSTEGGTNLTAYRVRMLSLFQDLEPTVNVSAQRLSDQVRVIQRNHRLDDAALDRLRSEVLNNLIISTPTQTAVQAPVNGSITPRPNNVSDEVDDRVVTVSSQCNDRLRSALEDALREYRSTPTELRPRLPRLPMHKKNRALVCALDSLLQNIFESSESLVDTHSILYCGAVAACRIANVKFPGCDEAIRPKPAAPAWQRRIERRIDETRALIGKLYCFREGNTRPRVMRFVRRAFSGTEISPRDFTSRVTERIDFLKQKVCAWASRIRRYKRRVDRYSQNRMFQSDERWVYRAWERPEQSVTDVCRPDDVATSIFWRSIWSVPICHAEGGWMRDVERVCEAIPQMEKITITTLDVAKAVRPLPNWKSPGPDGLHNFWLKWYSSSHALLASQFQSSLDSGSLPQFLTTGVTHLLHKTGSPTEPKNYRPITCLSTVYKLLTSILRAKINEHIESNSIMSASQNGCRKGSRGTKELLLIDMTISQQVRRSRKDLSTCWIDYKKAYDSVPHTWLMKVLELYKIDATLRTFLESCMRQWKTVLRYPGCRPIQGSDEPVWIKRGIFQGDSLSPLWFCLALNPLSTLLEDSGLGYRLRRGGQAISHLLYMDDLKLFAPNNLRLMELLKVTETFSSAIRMEFGVDKCAVMHVKKGEIMEFEGIHLSDSIQVRSLSSTETYKYLGMLEALGINGTDMKQSLRERFFGRLKKVLNSLLSGGNKVRAFNGWVMPVLMYTFGILKWTQTELDALDRRVRTLLTANRMHHPRSSVMRLYIPRKCGGRGFLNAKTLHNREMCSLREYFLKADVGMHRDVVAVDKGLTPLSMAKENWRTPVILTTDDRKEVWKGKELHGRFYRALHGSDVDFSASVAWLRFGDLFGETEGFVCAIMDEVILTNNYRRHIMKDGTVDMCRACHRPGESIRHIISGCSRLANGEYLHRHNQVARIIHQQLALKYNLVDSEVPYYKYVPDPVLENDHVTLYWDRSIITDRTIVANKPDIVVIDRLARRTMIIDVTIPHDENLVKAEKEKQIKYLDLAHEVVDMWNVDSAVIVPIVVTANGLMAKSFDDHLSKLALRSWVKGLIQKAVLLDTARIVRRFLSLEP

SEQ ID NO: 28753 - protein, 1199 aa, Mamestra brassicae
MITRAAARRAHPPPPGSSLSSASPTPDIGSQVSPVVAVASSSSDEYFSPPTSPTPVRRQGRGRPPRSLGSRGQPAPSRVPAAGGCVQRMRWTQSMNENVMRAYYGSTEGGTNLTAYRVRMLSLFQDLEPTVNVSAQRLSDQVRVIQHNCRLDDAALERLRSEVLSNLIISTPTQTVVQAPASGAITPRPNNGSDEVDDRVVTVSSQCNDRLRSALEDALREYRLTPTELRPRLPRLPMHKKNRVLVCALDSLLQNIFESSESLVDTHSILFCGAVAACRIANVKFPSCDEAIRPKPASPAWQCRIERRIDEARALIGKLYCFREGNTRPRVMRFVRRAFSGTGISPREYTFRVTERIDFLKQKVCAWANRIRRYKRRVDRYSQNRMFQSDERWVYRAWERPEQSVTDVYRPDDVATSTFWRSIWSVPICHAEGGWMRDVERVCEAIPQMEKITITTLDIAKAVRPLPNWKSPGPDGLHNFWLKWYSSSHALLASQFQSSLESGSLPQFLTTGITHLLHKTGSPAEPKNYRPITCLSTVYKLLTSILRAKINEHIESNSIMSASQNGCRKGSRGTKELLLIDMAISQQVRRSRKDLSTCWIDYKKAYDSVPHTWLMKVLELYKIDATLRTFLESCMRQWKTVLRYPGCQPIQGSDEPVWIKRGIFQGDSLSPLWFCLALNPLSTLLEDSGLGYRLRRGGQAISHLLYMDDLKLFAPNNLRLMELLKVTETFSSAIRMEFGVDKCAVMHVKKGEIMESEGIQLSDSIQVRSLSSTESYKYLGMSEALGINGTDMKQSLRERFFGRLKKVLNSLLSGGNKVRAFNGWVMPVLMYTFGILKWTQTELDALDRRVRTLLTANRMHHPRSSVMRLYIPRKCGGRGFLNAKTLHNREMCSLREYFLKADVGMHRDVVAVDKGLTPLSMAKENWRKPVILTTDDRKEVWKGKELHGRFYRALYGSDVDFSASVAWLRFGDLFGETEGFVCAIMDEVILTNNYRKHIMKDGTVDVFRACHRPGESIRHIISGCSRLANGEYLHRHNQVARIIHQQLALKYKLVDSEVPYYKYVPDPVLENDHVTLYWDRSIITDRTIVANKPDIVVIDRLARRTMIIDVTIPHDENLVKAEKEKQIKYLDLAHEVVDMWNVDSAVIVPIVITANGLMAKSFDDHLSKLALRGWIKGLIQKAVLLDTARIVRRFLSLEP

SEQ ID NO: 28754 - protein, 1199 aa, Mamestra brassicae
MITRAAARRAHPPPPGSSLSSASPTPDIGSQVSPVVAVASSSSDEYFSPPTSPTPVRRQGRGRPPRSLGSRGQPALRRVPAAGGCVQRMRWTQSMNENVMRAYYGSTEGGTNLTAYRVRMLSLFQDLEPTVNVSAQRLSDQVRVIQHNCRLDDAALERLRSEVLSNLIISTPTQTVVQAPASGAITPRPNNGSDEVDDRVVTVSSQCNDRLRSALEDALREYRLTPTELRPRLPRLPMHKKNRALVCALDSLLQNIFESSESLVDTHSILFCGAVAACRIANVKFPSCDEAIRPKPAAPAWQCRIERRIDEARALIGKLYCFREGNTRPRVMRFVRRAFSGTGISSREYTFRVTERIDFLKQKVCAWANRIRRYKRRVDRYLQNRMFQSDERWVYRAWERPEQSVTDVYRPDDVATSTFWRSIWSVPICHAEGGWMRDVERVCEAIPQMEKITITTLDIAKAVRPLPNWKSPGPDGLHNFWLKWYSSSHALLASQFQSSLESGSLPQFLTTGITHLLHKTGSPAEPKNYRPITCLSTVYKLLTSILRAKINEHIESNSIMSASQNGCRKGSRGTKELLLIDMAISQQVRRSRKDLSTCWIDYKKAYDSVPHTWLMKVLELYKIDATLRTFLESCMRQWKTVLRYPGCQPIQGSDEPVWIKRGIFQGDSLSPLWFCLALNPLSTLLEDSGLGYRLRRGGQAISHLLYMDDLKLFAPNNLRLMELLKVTETFSSAIRMEFGVDKCAVMHVKKGEIMESEGIQLSDSIQVRSLSSTESYKYLGMSEALGINGTDMKQSLRERFFGRLKKVLNSLLSGGNKVRAFNGWVMPVLMYTFGILKWTQTELDALDRRVRTLLTANRMHHPRSSVMRLYIPRKCGGRGFLNAKTLHNREMCSLREYFLKADVGMHRDVVAVDKGLTPLSMAKENWRKPVILTTDDRKEVWKGKELHGRFYRALYGSDVDFSASVAWLRFGDLFGETEGFVCAIMDEVILTNNYRKHIMKDGTVDVCRACHRPGESIRHIISGCSRLAKGEYLHRHNQVARIIHQQLALKYKLVDFEVPYYKYVPDPVLENDHVTLYWDRSIITDRTIVANKPDIVVIDRLARRTMIIDVTIPHDENLVKAEKEKQIKYLDLAHEVVDMWNVDSAVIVPIVITANGLMAKSFDDHLSKLALRGWIKGLIQKAVLLDTARIVRRFLSLEP

SEQ ID NO: 28755 - protein, 1202 aa, Noctua fimbriata
MITRAASRRARLPPPDQSLSSASPPPESSPIVSAVTPAVAVASSSSDEYFSPPTSPTPVRRQGRGRPPRSLGLRGHPAPSRVPAAGGCVQRMRWTHSINENVMRAYYGSTEGGTNLTAYRVGMLSLFQVLEPTINVSAQRLSDQVRVIQRNHMLDDAVLDRLRSEVLSNRIVLTPAQTAVQASVIDATPPRFNPAVVEEDDRVAVVSSQCNDRLRSALEDALREYRSTPTELRPRLPRLPMHNKNRALVCALDSQLKNLFESSENLVDTHSILYCGAVAACRLANVKFPNCDVATRPKPAVPAWQRRIECRIDGARVLIGKLHCFREGNTRPRVMRFVRRAFSGTGISPQEYMSRVTERIDFLKQKVYAWANRIRRYKRRVDRYSQNRMFQSDERWVYRAWERPDQNMTDMCRPDDAATSSFWRSIWSVPVCHTEADWMRDVEQVCEPIPEMEPILITPLDVARAVRPLPNWKSPGPDGLHNFWLKWLSSSHTCLASQFQSSLESGSLPQFLTTGVTHLLHKSGSPAEPKNYRPITCLSTVYKLLTSILRAKINTHIDKNSIMSASQNGCRNGSRGTKELLLIDMAISQQVRRSRKDLSTCWIDYKKAYDSVPHTWLMRVLELYKIDATLRAFLESCMGQWRTVLRYPGCRQIQGNDEPVWIKRGIFQGDSLSPLWFCLALNPLSTLLEDSGLGYRLRRGGQVISHLLYMDDLKLFAPNKLQLMELLKVTETFSSAIRMEFGVDKCAVMYVKQGEIMESEGIQLSDSIHLRTLSSTESYKYLGMSEALGINVTDMKQSLKERFFGRLNKVLHSLLSGGNKVRAFNGWVMPVLMYSFGVLKWTQTELDALDRRVRTLLTANRMHHPRSSVMRLYIPRKCGGRGFLNAKSLHNREMCSLREYFFKVEVGMHRDVVAVDKGLTPLSMAKENWRKPEVLTTDDRKEVWQGKELHGRFYRALHGPDVDFLASVSWLRFGDLFGETEGFVCAIIDEVMLTNNYRKYIMKDGTVDVCRACHRPGESIRHIISGCSRLANGEYLHRHNQVARIIHQQLALKYKLVESEVPYYKYVPDPVLEKDHVTLYWDQSIITDRTIVANKPDIVVIDRSARRVMIVDVTIPHDENLVKAEKEKQIKYLDLAHEVVDMWNVNSAIIVPIVVTANGLIAKSLDDHLSKLSLGGWIKGLIQKAVLLDTARIVRRFLSLEP

SEQ ID NO: 28756 - protein, 962 aa, Noctua fimbriata
MHNKNRALVCALDSQLENIFESSENLVDTHSILYCGAVAACRLANIKFPNCDVATRPKPAVPAWQRRIERRIDGARVLIGKLHCFREGNTRPRVMRFVRRAFSGTGISPQEYMSRVTERIDFLKQKVYAWANRIRRYKRRVDRYSQNRMFQSDERWVYRAWERPEQNMTDVCRPDDAATSSFWRSIWSVPVCHTEADWMCDVERVCEPIPEMEPILITPLDVARAVRPLPNWKSPGPDGLHNFWLKWLSSSHTCLASQFQSSLESGSLPQFLTTGVTHLLHKSGSPAEPKNYRPITCLSTVYKLLTSILRAKINTHIDKNSIMSASQNGCRNGSRGTKELLLIDMAISQQVRRSRKDLSTCWIDYKKAYDSVPHTWLMRVLELYKIDATLRAFLESCMGQWRTVLRYPGCRQIQGNDEPVWIKRGIFQGDSLSPLWFCLALNPLSTLLEDSGLGYRLRRGGQVISHLLYMDDLKLFAPNKLRLMELLKVTKTFSSAIRMEFGVDKCAVMYVKQGEIMESEGIQLSDSIHLRTLSSTESYKYLGMSEALGINVTDMKQSLKERFFGRLNKVLHSLLSGGNKVRAFNGWVMPVLMYSFGVLKWTQTELDALDRRVRTLLTANRMHHPRSSVMRLYIPRKCGGRGFLNAKSLHNREMCSLREYFLKVEVGMHRDVVAVDKGLTPLSMAKENWRKPEVLTTDDRKEVWQGKELHGRFYRALHGPDVDFLASVSWLRFGDLFGETEGFVCAIMDEVMLTNNYRKYIMKDGTVDVCRACHRPGESIRHIISGCSRLANGEYLHRHNQVARIIHQQLALKYKLVESEVPYYKYVPDPVLEKDHVTLYWDQSIITDRTIVANKPDIVVIDRSARRVMIVDVTIPHDQNLVKAEKEKQIKYLDLAHEVVDMWNVNSAIIVPIVVTANGLIAKSLDDHLSKLSLGGWIKGLIQKAVLLDTARIVRRFLSLEP

SEQ ID NO: 28757 - protein, 1202 aa, Noctua fimbriata
MITRAAYRRARLPPPDPSLSSASPPPESSPIVSAVTPAVAVASSSSDEYFSPPTSPTPVRRQGRGRPPRSLGLRGHPAPSRVPAAGGCVQRMRWTHSINENVMRAYYGSTEGGTNLTAYRVGMLSLFQVLEPTVNVSAQRLSDQVRVIQRNHMLDDAVLDRLRSEVLSNRIVLTPAQTAVQASVIDATPPRFNPAVVEEDDRVAVVSSQCNDRLRSALEDALREYRPTPTELRPRLPRLPMHNKNRALVCALDSQLKNIFESSENLVDTHSILYCGAVAACRLANVKFPNCDVATRPKPAVPAWQRRIERRIDGARVLIGKLHCFREGNTRPRVMRFVRRAFSGTGISPQEYMSRVTERIDFLKQKVYAWANRIRRYKRRVDRYSQNRMFQSDERWVYRAWERSELNMADVCRPDDATTSSFWRSIWSVPVCHTEADWMRDVERVCEPIPEMEPILITPLDIARAVRPLPNWKSPGPDGLHNFWLKWLSSSHTCLASQFQSSLESGSLPQFLTTGVTHLLHKSGSPAEPKNYRPITCLSTVYKLLTSILRAKINTHIDKNSIMSASQNGCRNGSRATKELLLIDMAISQQVRRSRKDLSTCWIDYKKAYDSVPHTWLMRVLELYKIDATLRAFLESCMGQWRTVLRYPGCRQIQGNDEPVWIKRGIFQGDSLSPLWFCLALNPLSTLLEDSGLGYRLRRGGQVISHLLYMDDLKLFAPNKLQLMELLKVTETFSSAIRMEFGVDKCAVMYVKQGEIMESEGIQLSDSIHLRTLSSTESYKYLGMSEALGINVTDMKQSLKERFFGRLNKVLHSLLSGGNKVRAFNGWVMPVLMYSFGVLKWTQTELDALDGRVRTLLTANRMHHPRSSVMRLYIPRKCGGRGFLNAKSLHNREMCSLREYFLKVEVGMHRDVVAVDKGLTPLSMAKENWRKPEVLTTDDRKEVWQGKELHGRFYRALHGPDVDFLASVSWLRFGDLFGKTEGFVCAIMDEVMLTNNYRKYIMKDGTVDVCRACHRPGESIRHIISGCSRLANGEYLHRHNQVARIIHQQLALKYKFVESEVPYYKYVPDPVLEKDHVTPYWDQSIITDRTIVANKPDIVVIDRSARRVMIVDVTIPHDENLVKAEKEKQIKYLDLAHEVVDMWHMNSAVIVPIVVTANGLIAKSLDDHLSKLSLGGWIKGLIQKAVLLDTARIVRRFLSLEP

SEQ ID NO: 28758 - protein, 1202 aa, Noctua fimbriata
MITRAAYRRARLPPPDPSLSSASPPPESSPIVSAVTPAVAVASSSSDEYFSPPTSPTPVRRQGRGRPPRSLGLRGHPAPSRVPAAGGCVQRMRWTHSINENVMRAYYGSTEGGTNLTAYRVGMLSLFQVLEPTVNVSAQRLSDQVRVIQRNHMLDDAVLDRLRSEVLSNRIVLTPAQTAVQASVIDATPPRFNPAVVEEDNRVAVVSSQCNDRLRSALEDALREYRSTPTELRPRLPRLPMHNKNRALVCALDSQLENIFESSENLVDTHSILYCGAVAACRLANVKFPNCDVATRPKPAVPAWQRRIERRIDGARVLIGKLHCFREGNTRPRVMRFVRRAFSGTGISPQEYMSRVTERIDFLKQKVYAWANRIRRYKRRVDRYSQNRMFQSDERWVYRAWERPELIMTDVCRPDDAATSSFWRSIWSVPVCHTEADWMRDVERVCEPIPEMEPILITRLDIARAVRPLPNWKSPGPDGLHNFWLKWLSSSHTCLASQFQSSLESGSLPQFLTTGVTHLLHKSGSPAEPKNYRPITCLSTVYKLLTSILRAKINTHIDKNSIMSASQNGCKSGSRGTKELLLIDMAISQQVRRSRKDLSTCWIDYKKAYDSVPHTWLMRVLELYKIDATLRAFLESCMGQWRTVLRYPGCGQIQGNDEPVWIKRGIFQGDSLSPLWFCLALNPLSTLLEDSGLGYRLRRGGQVISHLLYMDDLKLFAPNKLQLMELLKVTETFSSAIRMEFGVDKCAVMYVKRGEIMESEGIQLSDSIHLRTLSSTESYKYLGMSEALGINVTDMKQSLKERFFGRLNKVLHSLLSGGNKVRAFNGWVMPVLMYSFGVLKWTQTELDALDRRVRTLLTANRMHHPRSSVMRLYIPRKCGGRGFLNAKSLHNREMCSLREYFLKVEVGMHRDVVAVDKGLTPLSMAKENWRKPEVLTTDDRKEVWQGKELHGRFYRALHGPDVDFLASVSWLRFSDLFGETEGFVCAIMDEVMLTNNYRKYIMKDGTVDVCRACHRPGESIRHIISGCSRLANGEYLHRHNQVARIIHQQLALKYKLVESEVPYYKYVPDPVLEKDHVTLYWDQSIITDRTIVANKPDIVVIDRSARRVMIVDVTIPHDENLVKAEKEKQIKYLDLAHEVVDMWNVNSAIIVPIVVTANGLIAKSLDDHLSKLSLGGWIKGLIQKAVLLDTARIVRRFLSLEP

SEQ ID NO: 28759 - protein, 1108 aa, Noctua fimbriata
MADNNNNNKRAYYGSTEGGTNLTAYRVGMLSLFQVLEPTVNVSAQRLSDQVRVIQRNHMLDDAVLDRLRSEVLSNRIVLTPAQTAVQASVIDATPPRFNPAVVEEDDRVAVVSSQCNDRLRSALEDALREYRSTPTELRPRLPRLPMHNKNRALVCALDSQLKNLFESSENLVDTHSILYCGAVAACRLANVKFPNCDVATRPKPAVPAWQRRIECRIDGARVLIGKLHCFREGNTRPRVMRFVRRAFSGTGISPQEYMSRVTERIDFLKQKVYAWANRIRRYKRRVDRYSQNRMFQSDERWVYRAWERPDQNMTDVCRPDDAATSSFWRSIWSVPVCHTEADWMRDVEQVCEPIPEMEPILITPLDVARAVRPLPNWKSPGPDGLHNFWLKWLSSSHTCLASQFQSSLESGSLPQFLTRGVTHLLHKSGSPAEPKNYRPITCLSTVYKLLTSILRAKINTHIDKNSIMSASQNGCRNGSRATKELLLIDMAISQQVRRSRKDLSTCWIDYKKAYDSVPHTWLMRVLELYKIDATLRAFLESCMGQWRTVLRYPGCRQIQGNDEPVWIKRGIFQGDSLSPLWFCLALNPLSTLLEDSGLGYRLRRGGQVISHLLYMDDLKLFAPNKLQLMELLKVTETFSSAIRMEFGVDKCAVMYVKQGEIMESEGIQLSDSIHLRTLSSTESYKYLGMSEALGINVTDMKQSLKERFFGRLNKVLHSLLSGGNKVRAFNGWVMPVLMYSFGVLKWTQTELDALDRRVRTLLTANRMHHPRSSVMRLYIPRKCGGRGFLNAKSLHNREMCSLREYFLKVEVGMHRDVVAVDKGLTPLSMAKENWRKPEVLTTDDRKEVWQGKELHGRFYRALHGPDVDFLASVSWLRFGDLFGETEGFVCAIMDEVMLTNNYRKYIMKDGTVDVCRACHRPGESIRHIISGCSRLANGEYLHRHNQVARIIHQQLALKYKLVESEVPYYKYVPDPVLEKDHVTLYWDQSIITDRTIVANKPDIVVIDRSARRVMIVDVTIPHDENLVKAEKEKQIKYLDLAHEVVDMWNVNSAIIVPIVVTANGLIAKSLDDHLSKLSLGGWIKGLIQKAVLLDTARIVRRFLSLEP

SEQ ID NO: 28760 - protein, 1202 aa, Noctua fimbriata
MITRAAYRRARLPPPDPSLSSASPPPESSPIVSAVTPAVAVASSSSDEYFSPPTSPTPVRRQGRGRPPRSLGLRGHPAPSRVPAAGGCVQRMRWTHSINENVMRAYYGSTEGGTNLTAYRVGMLSLFQVLEPTVNVSAQRLSDQVRVIQRNHMLDDAVLDRLRSEVLSNRIVLTPAQTAVQASVIDATPPRFNPAVVEEDDRVAVVSSQCNDRLRSALEDALREYRSTPTELRPRLPRLPMHNKNRALVCALDSQLENIFESSENLVDTHSILYCGAVAACRLANVKFPNCDVATRPKPAVPAWQRRIERRIDGARVLIGKLHCFREGNTRPRVMRFVRRAFSGTGISPQEYMSRVTERIDFLKQKVYAWANRIRRYKRRVDRYSQNRMFQSDERWVYRAWERPELNMTDVCRPDDAATSSFWRSIWSVPVCHTEADWMRDVERVCEPIPEMEPILITRLDIARAVRPLPNWKSPGPDGLHNFWLKWLSSSHTCLASQFQSSLESGSLPQFLTTGVTHLLHKSGSPAEPKNYRPITCLSTVYKLLTSILRAKINTHIDKNSTMSASQNGCRSGSRGTKELLLIDMAISQQVRRSRKDLSTCWIDYKKAYDSVPHTWLMRVLELYKIDATLRAFLESCMGQWRTVLRYPGCGQIQGNDEPVWIKRGIFQGDSLSPLWFCLALNPLSTLLEDSGLGYRLRRGGQVISHLLYMDDLKLFAPNKLQLLELLKVTETFSSAIRMEFGVDKCAVMYVKQGEIMESEGIQLSDSIHLRTLSSTESYKYLGMSEALGINVTNMKQSLKERFFGRLNKVLHSLLSGGNKVRAFNGWVMPVLMYSFGVLKWTQTELDALDRRVRTLLTANRMHHPRSSVMRLYIPRKCGGRGFLNAKSLHNREMCSLREYFLKVEVGMHRDVVAVDKGLTPLSMAKENWRKPEVLTTDDRKEVWQGKELHGRFYRALHGPDVDFLASVSWLRFGDLFGETEGFVCAIMDEVMLTNNYRKYIMKDGTVDVCRACHRPGESIRHIISGCSRLANGEYLHRHNQVARIIHQQLALKYKLVESEVPYYKYVPDPVLEKDHVTLYWDQSIITDRTIVANKPDIVVIDRSARRVMIVDVTIPHDENLVKAEKEKQIKYLDLVHEVVDMWNVNSAIIVPIVVTANGLIAKSLDDHLSKLSLGGWIKGLIQKAVLLDTARIVRRFLSLEP

SEQ ID NO: 28761 - protein, 1202 aa, Noctua fimbriata
MITRAAYRRARLPPPDPSLSSASPPPESSPIVSAVTPAVAVASSSSDEYFSPPTSPTPVRRQGRGRPPRSLGLRGHPAPSRVPAAGGCVQRMRWTHSINENVMRAYYGSTEGGTNLTAYRVGMLSLFQVLEPTVNVSAQRLSDQVRVIQRNHMLDDAVLDRLRSEVLSNRIVLTPAQTAVQASVIDATPPRFNPAVVEEDDRVAVVSSQCNDRLRSALEDALREYRSTPTELRPRLPRLPMHNKNRALVCALDSQLENIFESSENLVDTHSILYCGAVAACRLANVKFSNCDVATRPKPAVPAWQRRIERRIDGARVLIGKLHCFREGNTRPRVMRFVRRAFSGTGISPQEYMSRVTERIDFLKQKVYAWANRIRRYKRRVDRYSQNRMFQSDERWVYRAWERPELNMTDVCRPDDAATSSFWRSIWSVPVCHTEADWMRDVERVCEPIPEMEPILITPLDIARAVRPLPNWKSPGPDGLHNFWLKWLSSSHTCLASQFQSSLESGSLPQFLTTGVTHLLHKSGSPAEPKNYRPITCLSTVYKLLTSILRAKINTHIDKNSIMSASQNGCRNGSRGTKELLLIDMAISQQVRRSRKDLSTCWIDYKKAYDSVPHTWLMRVLELYKIDATLRAFLESCMGQWRTVLRYPGCRQIQGNDEPVWIKRGIFQGDSLSPLWFCLALNPLSTLLEDSGLGYRLRRGGQVISHLLYMDDLKLFAPNKLQLMELLKVTETFSSAIRMEFGVDKCAVMYVKRGEIMESEGIQLSDFIHLRSLSSSESYKYLGMSEALGINVTDMKQSLKERFFGRLNKVLHSLLSGGNKVRAFNGWVMPVLMYSFGVLKWTQTELDALDRRVRTLLTANRMHHPRSSVMRLYIPRKCGGRGFLNAKSLHNREMCSLREYFLKVEVGMHRDVVAVDKGLTPLSMAKENWRKPEVLTTDDRKEVWQGKELHGRFYRALHGPDVDFLASVSWLRFGDLFGETEGFVCAIMDEVMLTNNYRKYIMKDGTVDVCRACHRPGESIRHIISGCSRLANGEYLHRHNQVARIIHQQLALKYKLVESEVPYYKYVPDPVLEKNHVTLYWDQSIITDRTIVANKPDIVVIDQSARRVMIVDVTIPHDENLVKAEKEKQIKYLDLAHEVVDMWNVNSAIIVPIVVTANGLIAKSLDDHLSKLSLGGWIKGLIQKAVLLDTARIVRRFLSLEP

SEQ ID NO: 28762 - protein, 962 aa, Atethmia centrago
MHKKNRALVCALDSLLKDFFESSEDLVDTHSILYCAAVAACRLANVKFPNCDEATRPKPAVPAWQCRIERRIDGARVLISKLYCFREGNTRPRVMRFVRRAFSGTGISPREYLSRVTERIDFLKQKVCAWASRIRRYKRRVDRYTQNRMFQSDERWVYRAWERPEQNETDMCRPDDATTTAFWRSIWSEPVCHAEANWMRDVERVCETIPEMEVVVITPSDIARAVRPLPNWKSPGPDGLHNFWLKWLTSSHTCLASQFQSSLESGSLPQFLTTGITHLLHKSGSPAEPKNYRPITCLSTVYKLLTSILRAKINTHIDSNSIMSASQNGCRNGSRGTKELLLIDMAFSQQVRRSRKDLSTCWIDYKKAYDSVPHTWLMKVLELYKIDTTLRTFLESCMGQWRTVLRYPGCRRIQGNDEPVWIKRGIFQGDSLSPLWFCLALNPLSTLLEDSGLGYRLRRGGQVISHLLYMDDLKIFAPNKLRLMELLKVTETFSGAIRMEFGVDKCAVMHVKRGEIMESEGIQLSDSIHLRSLSSPESYKYLGMSEALGINVTDMKQLLKERFFGRLKKVLISLLSGGNKVRAFNGWVMPVLMYSFGILKWTQTELDALDRRVRTLLTANRMHHPRSSVMRLYIPRKCGGRGFLNAKTLHNREICSLREYFFKAEVGMHRDVVAVDKGLTPLSMAKENWCKPVVLTTDDRKEIWQNKELHGRFYRALHEPDVDFLASVSWLRFGDLFGETEGFVCAIMDEVILTNNYRRHIMKDGTVDVCRACHRPGESIRHIISGCSRLANGEYLHRHNQVARIIHQQLALKYKLVNSEVPYYKYVPDPVLENDHVTLYWDRSIITDRTIVANKPDIVVIDRLARRAMIVDVTIPHDDNLVKAEKEKQIKYLDLAHEVVDMWNVNSAVIVPIVVTANGLIAESLNHHLSRLSLGGWIKGLIQKAVLLDTARIVRRFLSLEP

SEQ ID NO: 28763 - protein, 1203 aa, Atethmia centrago
MLTRAASKRARPPPPDSSLSSASPPPVSSPTVSAVITPAAVVASSSSDEYFSPPTSPTPVRRQGRDRPPKSLGLRGHPAPSRVPAAGGCVQRMRWTQSMNENVMRAYYGSTEGGTNLTAYRVRMLSLFQELEPTVNVSAQRLSDQVRVIQRNRRLDDATLDRLRSEVLSNYIISTPAQTAVHTPIIDVIPPRSNHGVEEEDDRAATVSSQCNVRLRSALEDAFREYRSTPTELRPRLPRLPMHKKNRALMCALDSQLKVFFESSEDLVDTHSILYCAAVAACRLANVKFPNSDGATRPKPAVPAWQCRIERRIDKARVLIGKLYCFREGNTRPRVMRFVRRAFSGTGISPREYMSHITERIDFLKQKVCAWASRIRRYKRRVDRYTQNRMFQSDERWVYRAWERPKQNVTDVCRPDDATTTAFWRSIWSVPVCHVEADWMRDVERVCETIPEMEVVIITPSDIARAVRPLPNWKSPGPDGLHNFWLKWLTSSHTCLASQFQSSLESGSLPQFMTTGITHLLHKSGSPAEPKNYRPITCLSTVYKLLTSILRAKINTHIDSNSIMSASQNGCRNGSRGTKELLLIDMAISQQVRRSRKDLSTCWIDYKKAYDSVPHTWLMRVLELYKIDTTLRTFLESCMGQWRTVLRYPGCRQIQGNDEPVWIKRGIFQGDSLSPLWFCLALNPLSMQLEDSGLGYRLRRGGQIISHLLYMDDLKIFAPNKLQLMKLLKVTETFSSAIRMEFGVDKCAVMHVKRGEIMESEGIQLSDSIHLRSLSSPESYKYLGMSEALGINVTDMKQSLKERFFGRLKKVLISLLSGGNKVRAFNSWVMPVLTYSFGILKWTQTELDALDRRVRTQLTANRMHHPRSSVMRLYIPRKCGGRGFLNAKTLHNREICSLREYFLKTEVGMHRDVVAVDKGLTPLSMAKENWCKPVVLTTDDRKEIWQSKELHGRFYRALHEPDVDFLASVSWLRFGDVFGETEGFVCAIMDEVILTNNYRRHIMKDGTVDVCRACHRPGESIRHIISGCSRLANGEYLHRHNQVARIIHQQLALKYKFVNSEVPYYKYVPDPVLENDHVTLYWDRSIITDRTIVANKPDIVVIDRLARRAMIIDVTIPHDDNLVKAEKEKQIKYLDLAHEVVDMWNVNSAVIVPIVVTANGLMARSLNHHLSRLALDGWIKGLIQKAVLLDTARIVRRFLSLEP

SEQ ID NO: 28764 - protein, 914 aa, Atethmia centrago
MSSFQTLTELLDQNQPYQPGSAGLSVVLVLIGKLYCFREGNTRPRVMRFVRRAFSGTGISPREYMSHITERIDFLKQKVCAWASRIRRYKRRVDRYTQNRIFQSDERWVYRAWERPKQNVTDVCRPDDATTTAFWRSIWSVPVCHVEADWMRDVERVCETIPEMEVVIITPSDIARAVRPLPNWKSPGPDGLHNFWLKWLTSSHTCLASQFQSSLESGSLPQFMTTGITRLLHKSGSPAEPKNYRPITCLSTVYKLLTSILRAKINTHIDSISIMSASQNGCRNGSRGTKELLLIDMAISQQFRRSRKDLSTCWIDYKKAYDSVPHTWLMRVLELYKIDTTLRTFLESCMGQWRTVLRYPGCRQIQGNDEPVWIKRGIFQGDSLSPLWFCLALNPLSMQLEDSGLGYRLRRGGQIISHLLYMDDLKIFAPNKLQLMKLLKVTETFSSAIRMEFGVDKCAVMHVKRGEIMESEGIQLSDSIHRRSLSSPESYKYLGMSEALGINVTDMKQSLKECFFGRLKKVLISLLSGGNKVRAFNSWVMPVLTYSFGILKWTQTELDALDRRVRTLMTANRMHHPRSSVMRLYIPRKCGGRGFLNAKTLHNREICSLREYFLKTEVGMHRDVVAVDKGLTPLSMAKENWCKPVVLTTDDRKEIWQSKELHGRFYRALHEPDVDFLASVSWLRFGDLFGETEGFVCAIMDEVILTNNYRRHIMKDGTVDVCRACHRPGESIRHIISGCSRLANGEYLHRHNQVARIIHQQLALKYKLVNSEVPYYKYVPDPVLENDHVTLYWDRSIITDRTIVANKPDIVVIDRLARRAMIVDVTIPHDDNLVKAEKEKQIKYLDLAHEVVDMWNVNSAVIVPIVVTANGLMARSLNHHLSRLALDGWIKGLIQKAVLLDTARIVRRFLSLEP

SEQ ID NO: 28765 - protein, 1111 aa, Atethmia centrago
MRWTQSMNENVMRAYYGSTEGGTNLTAYRVRMLSLFQKLEPTVNVSAQRLSDQVRVIQRNHRLDDAALDRLRSEVLSNHIVSTPAQTATHAPIINAIPPRSNHDVEEEDDRVATVSSQCNVRLRSALEDAFREYRSTPTELRPRLPRLPMHKKNTALVCALDSLLKDFFESSEDLVDTHSILYCAAVAACRLANVKFPNCDGATRPKPAVPAWQCRIERRIDGARVLIGKLYCFREGNTRPRVMRFVRRAFSGTGISPREYMSRVTERIDFLKQKVCAWASRIRRYKRRVDRCTQNRMFQSDERWVYRSWERPEQNETDVCRPDDATTTAFWRSIWSVPVCYAEADWMRDVERVCETIPEMEVVIITPSDIARAVRPLPNWKSPGPDGLHNFWLKWLTSSHTCLASQFQSSLESGSLPQFLTTGITHLLHKSGSPAEPKNYRPITCLSTVYKLLTSILRAKINTHIDSNSIMSASQNGCRNGSRGTKELLLIDMAITQQVRRFRKDLSTCWIDYKKAYDSVPHTWLMRVLELYKIDTTLRTFLESCMGQWRTVLRYPGCRQIQGNDEPVWIKRGIFQGDSLSPLWFCLALNPLSTLLEDSDLGYRLRRGGQVISHLLYMDDLKIFAPNKLQLMELLKVTETFSSAIRMEFGVDKCAVMHVKRGEIMEPEGIQLSDSIHLRSLSSPESYKYLGMSEALGINVTDMKQSLKERFFGRLKKVLISPLSGGNKVRAFNGWVMPVLMYSFGILKWTQTELDALDRRVRTLLTANRMHHPRSSVMRLYIPRKCGGRGFLNAKTLHNREICSLREYFLKTEVGMHRDVVAVDKGLTPLSMAKENWCKPVILTTDDRKEIWQNKELHGRFYRALHEPDVDFLASVSWLRFGDLFGETEGFVCAIMDEVILTNNYRRHIMKDGTVDVCRACHRPGESIRHIISGCSRLANGEYLHRHNQVARIIHQQLALKYKLVNSEVPYYKYAPDPVLENDHVTLYWDRSIITDRTIVANKPDIVVIDRLARRAMIVDVTIPHDENLVKAEKEKQIKYLDLAHEVVDMWNVDSAVIVPIVVTANGLMAESLNHHLSRLSLGGWIKGLIQKAVLLDTARIVRRFLSLES

SEQ ID NO: 28766 - protein, 1202 aa, Atethmia centrago
MLTRSAARARPPPPDSSLSSASPPPVPSPTVSAVTTPAAVVASSSSDEYFSPPTSPTPVRRQGRGWPPKSLGLRGQLAPSRVPAAGGCVQRMRWTQSMNENVMRAYYGSTEGGINLTAYRVRMLSLFQELEPTVNVSAQRLSDQVRVIQRNHRLDDAALDRLRSEVLSNHIVSTPAQTATHAPIIDAIPPRSNHDVEEEDDRVATVSSQCNVRMRSALEDAFHEYRSTPTELRPRLPRLPMHKKNRALVCALDSLLKDFFESSEDLVDTHSILYCAAVAACRLANVKFPNCDEATRPKPAVPAWQCRIERRIDGARVLISKLYCFREGNTRPRVMRFVRRAFSGTGISPREYMSRVTERIDFLKQKVCAWASRIRRYKRRVDRYTQNRMFQSDERWVYRAWERPEQNETDMCRPDDATTTAFWRSIWSEPVCHAEADWMRDVERVCETIPEMEVVVITPSDIARAVRPLPNWKSPGPDGLHNFWLKWLTSSHTCLASQFQSSLESGSLPQFLTTGISHLLHKSGSPAEPKNYRPITCLSTVYKLLTSILRAKINTHIDSNSIMSVSQNGCRNGSRGTKELLLIDMAISQQVRRSRKDLSTCWIDYKKAYDSVPHTWLMKVLELYKIDTTLRTFLESCMGQWRTVLRYPGCRRIQGNDEPVWIKRGIFQGDSLSPLWFCLALNPLSTLLEDSGLGYRLRRGGQVISHLLYMDDLKIFAPNKLRLMELLKVTETFSGAIRMEFGVDKCAVMHVKRGEIMESEGIQLSDSIHLRSLSSPESYKYLGMSEALGINVTDMKQLLKERFFGRLKKVLISLLSGGNKVRAFNGWVMPVLMYSFGILKWTQTELDALDRRVRTLLTANRMHHPRSSVMRLYIPRKCGGRGFLNAKTLHNREICSLREYFLKAEVGMHRDVVAVDKGLTPLSMAKENWCKPVVLTTDDRKEIWQNKELHGRFYRALHEPDVDFLASVSWLRFGDLFGETEGFVCAIMDEVILTNNYRRHIMKDGTVDVCRACHRPGESIRHIISGCSRMANGEYLHRHNQVARIIDQQLALKYKLVNSEVPYYKYVPDPVLENDHVTLYWDRSIITDRTIVANKPDIVVIDRLARRAMIVDVTIPHDDSLVKAEKEKQIKYLDLAHEVVDMWNVNSAVIVPIVVTANGLMAESLNHHLSRLSLGGWIKGLIQKAVLLDTARIVRRFLSLEP

SEQ ID NO: 28767 - protein, 1203 aa, Atethmia centrago
MLTRAASKRARPPPPDSSLSSASPPPVSSPTVSAVITPAAVVASSSSDEYFSPPTSPTPVRRQGRDRPPKSLGLRGHPAPSRVPAAGGCVQRMRWTQSMNENVMRAYYGSTEGGTNLTAYRVRMLSLFQELEPTVNVSAQRLSDQVRVIQRNRRLDDATLDRLRSEVLSNYIISTPAQTAVHTPIIDVIPPRSNHGVEEEDDRNATVSSQCNVRLRSALEDAFREYRSTPTELRPRLPRLPMHKKNRALMCALDSQLKVFFESSEDLVDTHSILYCAAVAACRLANVKFSNSDGATRPKPAVPAWQCRIERRIDKARVLIGKLYYFREGNTRPRVMRFVRRAFSGTGISPREYMSHITERIDFLKQKVCAWASRIRRYKRRVDRYTQNRMFQSDERWVYRAWERPKQNVTDVCRPDDATTTAFWRSIWSVPVCHVEADWMRDVERVCETIPEMEVVIITPSDIARAVRPLPNWKSPGPDGLHNFWLKWLTSSHTCLASQFQSSLESGSLPQFMTTGITHLLHKSGSPAEPKNYRPITCLSTVYKLLTSILRAKINTHIDSNSIMSASQNGCRNGSRGTKELLLIDMAISQQVHRSRKDLSTCWIDYKKAYDSVPHTWLMRVLELYKIDTTLRTFLESCMGQWRTVLRYPGCRQIQGNDEPAWIKRGIFQGDSLSPLWFCLALNPLSMQLEDSGLGYRLRRGGQIISHLLYMDDLKIFAPNKLQLMKLLKVTETFSSAIRMEFGVDKCAVMHVKRGEIMESEGIQLSDSIHLRSLSSPESYKYLGMSETLGINVTDMKQSLKERFFGRLKKVLISLLSGGNKVRAFNSLVMPVLTYSFGILKWTQTELDALDRRVRTLVTANRMHHPRSSVMRLYIPRKCGGRGFLNAKTLHNREICSLREYFLKTEVGMHRDVVAVDKGLTPLSMAKENWCKPVVLTTDDRKEIWQSKELHGRFYRALHEPDVDFLASVSWLRFGDFFGETEGFVCAIMDEVILTNNYRRHIMKDGTVDVCRACHRPGESIRHIISGCSRLANGEYLHRHNQVARIIHQQLALKYKLVNSEVPYYKYVPNPVLENDHVTLYWDRSIITDRTIVANKPDIVVIDRLACRAMIVDVTIPHDDNLVKAEKEKQIKYLDLAHEVVDMWNVNSAVIVPIVVTANGLMARSLNHHLSRLALDGWIKGLIQKAVLLDTARIVRRFLSLEP

SEQ ID NO: 28768 - protein, 1110 aa, Mesoligia furuncula
MRWTQSMNENVMRAYYGSTEGGINLTAYRDRMLSLFQELEPTVNVSAQRLSDQVRVIQRNHRLDDIALDRLRSEVLSNHIVSISAQTAAQVSSVDAIPPRFNHVEEEDDRVDTVSSQCNVRLRSALEDALREYRSTPTELRPRLPRLPMHKKNRALVCALDSQLKNFFESSVDLVDTHSILYCAAVAACRLANVKFPSCDGATRPKPAVPAWQHRIERRIDGARVLIGKLYCFREGNTRPRVMRFVRRAFSGTGISPREYMSRVTERIDFLKQKVCAWANRIRRYKRRVDRYTQNRMFQSDERWVYRAWERPEQNVTDVCRPDDAATSAFWCSIWSVPVCHTEAGWMQDVERVCESVPEMETVLITPSDVARAVRPLSNWKSPGPDGLHNFWLKWLISSHTCLASQFQSSLESGSLPQFLTTGVTHLLHKSGSPAEPKNYRPITCLSTVYKLLTSILRAKINKHIESNSIMSTSQNGCRNGSRGTKELLLIDMAISKQVRRSRKDLSTCWIDYKKAYDSVPHTWLMRVLELYKIDATLRTFLESCMGQWKTVLRYPGCRQIQGNDEPVWIKRGIFQGDSLSPLWFCLALNPLSTLLEDSGLGYRLRRGGQVISHLLYMDDLKLFAPNKLRLMELLKVTKTFSSAIRMEFGVDKCAVMHVKRGEIMESEGIQLSDSISLRSLSSSESYKYLGMSEALGINDADMKQSLKERFFCRLKKVLISLLSGGNKVRAFNGWVMPVLMYSFGILKWTQTELDALDRRVRTLLTANRMHHPRSSVMRLYIPRKCGGRGFLNAKTLHNREVCSLREYFLKTEVGMHRDVVAVDKGLTPLSMAKENWRKPVVLSTDDRKKVWQSKELHGRFYRALHEPGVDFIASVSWLRFGDLFGETEGFVCAIMDEVILTNNYRRHIMKDGTVDVCRACHRPGESIRHIISGCSRLANGEYLHRHNQVARIIHQQLALKYKLVDSEVPYYKYVPDPVLENDHVTLYWDRSIITDRTIVANKPDIVVIDRLARRTMIVDVTIPHDGNLVKAEKEKKIKYLDLAHEVVDMWNVSSAVIVPIVVSANGLMAESLDQHLSRLSLGGWIKGLIQKAVLLDTARIVRRFLSLEP

SEQ ID NO: 28769 - protein, 1210 aa, Xestia c-nigrum
MLTRHRAKLLRDAHPPSPGSSLSSASQPPGRATSVSTVSPVAAVASSSSDEFFSPPSTPPPPPPSRGRRRGRGRPPAGLGPRGQQASSRVPAAGGNVSRMRWTQSMNENVMRAYYGATEGGSNLIAYRGQMLSLFQVLEPAVNVDAQRLSDQVRVIQRNHMLDDTVLDRLRSESRSNLVTPASPMLAVQLQTIPSTPLRSDYDGEEDGDEVISVSTQCNAQLRSALEDAFREYRSTPPELRPRLPRLPMHKKNKALVCALDSQLSNCFDSSKDLADTHSILYCGAVAACRVAHVKFPNNDRTTRPKLAVPAWQCRIERRIGEARVLIGKLICFREGNTRPRVMRFVRRAFSGTDISFRDYLARITERIDFLKQKICAWASRIRRYKRRVERYTQNRSFQSDERWVYRAWERPDQGVTNTRLPDDDAMCSFWRSIWSVPVSHTEGDWIRKVEQVCDQIQEMGAIIISLQDVACAVRPLPNWKSPGPDGLHNFWIKWFQRSHACLASQFQSALESGSLPQFMTTGFTHLLHKSGSTAEPKNYRPITCLPTVYKVLTSILRAKINKHIESNSIMSTSQNGCRNGSRGTKELLLIDMAISQQVRRSRKNLSTCWIDYKKAYDSVPHTWLMRVLELYKINATLRAFLESCMGQWKTVLRYPGCRQIQGNDEPVWIKRGIFQGDSLSPLWFCLALNPLSSLLENSGLGYRLRKDGQVISHLLYMDDLKLFAPNKLQLLELLKVTETFSNAIRMEFGVDKCAVMYVKRGEIMESEGLQLSDSIHLRSLSSSESYKYLGMSEALGINVTDMKQSLRERFFGRLKKVLNSLLSGGNKVRAFNGWVMPVLMYSFGILKWTQTELDALDRRVRTLLTANRMHHPRSSMMRLYIPRKCGGRGFLNVKNLHNREVCSLREYFLEADVGMHRDVVSVDKGLTPLSLANGNWRKPKVLDTNDRREEWQGKELHGRFYRALHGPDVDFLASVSWLRFGDLFGETEGFICAIMDEVMMTKNYRKYIVKDGTVDICRACHRPGESIRHIISGCSSLANGEYLHRHNLVARIIHQQLALKYNLVESEVPYYKYAPDPVLVNGNITLYWDRPITTDRTVVANRPDIVVIDRLERRTMIVDITVPHDENLVKAEQDKKNKYLDLAREVVDMWDVSTAIIVPIVVSANGLIAKSLDQHLRRLSLGSWIKGLIQKAVLLDTARIVRRFLSQEP

SEQ ID NO: 28770 - protein, 1111 aa, Xestia c-nigrum
MKWTQLMNENVMRAYYGSTEGGTNLTAYRVRMLSLFQDLEPTVNASAQRLSDQVRVIQRNHLLDGAALDRLRSEVLSNRIILTPAQTAVQASSIDANPPRSNPAVVEEDDRVATVSSQCNDRLRSALEDALHEYRSTSAELRPRLPRLPMHKKNRALVCALDSQLKNVFESSEDLVDTHSILFCGAVAACRLANVKFPNYDLATRPKPAVPAWQRRIERRIDGARVLIGKLHCFREGNTRPRVMRFVRRAFSGTEISPQEYMSRVTERIDFLKQKVYAWASRIRRYKRRVDRYSQNRIFQSDERWVYRAWERPQQNMTDVCRPDDAATSSFWRSIWSVPVCHSEADWMRDVERVCEPIPTMEPILITPLDIARAVRPLPNWKSPGPDGLHNFWLKWFSSSHTCLASQFQSSLESGSLPQFLTTGITHLLHKSGSPAEPKNYRPITCLSTVYKLLTSILRTKINTHVDSNSIMSASQNGCRNGSRGTKELLLIDMAISQQVRRARKDLSTCWIDYKKAYDSVPHSWLRRVLELYKIDATLRTFLESCMGQWRTVLRYPGCRQIQGNDEPVWIKRGIFQGDSLSPLWFCLALNPVSTLLENSGLGYRLRKDGQVISHLLYMDDLKLFAPNKLQLMELLKVTETFSSAIGMEFGVDKCAVMYVKRGKIMGSEGLQLSDSIHLRSLSSSESYKYLGMSEALGINVTDMKQSLKERFFGRLKKVLNSLLSGGNKVRAFNGWVMPVLMYSFGILKWTQTELDAMDRRVRTLLTENRMHHPRSSVMRLYIPRKCGGRGFLNAKTLHNREVYSLREYFLKADVGMHRDVVAVDKGLTPLSMAKENWRKPVVLTTDDRKKEWQGKELHGRFYRALHGPDVDFLASVSWLRFGDLFGETEGFVCAIMDEVMLTNNYRKYIMKDGTVDVCRACHCPGESIRHIISGCSRLANGEYLHRHNQVARIIHQQLALKFKLVESEVPYYKYVPDRVLVKDHVTLYWDQSIITDRTIVANKPDIVVIDRSARRVMIIDVTIPHDENLVKAEKEKQMKYLDLAHEVRDMWNMNSVIIVPIVVTANGLIAKSLDEHLSKLSLGGWIKGLIQKAVVLDTARIMRRFLSLQP

SEQ ID NO: 28771 - protein, 1200 aa, Xestia c-nigrum
MITRAASRRRARLPSPDSSLSSASPPPDPGSPVSTVAAVASSSSDEYFSPPTSPTPVRRAGRGRPPRSLGLRGQQAPSRVPATGGCVQRMRWTQSMNENAMRAYYGSTEGGTNLTAYRVRMLSLFQDLEPAVNVSAQRLSDQVRVIQRNHMLDDAALDRLRSEVLSNLIILTPAQTAVQASAIDATPPRSNPAVVEEDGRVATVSSQCNDRLRSALEDALREYRSTPTELRPRLPRLPMHKKNRALVCALDSQLKNVFESSEDLVDTHSILFCGAVAACRLANVKFPNCDLATRPKPAVPVWQRRIERRIDGARVLIGKLYCFREGNTRPRVMRFVRRAFSGTEISPQEYMSRVTERIDFLKQKVYAWASRIRRYKRRVDRYSQNRMFQCDERWVYRAWERPDQNVTDVCHPGDAATSSFWRSIWSVPVCHSEADWMRDVERVCEPIPEMAPVVITSLDIARAVRPLPNWKSPGPDGLHNFWLKWLSSSHTCLASQFQSSLESGSLPQFLTTGVTHLLHKSGSPTEPQNYRPITCLSTVYKLLTSILRTKINTHIDNNSIMSASQNGCRNRSRGTKELLLIDMAISQQVRRSRKDLSTCWIDYKKAYDSVPHSWLMRVLELYKIDATLCTFLKSCMGQWRTVLRYPGCRQIQGNDESVWIKRGIFQGDSLSPLWFCLALNPLSTLLENSGLGYQLRKDGQVISHLLYMDDLKLFAPNKLRLMELLKVTETFSNAIRMEFGVDKCAVMYVKRGEIMESEGLQLSDSIHLRSLSSSESYKYLGMSEALGINVTDMKQSLRERFFGRLKKVLNSLLSGGNKVRAFNGWVMPVLMYSFGILKWTQTELDALDRRVRTLLTENRMHHPRSSVMRLYIPRKCGGRGFLNVKTLHNREVCSLREYFLKAEVGMHRDVVAVDKGLTPLSMAKENWRKPVILTTDDRKKEWQGKVLHGRFYRALHEPDVDFLASVSWLRFGDLFGETEGFVCAIMDEVMLTNNYRKYIMKDGTVDVCRACHCPGESIRHIISGCSRLANGEYLHRHNQVARIIHQQLALKFKLVESEVPYYKYVPDPVLVKDHITLYWDQSIITDRTIVANKPDIVVIDRSARRVMIIDVTIPHDENLVKAEKEKQIKYLDLAHEVRDMWNMNSVIIVPIVVTANGLIAKSLDEHLSKLSLGGWIKGLIQKAVLLDTARIVRRFLSLQP

SEQ ID NO: 28772 - protein, 1200 aa, Xestia c-nigrum
MITRAASRRRARPPTPDSSLSSASPPPDPGSPVPPVAAVASSSSDEYFSPPTSPTPVRRAGRGRPPRSLGLRGQQAPSRVPATGGCVQRMRWTQSMNENVMRAYYGSTEGGINLTAYRDRMLSLFQDLEPAVNVSAQRLSDQVRVIQRSHRLDDTTLDRLRSEVLSNLITITPTQTAVHMSVVNATLPRSNPVVVEEDDRVALVSSQCNDRLRSALDNALREYRSISAELRPRLPRLPMHKKNRALVCALDSQLKNIFESSEDLVDTHSILFCGAVAACRLANVKFPNCDIAIRPKPAVPAWQRRIERRIDGARVLIGKLYCFREGNTRPRVMRFVRRAFLGTEISPQEYMSRVTERIDFLKQKVYAWASRIRRYKRRVDRYSQNRMFQSDERWVYRAWERPQQNMMDVCRPDDAATSSFWRSIWSVPVCHSEADWMRDVERVCEPIPTMEPILITPLDIARAVRPLPNWKSPGPDGLHNFWLKWFSSSHTCLASQFQSSLESGSLPQFLTTGVTHLLHKSGSPAEPKNYRPITCLSTVYKLLTSILRTKINTHVDSNSIMSASQNGCRNGSRGTKELLLIDMAISQQVRRARKDLSICWIDYKKAYDSVPHSWLKRVLELYKIDATLRAFLESCMGQWRTVLRYPGCRQIQGNDEPVWIKRGIFQGDSLSPLWFCLALNPVSTLLENSGLGYRLRKDGQVISHLLYMDDLKLFAPNKLQLMELLKVTETFSSAIGMEFGVDKCAVMYVKRGKIMGSEGLQLSDSIHLRSLSSSESYKYLGMSEALDINVTDMKQSLRERFFGRLKKVLNSLLSGGNKVRAFNGWVMPVLMYSFGILKWTQTELDALDRRVRTLLTENRMHHPRSSVMRLYIPRKCGGRGFLNAKTLHNREVCSLREYFLKADVGMHRDVAAVDRGLTPLSMANENWRKPVVLTTDDRMKEWQGKELHGRFYRALHGPDVDFLASVSWLRFGDLFGETEGFVCAIMDEVMLTNNYRKYIMKDGTVDVCRACHLPGESIRHIISGCSRLANGEYLHRHNQVARIIHQQLALKFNLVELEVPYYKYVPDPVLVKDHVTLYWDQSIITDRTIVANKPDIVVIDRSARRVMIIDVTIPHDENLVKAEKEKQIKYLDLAHEVRDMWNMDSVIIVPIVVSANGLIAKSLDEHLSKLSLGGWIKGLIQKAVLLDTARIVRRFLSLQP

SEQ ID NO: 28773 - protein, 1162 aa, Xestia c-nigrum
MITRAALRRARLATPDSSLSSASPPPDPGSPVSPAVAVASSSSDEYFSPPTSPTLVRRAGRGRPPRSLGLRGQQAPSRVPATGGCVQCMRWTQSMNENVMRAYYGSTEGGTNLTVYRVRMLSMFQDLEPTVNASAQRLSDQVRVIQRNHLLDDAVLDRLRSEVLNNRIIFTQAQTAVQASAIHATPPRSNLAVITELIPRLPRLPMHKKNKALVCALDSQLKNMFESSEDLVDTYSILFCGAVAACRLANVKFPNCDIATRPKQAVPAWQRRIERRIDGARVLIGKLYCFREGNTRPRVMRFVRRAFSGTEISPQEYMSRVTERIDFLKQKVYAWASRIRRYKRRVDRYSQNRMFQSDERWVYRAWERPQQNMTDVCRPDDAATSSFWRSIWSVPVCHSEADWMRDVERVCEPIPTMEPILITPLDIARAVRPLPNWKSPGPDGLHNFWLKWFCSSHTCLASQFQSSLESGSLPQFLTTGVTHLLHKSGSPAEPKNYRPITCLSTVYKLLTSINTHVDSNSIMSASQNGCRNGSRGTKELLLIDMAISQQVRRARKDLSICWIDYKKAYDSVPHSWLKRVLELYKIDATLRAFLESCMGQWRTVLRYPGCRQIQGNDEPVWIKRGIFQGDSLSPLWFCLALNPVSTLLENSGLGYRLRKDGQVISHLLYMDDLKLFAPNKLQLMELLKVTETFSSAIGMEFGVDKCAVMYVKRGKIMGSEGLQLSDSIRLRSLSSSESYKYLGMSEALGINVTDMKQSLRERFFGRLKKVLNSLLSGGNKVRAFNGWVMPVLMYSFGILKWTQTELDALDRRVRTLLTENRMHHPRSSVMRLYIPRKCGGRGFLNAKTLHNREVCSLREYFLKADVGMHRDVVAVDKGLTPLSMAKENWRKPVVLTTDDRKNEWQGKELHGRFYRALHGPDVDFLASVSWLRFGDLFGETEGFVCAIMDEVMLTKNYRKYIMKDGTVDVCRACHCPGESIRHIISGCSRLANGEYLHRHNQVARIIHQQLALKFKLVESEVPYYKYVPDPVLVKDHVTLYWDQSIITDRTIVANKPDIVVIDRSARRVMIIDVTIPHDENLVKAEKEKQMKYLDLAHEVRDMWNMNSVIIVPIVVTANGLIAKSLDEHLSKLSLGGWIKGLIQKAVLLDTARIVRRFLSLQP

SEQ ID NO: 28774 - protein, 962 aa, Xestia c-nigrum
MHKKNRALVCALDSQLKNIFESSEDLVDTHSILFCGAVAACRLANVKFPNCDIAIRPKPAVPAWQRRIERRIDGARVLIGKLYCFREGNTRPRVMRFVRRAFSGTEISPQEYMSRVTERIDFLKQKVYAWASRIRRYKRRVDRYSQNRMFQSDERWVYRAWERPQQNMMDVCRPDDAATSSFWRSIWSVPVCHSEADWMRDVERVCEPIPTMEPILITPLDIARAVRPLPNWKSPGPDGLHNFWLKWFSSSHTCLASQFQSSLESGSLPQFLTIGVTHLLHKSGSPAEPKNYRPITCLSTVYKLLTSILRTKINTHVDSNSIMSASQNGCRNGSRGTKELLLIDMAISQQVRRARKDLSICWIDYKKAYDSVPHSWLKRVLELYKIDATLRAFLESCMGQWRTVLRYPGCRQIQGNDEPVWIKRGIFQGDSLSPLWFCLALNPVSTLLENSGLGYRLRKDGQVISHLLYMDDLKLFAPNKLQLMELLKVTETFSSAIGMEFGVDKCAVMYVKRGKIMGSEGLQLSDSIHLRSLSSSESYKYLGMSEALGINVTDMKQSLRERFFGRLKKVLNSLLSGGNKVRAFNGWVMPVLMYSFGILKWTQTELDALDRRVRTLLTENRMHHPRSSVMRLYIPRKCGGRGFLNAKTLHNREVCSLREYFLKADVGMHRDVAAVDKGLTPLSMANENWRKPVVLSTDDRMKEWQGKELHGRFYRALHGPDVDFLASVSWLRFGDLFGETEGFVCAIMDEVMLTNNYRKYIMKDGTVDVCRACHLPGESIRHIISGCSRLANGEYLHRHNQVARIIHQQLALKFNLVELEVPYYKYVPDPVLVKDHVTLYWDQSIITDRTIVANKPDIVVIDRSARRVMIIDVTIPHDENLVKAEKEKQIKYLDLAHEVRDMWNMDSVIIVPIVVSANGLIAKSLDEHLSKLSLGGWIKGLIQKAVLLDTARIVRRFLSLQP

SEQ ID NO: 28775 - protein, 1199 aa, Xestia c-nigrum
MITRAALRRARLATPDSSLSSASPPPDPGSPVSPAVAVASSSSDEYFSPPTSPTPVRRAGRGRPPRSLGLRGQQAPSRVPATGGCVQRMRWTQSMNENVMRAYYGSTEGGTNLTVYRVRMLSMFQDLEPTVNASAQRLSDQVRVIQRNHLLDDAVLDRLRSEVLNNRIIFTQAQTAVQASAIHATPPRSNPAVIEEDDRVATISSQCNDRLRSALDNALREYRSISAELRPRLPRLPMHKKNKALVCALDSQLKNIFESSEDLVDTHSILFCGAVAACRLANVKFPNCDIATRPKPAVPAWQRRIERRIDGARVLIGKLYCFREGNTRPRVMRFVRRAFSGTEISPQEYMSRVTERIDFLKQKVYTWASRIRRYKRRVDRYSQNRMFQSDERWVYRAWERPQQNMTDVCRPDDAATSSFWRSIWSVPVCHSEADWMRDVERVCEPIPTMEPILITPLDIARAVRPLPNWKSPGPDGLHNFWLKWFSSSHTCLASQFQSSLESGSLPQFLTTGVTHLLHKSGSPAEPKNYRPITCLSTVYKLLTSILRTKINTHVDSNSIMSASQNGCRNGSRGTKELLLIDMAISQQVRRARKDLSTCWIDYKKAYDSVPHSWLKRVLELYKIDATLRAFLESCMGQWRTVLRYPGCRQIQGNDEPVWIKRGIFQGDSLSPLWFCLALNPVSTLLENSGLGYRLRKDGQVISHLLYMDDLKLFAPTKLQLMGLLKVTETFSSAIGMEFGVDKCAVMYVKRGKIIGSEGLQLSDSIHLRSLSSSESYKYLGMSEALGINVTDMKQSLKERFFGRLKKVLNSLLSGGNKVRAFNGWVMPVLMYSFGILKWTQTELDALDRRVRTLLTENRMHHPRSSVMRLYIPRKCGGRGFLNAKTLHNREVCSLREYFLKADVGMHRDVVAVDKGLTPLSMAKENWRKPVVLTTDDRKNEWQGKELHGRFYRALHGSDVDFLASVSWLRFGDLFGETEGFVCAIMDEVMLTNNYRKYIMKDGTVDVCRACHCPGESIRHIISGCSRLANGEYLHRHNQVARIIHQQLALKFKLVESEVPYYKYVPDPVLVKDHVTLYWDQSIITDRTIVANKPDIVVIDRSARRVMIIDVTIPHDENLVKAEKEKQMKYLDLAHEVRDMWNMNSVIIVPIVVTANGLIAKSLDEHLSKLSLGGWIKGLIQKAVLLDTARIVRRFLSLQP

SEQ ID NO: 28776 - protein, 1116 aa, Omphaloscelis lunosa
MCKQRMRWTQSMNENVMRAYYGSTEGGTNLTAYRVRMLSLFQELEPTVNVSAQRLSDQVRVIQRNHRLDDTALDRLRSEVLSNHIVSTRAQTAAQASNIDATPPRFNHGVEEEDDRVATVSSQCNNRLRSALEDAFREYRYTPTELRPRLPRLPMHNKNRALVCALDSQLTNFFESSEDLIDTHSILYCAAVAACRLANVKFPNCDGATRPKPVVPAWQCRIERRIDGARVLIGKLYCFREGNTRPRVMRFVRRAFSGTGISPQDYMSRVTERIDFLKQKVCAWASRIRRYKRRVDRYTQNRMFQSDERWVYRAWERPEQNVTDVCRPDDATTSAFWRSIWSVPVCHTEAGWMQDVERVCETIPVMDAVFITPLDVARAVRPLPNWKSPGPDGLHNFWLKWLSSSHTRLASQFQSSLESGSLPQFLTTGVTHLLHKSGNPAEPKNYRPITCLSTVYKLLTSILRTKINTHIDSNLIMSASQNGCRNGSRGTKELLLIDMAISQQVRRSRKDLSTCWIDYKKAYDSVPHTWLMRVLELYKVDTTLRTFLMSCMGQWRTVLRYPGCRQTQGNDEPVWIKRGIFQGDSLSPLWFCLALNPLSTLLEDSGLGYRLRRGGQVISHLLYMDDLKLFAPNKLRLMELLKVTETFSGAIRMEFGVDKCAVMHVKRGEIMESEGIQLSDSIHLRSLSSAENYRYLGMSESLGINVADMKQSLKERFFGRLKKVLISFLSGGNKVRAFNGWVMPVLMYSFGILKWTQAELDALDRRVRTLLTANRMHHPHSSVMRLYIPRKCGGRGFLNAKTLHNREVCSLREYFFKADVGMHRDVVAVDNGLTPLSMAKENWRKPVVLTTDDRKEVWQSKALHGRFFRALHEPGVDFLASVSWLRFGDLFGETEGFICAIMDEVILTNNYRRHIMKDGTVDVCRACHRPGESIRHIISGCSRLANGEYLHRHNQVARIIHQQLALKYKLVDSEVPYYKYVPDPVLENDHVTLYWDRSIITDRTIVANKPDIVVIDRLARHAMIVDVTIPHDENLVKAEKEKQIKYLDLAHEVVDMWNVSSAVIVPIVVTANGLMAKSLDQHLSRLSLDGWIKRLIQKAVLLDTARIVRRFLSLQP

SEQ ID NO: 28777 - protein, 1203 aa, Omphaloscelis lunosa
MLTRSAARSARLPPPDSPLSSASPPPVPSPIVNAVSTPAAVVASSSSDEYFSPPTSPTPVRRQGRGRPPKSLGLRGRPAPSRVPAAGGCVQRMRWTQSMNENVMRAYYGSTEGGTNLTAYRVRMLSLFQELEPTVNVSAQRLSDQVRVIQRNHRLDDTALDRLRSEVLSNHIVSAREQTAAEASNIDPTPPRFNHGVEEEDDRVATVSSQCNNRLRSALEDAFREYRYTPTELRPRLPRLPMHKKNRALMCALDSQLTNFFESSEDLIDTHSILYCAAVAACRLANVKFPNCDGATRPKPAVPAWQCRIERRIDGARVLIGKLYCFREGNTRPRVMRFVRRAFSGTEISPQDYMSRVTERIDFLKQKVCAWASRIRRYKRRVDRYTQNRMFQSDERWVYRAWERPEQNVTDVCRPDDAATSAFWRSIWSVPVCHTEAGWMQDVERVCETIPEMDAVFITPLDVARAVRPLPNWKSPGPDGLHNFWLKWLSSSHTCLASQFQSSLESGSLPQFLTTGVTHLLHKSGNPAEPKNYRPITCLSTVYKLLTSILRTKINTHIDSNSIMSVSQNGCRNGSRGTKELLLIDMAISQQVRRSRKDLSTCWIDYKKAYDSVPHTWLMRVLELYKVDTTLRTFLMSCMGQWRTVLRYPGCRRTQGNDEPVWIKRGIFQGDSLSPLWFCLALNPLSTLLEDSGLGYRLRRGGQVISHLLYMDDLKLFAPNKLRLMELLKVTETFSGAIRMEFGVDKCAVMHVKRGEIMESEGIQLSDSIHFRPLSSAENYRYLGMSESLGINVADMKQSLKERFFGRLKKVLISFLSGGNKVRAFNGWVMPVLMYSFGILKWTQTELDALDRRVRTLLTANRMHHPRSSVMRLYIPRKCGGRGFLNAKTLHNREVCSLREYFFKADVGMHRDVVAVDNGLTPLSMAKENWRKPVVLTTDDRKEIWQSKALHGRFYRALHEPSVDFLASVSWLRFGDLFGETEGFICAIMDEVILTNNYRRHIMKDGTVDVCRACHRPGESIRHIISGCSRLANGEYLHRHNQVARIIHQQLALKYKLVDSEVPYYKYVPDPVLENDHATLYWDRSIITDRTIVANKPDIVVIDRLARHAMIVDVTIPHDENLVKAEKEKQIKYLDLAHEVVGMWNVSSAIIVPIVVTANGLMAKSLDHHLSRLSLGGWIKRLIQKAVLLDTARIVRRFLSLQP

SEQ ID NO: 28778 - protein, 868 aa, Sesamia nonagrioides
MRFVRQAFSGTGISPREYINNVTERIDFLKQKVCAWASRIRRYKKRVDRYTQNRMFQSDERWVYGAWERPEQNEADECRPDDATTSAFWRGIWSVSVCHTEGDWTQDVEQVCEAIPEMDNILITPLDVATAVRSLPNWKSPGPDGLHNFWLKWLSSSHTCLASQFQSSLESGSLPQFLTTGITHLLHKSGSTAEPKNYRPITCLPTVYKVLTSILKAKINNHLDSNSIMSVSQNGCRSGSRGTKELLLIDMAISQQVRRSRKDLSTCWIDYKKAYDSVPHIWLMRVLELYKINATLRTFLRSCMGQWKTVLRYPGSRQIQGNDEPVWIKRGIFQGDSLSPLWFCLALNPLSTLLEDSGLGYRLMRGGQVISHLLYMDDLKLFAPNKLHLMKLLNVTETFSSGIKMEFGVDKCAVMHVKRGQIMESEGITLPDSIHLRSLSSFESYKYLGMSEALGINDADMKQSLKERFFGRLKKVLNSLLSGGNKVRAFNGWVMPVLMYSFGILKWTQTELDALDRRVRTLLTANRMHHPRSSVMRLYIPRKCGGRGFLNAKTLHNREVCSLREYFLKTVVGMHHDVVTVDKGLTPLSMAKENWHKPIILTTDDRKMVWQSKELHGRFYRALHGPDVDFLASVSWLRFGDLFGETEGFVCAIMDEVILTNNYRRYIMKDGTIDVCRACHHPGESIRHIISGCSRLANSEYLHRHNQVARIIHQQLALKYKLVDSEVPYYKYVPDPVLENDHVTLYWDRSIITDRTIVANKPDIVVIDRLARLAMIVDVTIPHDGNLVKAEKEKQMKYLDLAHEVVDMWNVNSAVIVPIVVSANGLIAKSLDQHLLRLSLGSWIKGLIQKAVLLDTARIVRRFLSLEP

SEQ ID NO: 28779 - protein, 1202 aa, Sesamia nonagrioides
MLTRQAARRARSPPPDSPPSTASPPPVPSANVSAVTTPAAVVASSSSDEYFSPPTSPRPVRRQGRGRPPKSLGLRGHPAPSRVPAAGGCVQRMRWTQTINENVMRAYYRATEGGTNLTAYRERMLSLFQALEPTVNVSAQRLSDQVRVIQRNHRLDDIALDRLRSEVLSNQITPTLTQTVAQASIIDAGSPRSNRVEEEDDRVETVSSQYNDRLRNALEDAFRDYRSTPTDLRPRLPRLPMHKKNRALVCALDSLLKNFFESSEDLIDTHSILYCAAVAACRLAKVKFPNCEEAARPKPAVPAWQRRIERRIDGTRVLIGKLYCFRDGNTRPRVMRFVRQAFSGTGISPREYINHLTERIDFLKQKVCAWASRIRRYKRRVDRYTQNRMFQSDERWVYRAWERPEQNEADVCRPDDATTSAFWRGIWSVSVCHTEGNWIRNVEQVCETIPEMDTILITPSDVAAAVRSLPNWKSPGPDGLHNFWLKWLSSSHTCLASQFQSSLESGSLPQFLTTGITHLLHKSGSTAESKNYRPITCLPTVYKVLTSILKAKINKHLNSNSIMSVSQNGCKNGSRGTKELLLIDMAISQQVRRSRKDLSTCWIDYKKAYDSVPHTWLMRVLELYNINATLRTFLRSCMGQWKTALHYPGSRQIQGNDDPVWIKRGIFQGDSLSPVWFCLALNPLSTLLENSGLGYRLRRGGQVISHLLYMDDLKLFAPNELHLMKLLNVTETFSSGIRMEFGVDKCAVMHVKQGEIMESEGITLPDSIHLRSLSSFESYKYLGMSEALGINDADMKQSLKERFFGRLKKVLNSLLSGGNKVRAFNGWVMPVLMYSFGILKWTQTELDALDRRVRTLLTANRMHHPRSSVMRLYIPRKCGGRGFLNAKTLHNREVCSLREYFLQTVVGMHHDVVTVDKGLTPLSMAKENWHKPIILTTDDRRKVWQSKELHGRFYRALHEPDVDFLASVSWLRFSDLFGETEGFVCAIMDEVILTNNYRRYIMKDGTIDVCRACHHPGESIRHIISGCSRLANSEYLHRHNQVARIIHQQLALKYKLVDSEVPYYKYVPDPVLENDHVTLYWDRSIITDRTIVANKPDIVVIDRLARLAMIVDVTIPHDGNLVKAEKEKKMKYLDLAHEVVDMWNVNSAVIVPIVVSANGLIAKSLDQHLLRLALGSWIKGLIQKAVLLDTARIVRRFLSLEP

SEQ ID NO: 28780 - protein, 1202 aa, Sesamia nonagrioides
MLTRQAARRARSPPPDSSPSSASPPPVPSANVSAVTTPATVVASSSSDEYFSPPTSPTPVRRQGRGRPPKSLGLRGHPAPSRVPAAGGCVQRMRWTQTMNENVMRAYYRATEGGTNLTAYRERMLSLFQALEPTVNVSAQRLSDQVRVIQRNHRLDEIALDRLRSEVLSNQITPTLTQTAAQASIIDAAPPWSNRVEEEDDRVETVSSQYNDRLRNALEDAFRDYRSTPTNLRPRLPRLPMHKKNRALVCALDSLLKNFFESSEDLIDTHSILYCAAVAACRLAKVKFPNCEEAARPKPAVPAWQRRIERRIDGTRVLIGKLYCFRDGNTRPRVMRFVRRAFSGTGISPREYINHLTERIDFLKQKVCAWASRIRRYKRRVDRYTQNRMFQSDERWVYRAWERPELNEADVCRPDDATTSAFWRGIWSVSVCHTEGDWIQNVEQVCETIPEMDTILITPSDVATAVRSLPNWKSPGPDGLHNFWLKWLSSSHTCLASQFQSSLESGSLPQFLTTGITHLLHKSGSTAEPKNYRPITCLPTVYKVLTSILKAKINKHLDSNSIMSVSQNGCKSGSRGTKELLLIDMAISQQVRRSRKDLSTCWIDYKKAYDSVPHTWLMRVLELYKINATLRTFLRSCMGQWKTALHYPESRQIQGNDEPVWIKRGIFQGDSLSPLWFCLALNPLSTLLENSGLGYRLRRGGQVISHLLYMDDLKLFAPNELHLMKLLNVTETFSSGIRMEFGVDKCAVMHVKQGEIMESAGITLPDSIHLRSLSSFESYKYLGMSEALGINDADMKQSLKERFFGRLKKVLNSLLSGGNKVRAFNGWVMPVLMYSFGILKWTQTEFDALDRRVRTLLTANRMHHPRSSVMRLYIPRKCGGRGFLNAKTLHNREVCSLREYFLQTVVGMHHDVVTVDKGLTPLSMAKKNWHKPIILTTDDRKKVWQSKELHGRFYRALHEPDVDFLASVSWLRFSDLFGETEGFVCAIMDEIILTNNYRRYIMKDGTIDVCRACHHPGESIRHFISGCSRLANSEYLHRHNQVARIIHQQLALKYKLVDSEVPYYKYVPDPVLENDHVTLYWDRSIITDRTIVANKPDIVVIDRLARLAMIVDVTIPHDGNLVKAEKEKQIKYLDLAHEIVDMWNVNSAVIVPIVVSANGLIAKSLDQHLLRLSLGSWIKGLIQKAVLLDTARIVRTFLSLEP

SEQ ID NO: 28781 - protein, 1199 aa, Mamestra configurata
MLTRAALQRARPPPPDPSLSSASPPPDIGSPLSPAVAVASSSSDEYFSPPTSPTSVRRQGRGRPPRGLGPRGQPAPSRVPATGGCVQRMRWTQSMNENVMRAYYGSTEGGTNLTAYRVRMLSLFQDLEPTVNVSAQRLSDQVRVIQRNHRLDDAALDRLRSEVLNNLIISTPTQTAVHAPVNGRITPRPNNVSDEVDDRVVTVSSQCNDRLRSALEDALREYRSTPTELRPRLPRLPMHKKNRALVCALDSLLQNIFESSESLVDTHSILYCGAVAACRIANVKFPGCDEAIRPKPAAPAWQRRIERRIDETRALIGKLYCFREGNTRPRVMRFVRRAFSGTEISPRDFTSRVTERIDFLKQKVCAWASRIRRYKRRVDRYSQNRMFQSDERWVYRAWERPEQSVTDVCRPDDVATSIFWRSIWSVPICHAEGGWMRDVERVCEAIPQMEKITITTLDVAKAVRPLPNWKSPGPDGLHNFWLKWYSSSHALLASQFQSSLDSGSLPQFLTTGVTHLLHKTGSPTEPKNYRPITCLSTVYKLLTSILRAKINEHIESNSIMSASQNGCRKGSRGTKELLLIDMAISQQVRRSRKDLSTCWIDYKKAYDSVPHTWLMKVLELYKIDATLRTFLESCMRQWKTVLRYPGCRPIQGSDEPVWIKRGIFQGDSLSPLWFCLALNPLSTLLEDSGLGYRLRRGGQAISHLLYMDDLKLFAPNNLRLMELLKVTETFSSAIRMEFGVDKCAVMHVKKGEIMESEGIHLSDSIQVRSLSSTETYKYLGMLEALGINGTDMKQSLRERFFGRLKKVLNSLLSGGNKVRAFNGWVMPVLMYTFGILKWTQTELDALDRRVRTLLTANRMHHPRSSVMRLYIPRKCGGRGFLNAKTLHNREMCSLREYFLKADVGMHRDVVAVDKGLTPLSMAKENWRTPVILTTDDRKEVWKGKELHGRFYRALHGSDVDFSASVAWLRFGDLFGETEGFVCAIMDEVILTNNYRRHIMKDGTVDMCRACHRPGESIRHIISGCSRLANGEYLHRHNQVARIIHQQLALKYKLVDSEVPYYKYVPDPVLENDHVTLYWDRSIITDRTIVANKPDIVVIDRLARRTMIIDVTIPHDENLVKAEKEKQIKYLDLAHEVVDMWNVDSAVIVPIVVTANGLMAKSFDDHLSKLALRCWVKGLIQKAVLLNTARIVRRFLSLEP

SEQ ID NO: 28782 - protein, 868 aa, Noctua janthe
MRFVRRAFSGTGISPQEYMSRVTERIDFLKQKVYAWANRIRRYKRRVDRYSQNRIFQSDERWVYRAWERPEQNMTDVCRPDDAATSSFWRSIWSVPVCHTEADWMRDVERACEPIPEMEPIIITPIDIARAVRPLPNWKSPGPDRLHNFWLKWLSSSHTCLASQFQSSLESGSLPQFLTTGVTHLLHKSGSPAEPKNYRPITCLSTVYKLLTSILRVKINTHIDKNFIMSASQNGCRNRSRGTKELLLIDMAISQQVRRSRKDLSTCWIDYKKAYDSVPHTWLMRVLELYKIDATLRTFLESCMGQWRTVLRYPGCRQIQGNDEPVWIKRGIFQGDSLSPLWFCLALNPLSTLLEDSGLGYRLRRGGQVISHLLYMDDLKLFAPNKLRLMELLKVTETFSNAIRMEFGVDKCAVMYVKRGEIMESEGIQLSDSIHLRSLSSSESYKYLGMSESLGINVTDMKQSLRERFFGRLNKVLNSLLSGGNKVRAFNGWVMPVLMYSFGVLKWTQTELDALDRRVRTLLTANRMHHPRSSVMRLYIPRKCGGRGFLNAKTLHNHEICSLREYFLKTEVGMHRDVVAVDKGLTPLSMAKENWRKPVVLTTDDRKEVWQGKELHGRFYRALHGPDVDFLASVSWLRFGDLFGETEGFVCAIMDEVMLTNNYRKYIMKDGTVDVCRACHRPGESIRHIISGCSRLANGEYLHRHNQVARIIHQQLALKYKLVESEVPYYKYVPDPVLEKDHVTLYWDRSIITDRTIVANKPDIVVIDRLARRVMIVDVTIPHDENLVKAEKEKQIKYLDLAHEVVDMWNVNSAIIVPIVVTANGLIAKSLDDHLSRLSLGGWIKGLIQKAVLLDTARIVRRFLSLEP

SEQ ID NO: 28783 - protein, 1200 aa, Noctua janthe
MITRAAYRRARLTTPDSSLSSASPPPPDPGSPVSPAAAVASSSSDEYFSPPTSPTPVRRQGRGRPPKSLGLRGHPAPSRVPAAGGCVQRMRWTQTINENVMRAYYGSTEGGTNLTAYRVRMLSLFQVLEPIVNVSAQRLSDQVRVIQRNHMLDDAALDRLRSEVLSNRIVLTPAQTAVQASAIDATPPRSNPAVVEEDDRVAMVSSQCNDRLRSALEDALREYRSTPTKLRPRLPRLPMHNKNRALVCALDSQLKNIFESSENLVDTHSILYCGAVAACRLANVKFPNYDVAIRPKPAVPTWQRRIECRIDEARVLIGKLHCFREGNTRPRVMRFVRRAFSGTGISPQEYMSRVTERIDFLKQKVYAWANRIRRYKRRVDRYSQNRIFQSDERWVYRAWERPEQNMTDVCRPDDAATSFFWRSIWSVPVCHTEADWMRDVERACEPIPEMEPILITSIDITRAVRPLPNWKSPGPDGLHNFWLKWLSSSHTCLASQFQSSLESGSLPQFLTTGVTHLLHKSGSPAEPKNYRPITCLSTVYKLLTSILRVKINTHIDKNFIMSASQNGCRNRSRGTKELLLIDMAISQQVRRSRKDLSTCWIDYKKAYDSVPHTWLMRVLELYKIDSTLRAFLESCMGQWRTVLRYPGCRQIQGNDEPVWIKRGIFQSDSLSPLWFCLALNPLSTLLEDSGLGYRLRRGGQVISHLLYMDDLKLFAPNKLRLMELLKVTETFSNAIRMEFGVDKCAVMYVKRGEIMESEGIQLSDSIHLRSLSSSESYKYLGMSESLGINVTDMKQSLRERFFGRLNKVLNSLLSGGNKVRAFNGWVMPVLMYSFGVLKWTQTELDALDRRVRTLLTANRMHHPRSSVMRLYIPRKCGGRGFLNAKTLHNREICSLREYFLKTEVGMHRDVVAVDKGLTPLSMAKENWRKPVVLTTDDRKEVWQGKELHGRFYRALHGPDVDFLASVSWLRFGDLFGETEGFVCAIMDEVMLTNNYRKYIMKDGTVDVCRACHRPGESIRHIISGCSRLANGEYLHRHNQVARIIHQQLALKYKLVESEVPYYKYVPDPVLEKDHVTLYWDRSIITDRTIVANKPDIVVIDRLARRVMIVDVTIPHDENLVKAEKEKQIKYLDLAHEVVDMWNVNSAIIVPIVVTANGLIAKSLDDHLSRLSLGGWIKGLIQKAVLLDTARIVRRFLSLEP

SEQ ID NO: 28784 - protein, 983 aa, Ochropleura plecta
MRFATIDPLQPNLDPDYQGYPCIKKNRALVCALDSQLKNLFESSEDLVDTHSILYCGAVAVCRLANVKFPNCDVATRPKPSVPAWQCRIERRIDEARALIGKLYCFREGNTRPRVMRFVRRAFSGTGISPQEYMSRTTERIDFLKQKVYAWANRIQRYKRRVDRYSQNRMFRSDERWVYRAWERPEQSVTDVCRPDDVATSSFWHSIWSVRVCHTEAGWMRDVERVCETIPEMEPILITSLDIASAVRPLPNWKSPGPDGLHNFWLKWLSSSHTRLASQFQSCLESGSLPQFLTTGVTHLLYKSGSPAEPKNYRPITCLSTVYKLLTSILRAKINSHIVKNSIISASQNGCRNGSRGTKELLLIDMAISQQVRRSRKDLSTCWIDYKKAYDSVPHTWLKRVLELYKIDTTLRTFLESCMGQWRTVLRYPGCRQIQGNDEPVWIKRGIFQGDSLSPLWFCLALNPLSTLLEDSGLGYRLRRGGQVISHLFYMDDLKLFAPNKLRLMELLKVTETFSNAIRMEFGVDKCAVMYVKRGEIMESEGIHLSDSIHLRSLSSSESYKYLGMSEALGINVADMKQLLRERFFGRLKKVLKSLLSGGNKVRAFNSWVMPVLMYSFGILKWTQTELDALDRRVRTLLTANRMHHPRSSVMRLYIPRKCGGRGFLNAKTLHNREVCSLREYFLKTDVGMHRDVVAVDKGLTPLSMAKENWRKPVVLTTDYRKEVWQGKELHGRFYKALHGPDVDFLASVSWLRFGDLFGETEGFVCAIMDEVMLTNNYRKYIMKDETVDVCRACHRPGESIRHIISGCSRLANGEYLHRHNQVARIIHQQLALKYNLVESEVPYYKYVPDPVLEKDHVTLYWDRSIITDRTIVANKPDIVVIDRSARRVMIIDVTIPHDENLVKAEKEKQLKYLDLAHEVVDMWNVNSAIIVPIVITANGLIAKSLDEHLSKLSLGGWIKGLIQKAVLLNTARIVRRFLSLEP

SEQ ID NO: 28785 - protein, 1199 aa, Hecatera dysodea
MITRAASRRARPPSPDPSLSSASPPPDVEPPVSPAAAVASSSSDEYFSPPTSPTPVRRQGRGRPPRGLGPRSQPAPSRVPAAGGCVQRMKWTQSINENVMRAYYGSTEGGTNLTAYRVRMLALFQDLEPAVNVSAQRLSDQVRVIQRSHRLDDAALERLRSEVLNNLIISTQTQTAVQAPVSGANTPRANNDSDEVDDRVVTVSSQYNNRLRTALEDALREYRSTPTELRPRLPRLPMHKKNRALVCALDSLLQNIFVISENLVDTHSILYCGAVAACRLANVKFPSGDEAIRPKPAAPPWQCRKERRVDEARALIGKLYCFREGNTRPRVMCFVRRAFAGTGISPHEYTSRITERIDFLKQKVCAWANRIRRYKRRADRYSQNRMFQSDERWVYRAWERPEQSVTDVCRPDDIATTTFWRSIWSVPVRHTEGDWMRDVERVCEAIPQMEKITITPADVATAVRPLPNWKSPGPDGLHNFWLKWYSSSHAVLASQFQSSLESGSLPQFLTTGITHLLHKTGSPAEPKNYRPITCLSTVYKLLTSILRVKINEHIESNSIMSSSQNGCRKGSRGTKELLLIDMAISQQVRRSRKDLSTCWIDYKKAYDSVPHTWLMKVLELYKIDATLRTFLESCMRQWKTVLRYPGCRPLQGNDEPIWIKRGIFQGDSLSPLWFCLALNPLSTLLEDSGLGYRLRRGGQAISHLLYMDDLKLFAPNNFRLMELLKVTETFSSAIRMEFGVDKCAVMHVKKGEIMESEGIQLSDSIQVRSLSSTETYKYLGMSEALGINGTDMKQSLKERFFGRLKKVLNSLLSGGNKVRAFNGWVMPVLMYSFGILKWTQTELDALDRRVRTLLTANRMHHPRSSVMRLYIPRKCGGRGFLNAKTLHNREMCSLREYFLETDVGMHRDVVAVDKGLTPLSMAKENWRKPVIHTTDDRKEVWKCKELHGRFYWALYGSDVDFSASVAWLRFGDLFGETEGFVCAIMDEVILTNNYRRHIMKDGTVDVCRACHRPGESIRHIISGCSRLANSEYLHRHNQVARIIHQQLALKYKLVNSEVPYYKYVPDPVLENDHVTLYWDRSIITDRTIVANKPDIVVIDRLARRTMIIDVSIPHDENLVKAEKEKQIKYLDLAHEVVDMWNVDSAVIVPIIVTANGLMAKSFDDHLSKLALRSWVKGLIQKAVLLDTARIVRRFLSLEP

SEQ ID NO: 28786 - protein, 1202 aa, Mythimna impura
MIMLTRAATRRARPSPLGSSLSSASPPPDLGSPVSPTAAVASSSSDEYFSPPTSPTPVRRPGRGRPPKSLGPRGQPAPSRVPATGGCVQRMKWTQSMNENVMRAYYGSTEGGTNLTAYRVRMLSLFQELEPTVNVTAQRLSDQVRVIQRNHRLDGAALDRLRSEVLSNRIISTPSQTQTEAPQATDSILPRSNHIDDEADDRVVTVSSQCNDRLRSALEDALREYRSTPIALRPRLPRLPMHKKNRALVCALDSLLENVFESSVNLADTHSILYCGAIAACRLANVKLPSCDGATRPKPAAPAWQCRIERRIDEARALIGKLYCFREGNTRPRVMRYVRRAFSGTEISPREYLSRVTERIDFLKQKVCAWANRIRRYKRRVDRYSQNRMFQSDERWVYRAWERPEQNVTDVTRPDAVATNTFWRNIWSVPVCHTEDGWMREVERVCEAIPEMEKVVISPIDVARAVRPLPNWKSPGPDGLQNFWLKWYSSSHALLASQFQSSLESGSLPQFLTTGVTHLLHKTGSTAEPKNYRPITCLSTVYKLLTSILRTKINKHIDNNSIMSASQNGCRNGSRGTKELLLIDMAISQQVRRSRKDLPTCWIDYKKAYDSVPHTWLMRVLELYKIDATLRTFLESCMGQWNTVLRYPGCRSIRRDDEPIWIKRGIFQGDSLSPLWFCLALNPLSTLLEESGLGYRLRRGGQVLSHLLYMDDLKLIAPNKLRLMELLKVTETFSSAIRMEFGVDKCAVMHVKRGEIMESEGIQLSDSIHFRSLSSTETYKYLGMSEALGINVADMKQSLEERFFGRLKKVLNSLLSGGNKVRAFNGWVMPVLMYSFGILKWTQTELDAVDRRVRTLLTANRMHHPRSSVMRLYIPRKCGGRGFLNAKTLHNREVCSLREYFHKTDVGMHRDVVAVDKGLTPLSMAKENWRKPVVLTTDDRKEVWKSKELHGRFYRALHESDIDFAASVAWLRFSNLFGETEGFICAIMDEVILTNNYRRYIMKDGTVDVCRACHRPGESIRHIISGCSRLANGEYLHRHNQVARIIHQQLALKYNLVDYEVPYYRYVPDPVLENDHVTLYWDRSIITDRTIVANKPDIVVIDRLARRVMIVDVTIPHDENLVKAEKEKQIKYLDLAHEVVDMWNVDSAVIVPIVVTANGLIAKSFDDHLSKLSLRGWIKGLIQKAVLLDTARIVRRFLSLEP

SEQ ID NO: 28787 - protein, 1200 aa, Mythimna impura
MLTRTAARRARHPPPGSPLSSASPPPVLGSPMSPAAAVASSSSDEYFSPPTSPTPVRRPGRGRPPKSLGPRGQPAPSRVPAAGGCVQRMRWTQSMNENVMRAYYGSTEGGTNLTAYRVRMLSLFQELEPTVNVTTQRLSDQVRVIQRNHRLDDAALDRLRSEVLSNRIISTPIQTQAAALRATDATLPQSNHVDDEADDRVVTVSSQCNDRLRSALEDALREYRSTPIALRPRLPRLPMHKKNRALVCALDSLLENVFESSVNLADTHSILYCGAIAACRLANVKLPSCDGATRPKPAAPAWQYRIERRIDGARALIGKLYCFREGNTRPRVMRYVRRAFSGTGISPREYLSRVTERIDFLKQKVCAWANRIRRYKRRVDRYSQNRMFQSDERWVYRAWERPEQNVTDVTRPDAVATNTFWRNIWSVPVCHTEDGWMREVERVCEAIPEMEKVVISPTDVATAVRPLPNWKSPGPDGLQNFWLKWYSSSHALLASQFQSSLESGSLPQFLTTGVTHLLHKTGSTAEPKNYRPITCLSTVYKLLTSILRTKINKHIETNSIMSASQNGCRNGSRGTKELLLIDMAISQQVRRSRKDLSTCWIDYKKAYDSVPHTWLMRVLELYKIDATLRTFLESCMGQWNTVLRYPGCRSIRRDDEPIWIKRGIFQGDSLSPLWFCLALNPLSTLLEESGLGYRLRRGGQVLSHLLYMDDLKLIAPNKLRLMELLKVTETFSSAIRMEFGVDKCAVMHVKRGEIMESEGIQLSDSIYLKSLSSTETYKYLGMSEALGINVADMKQSLKERFFDRLKKVLNSLLSGGNKVRAFNGWVMPVLMYSFGILKWTQTELDALDRRVRTLLTANRMHHPRSSVMRLYIPRKCGGRGFLNAKTLHNREVCSLREYFHKTDVGMHRDVVAVDKGLTPLSMAKENWRKPVVLTTDDRREVWKSKELHGRFYRALHESDVDFAASVAWLRFSNLFGETEGFICAIMDEVILTNNYRRYIMKDGTVDVCRACHRPGESIRHIISGCSRLANGEYLHRHNQVARIIHQQLALKYNLVYSEVPYYSYVPDPVLENDHVTLYWDRSIITDRTIVANKPDIVVIDRLARRVMIVDVTIPHDENLVKAEKEKQIKYLDLAHEVVDMWNVDSAIIVPIVVTANGLMAKSLDDHLSKLSLRGWIKGLIQKAVLLDTARIVRRFLSLQP

SEQ ID NO: 28788 - protein, 1201 aa, Xestia xanthographa
MMLTRAAAARRARLPTPDSSLSSASPPPDPGSPVPPVAAVASSSSDEYFSPPTSPPPVRRAGRGRPPKGLGLRGQQAPSRVPATGGCVQRMKWTQAMNENVMRAYYGSTEGGTNLTAYRARMLSLFQDLEPTVNVSAQRLSDQVRVIQRNHRLDDAALDRLRSEVLSNLIILTPTQTAVQVSAINVTLPRSNPAVVEEDDRVSTVSSQCNDRLRSALEDALREYRSTPTEIRPRLPRLPMHKKNRALVCALDSQLKNIFKSSEDLVDTHSILFCGAVAACRLANVKFPNCDVATRPKPAVPAWQRRIERRIDEARVLIGKLYCFREGNTRPRVMRFVRRAFSGTEISPQEYMSRVTERIDFLKQKVYAWANRIRRYKRRVDRYSQNRMFQSDERWVYRAWERSEQNMTNVCRPDDVATSSFWRSIWSVPVCHTEADWMRDVERVCEPIPEMEPIFITPLDVARAVRPLPNWKSPGPDGLHNFWLKWFSSSHTCLASQFQSSLESGSLPQFLITGITHLLHKSGCPAEPKNYRPITCLSMIYKLLTSILRVKINTHIDKNSIMSASQNGCRNGSRGTKELLLIDMAISQQVRRSRKDLSTCWIDYKKAYDSVPHTWLMRVLELYKIDTTLRTFLESCMGQWRTVLRYPGCRQIQGSDEPVWIKRGIFQGDSLSPLWFCLALNPLSTLLENSGLGCRLRKDGQVISHLLYMDDLKLFAPNKLRLMVLLKVTETFSSAIRMEFGVDKCAVMYVKRGEIMESEGLQLSDPIHLRSLSSSETYKYLGMSEALGINITDMKQSLKERFFGRLRKVLNSLLSGGNKVRAFNGWVMPVLMYSFGILKWTQTELDALDRRVRTLLTESRMHHPRSSVMRLYIPRKCGGRGFLNAKTLHNREVCSLREYFLKAEVGMHRDVVAVDKGLTPLSMAKENWHKPEVLTTDDRKEVWQGKELHGRFYRALHGPDVDFLASVSWLRFGDLFGETEGFVCAIMDEVMLTNNYRKYIMKDGTVDVCRACHLPGESIRHIISGCSRLANGEYLHRHNQVARIIHQQLALKYKLVESEVPYYKYVPDPVLEKDHVTLYWDRSIITDRTIVANKPDIVMIDRSARRVMIIDVTIPHDENLVKAEKEKQIKYLDLAHEVRDMWNMNSVIIVPIVVTANGLIAKSFDDHLSKLSLGGWIKGLIQKAVLLDTARIVRRFLSLQP

SEQ ID NO: 28789 - protein, 1199 aa, Xestia xanthographa
MITRAAARRAHLPTPDSSLSSASPPPDPGSPVSPVAAVASSSSDEYFSPPTSPPPVRRAGRGRPPKSLGLRGQQTPSRVPATGGCVQRMKWTQSMNENVMRAYYGSTEGGTNLTAYRVRMLSLFQGLEPTVNVSAQRLSDQVRVIQRSHRLDDAALDRLRSEVLSNLIVLTPTQTAVQVSAIDATPPRLNPVVVEEDDGVATVSSQCNDRLRSALENALHEYRSTPTELRPRLPRLPMHKKNRALVCALDSQLKNIFESSENLVDTHSILFCGAVAACRLANVKFPNCDVANRPKPAVPAWQRRIERRIDGARVLIGKLYCFREGNTRPRVMRFVRRAFSGTEISPQEYMSRVTERIDFLKQKVYAWANRIRRYKRRVDRYSQNRMFQSDERWVYRAWERPEQNMTDVCRPDDAATSSFWRSIWSVPVCHTEADWMRDVERVCEPIPEMEPIFITPLDVARAVRPLPNWKSPGPDGLHNFWLKWFSSSHTCLASQFQSSLESGSLPQFLTTGVTHLLHKSGSPAEPKNYRPITCLSTIYKLLTSILRVKINTHIDKNSIMSASQNGCRNGSRGTKELLLIDMAISQQVRRSRKDLSTCWIDYKKAYDSVPHTWLMRVLELYKIDTTLRTFLESCMGQWRTVLRYPGCRQIQGSDDPVWIKRGIFQGDSLSPLWFCLALNPLSTLLENSGLGCRLRKDGQVISHLLYMDDLKLFASNKLRLMELLKVTETFSNAIRMEFGVDKCAVMYVKRGEIMESEGLQLSDSIQLRSLSSSETYKYLGMSEALGINITDMKQSLKERFFSRLRKVLNSLLSGGNKVRAFNGWVMPVLMYSFGILKWTQTELDALDRRVRTLLTESRMHHPRSSVMRLYIPRKCGGRGFLNAKTLHNREVCSLREYFLKAEVGMHRDVVAVDKGLTPLSMAKENWHKPEVLTTDDRKEVWQGKELHGRFYRALHGPDVDFLASVSWLRFGDLFGETEGFVCAIMDEVMLTNNYRKYIMKDGTVDMCRACHLPGESIRHIISGCSRLANGEYLHRHNQVARIIHQQLALKYKLVESEVPYYKYVPDPVLESDHVTLYWDRSIITDRTIVANKPDIVMIDRSARRVMIIDVTIPHDENLVKAEKEKQIKYLDLAHEVRDMWNMNSVIIVPIVVTANGLIAKSFDNHLSKLSLGGWIKGLIQKAVLLDTARIVRRFLSLQP

SEQ ID NO: 28790 - protein, 1080 aa, Cosmia trapezina
MLSLFQELEPTVNVSAQRLSDQVRVIQRNHRLDDAALDRLRSEILSDRIVSTQAQTAVQDSIIDALPPRSNHVVEEEDDRVATVSSQSNDRLRSALEDAFREYRSTPTELRPRLPRLPMHKKNRALVCALDSHLKDFFESSEDLVDTHSILYCAAVAACRLANVKFPNCDGANQSKPAVPAWQCRIERRIDGARVLIGKLYCFREGNTRPRVMRFVRRAFSGTGISPPEYMSRVTERIDFLKQKVCAWASRIRRYKRRVDRYTQNRMFQSDERWVYRAWERPEQNVTDVCRPDDAATSAFWRSIWSVPVCHAEAGWMQDVERVCETIPEMETVLITPLDVARAVRPFPNWKSPGPDGLHNFWLKWLISSHTCLASQFQSSLESGSLPQFLTTGVTHLLHKSGSPVEPKNYRPITCLSTVYKLLTSILRAKINTHIASNSIISASQNGCRTGSRGTKELLLIDMAISQQVRRSRKDLSTCWIDYKKAYDSVPHTWLLKVLELYKIDATLRTFLESCMGQWRTVLRYPGCQQIRGSDEPVWIKRVIFQGDSLSPLWFCLALNPLSTLLEDSGLGYRLRRGGQVISHLLYMDDLKLFAPNELRLMELLKVTETFSGAIRMEFGVDKCAVMHVKRGEIMESEGIQLTDSIYLRSLSSSETYKYLGMSEALGINVADVKQSLKERFFGRLKKVLISLLSGGNKVRAFNGWVMPVLMYSFGILKWTQTELDALDRRVRTLLTANRMHHPRSSVMRLYIPRKCGGRGFLNAKTLHNREVCSLREYFLKADVGMHRDVVAVDKGLTPLSMAKENWRKPVLLTTDDRRKVWQSKELHGRFYRALHEPGVDFLASVSWLRFSDLFGETEGFVCAIMDEVILTNNYRRYIMKDGTVDVCRACHRPGESIRHIISGCSRLANGEYLHRHNQVARIIHQQLALKYKLVDSEVPYYKYVPDPVLENDHVTLYWDRSIITDRTIVANKPDIVVIDRLARRAMIVDVTIPHDGNLVKAEKEKQIKYLDLAHEVVDMWNVDSAVIVPIVVTANGLIADSLDQHLSRLSLGGWIKGQIQKAVLLDTARIVRRFLSLQP

SEQ ID NO: 28791 - protein, 1202 aa, Noctua fimbriata
MLTRAAARRARLPPPDPSLSSASPPPESSHIVSAVTPAVAVASSSSDEYFSPPTSPTPVRRQGRGRPPRSLGLRGHPAPSRVPAAGGCVQRMRWTHSINENVMRAYYGSTEGGTNLTAYRVGMLSLFQVLEPTINVSAQRLSDQVRVIQRNHMLDDAVVDRLRSEVLSNRIVFTPAQTAVQASVIDATPPRFNPAVVEEDDRVAVVSSQCNDRLRSALEDALREYRSTPTELRPRLPRLPMHNKNRALVCALDSQLKNLFESSENLVDTHSILYCGAVAACRLANVKFPNCDVATRPKPAVPAWQRRIERRIDGARVLIGKLHCFREGNTRPRVMRFVRRAFSGTGISPQEYMSRVTERIDFLKQKVYAWANRIRRYKRRVDRYSQNRMFQSDERWVYRAWERPDQNMTDVCRPDDAATSSFWRSIWSVPVCHTEADWMRDVEQVCEPIPEMEPILITPLDVARAVRPLPNWKSPGPDGLHNFWLKWLSSSHTCLASQFQSSLESGSLPQFLTTGVTHLLHKSGSPAEPKNYRPITCLSTVYKLLTSILRAKINTHIDKNSIMSASQNGCRNGSRGTKELLLIDMAISQQVRRSRKDLSTCWIDYKKAYDSVPHTWLMRVLELYKIDATLRAFLESCMGQWRTVLRYPGCRQIQGNDEPVWIKRGIFQGDSLSPLWFCLALNPLSTLLEDSGLGYRLRRGGQVISHLLYMDDLKLFAPNKLRLMELLKVTETFSSAIRMEFGVDKYAVMYVKQGEIMESEGIQLSDSIHLRTLSSTESYKYLGMSEALGINVTDMKQSLKERFFGRLNKVLHSLLSGGNKVRAFNGWVMPVLMYSFGVLKWTQTELDALDRRVRTLLTANRMHHPRSSVMRLYIPRKCGGRGFLNAKTLHNREICSLREYFLETDVGMHRDVVAVDKGLTPLSLAKENWRKPLVLDTNDRMEVWQSKELHGRFFRALHGPDVDLSASVAWLRCGDLFGETEGFVCAIMDEVMMTNNYRRFIVKDGTVDICRACHRPGESIRHIISGCSRLANGEYLHRHNLVARIIHQQLALKYNLVESEVPYYKYVPDPVLENGSITLYWDQSIITDRTIVANKPDIVVVDRSERRTMIVDITVPHDDNLVKAEKDKKIKYLELAREVVDMWDVDSAIIVPIVVSAHGLIAKRLDQYLRRLSLGSWIKGLIQKAVLLDTARIVRRFLSLEP

SEQ ID NO: 28792 - protein, 868 aa, Noctua fimbriata
MRFVRRAFSGTGISPQEYMSRVTERIDFLKQKVYAWANRIRRYKRRVDRYSQNRMFQSDERWVYRAWERPDQNMTDMCRPDDAATSSFWRSIWSVPVCHTEADWMRDVEQVCEPIPEMEPILITPLDVARAVRPLPNWKSPGPDGLHNFWLKWLSSSHTCLASQFQSSLESGSLPQFLTTGVTHLLHKSGSPAEPKNYRPITCLSTVYKLLTSILRAKINTHIDKNSIMSASQNGCRNGSRATKELLLIDMAISQQVRRSRKDLSTCWIDYKKAYDSVPHTWLMRVLELYKIDATLRAFLESCMGQWRTVLRYPGCRQIQGNDEPVWIKRGIFQGDSLSPLWFCLALNPLSTLLEDSGLGYRLRRGGQVISHLLYMDDLKLFAPNKLQLMELLKVTETFSSAIRMEFGVDKCAVMYVKQGEIMKSEGIQLSDSIHLRTLSSTESYKYLGMSEALGINVTDMKQSLKERFFGRLNKVLHSLLSGGNKVRAFNGWVMPVLMYSFGVLKWTQTELDALDRRVRTLLTANRMHHPRSSVMRLYIPRKCGGRGFLNAKSLHNREMCSLREYFLKVEVGMHRDVVAVDKGLTPLSMAKENWRKPEVLTTDDRKEVWQGKELHGRFYRALHGPDVDFLASVSWLRFGDLFGETEGFVCAIMDEVMLTNNYRKYIMKDGTVDVCRACHRPGESIRHIISGCSRLANGEYLHRHNQVARIIHQQLALKYKLVESEVPYYKYVPDPVLEKDHVTLYWDQSIITDRTIVANKPDIVVIDRSARRVMIVDVTIPHDENLVKAEKEKQIKYLDLAHEVVDMWNVNSAIIVPIVVTANGLIAKSLDDHLSKLSLGGWIKGLIQKAVLLDTARIVRRFLSLEP

SEQ ID NO: 28793 - protein, 1115 aa, Noctua fimbriata
MRWTHSINENVMRAYYGSTEGGTNLTAYRVGMLSLFQVLEPTINVSAQRLSDQVRVIQRNHMLDDAVLDRLRSEVLSNRIVFTPAQTAVQASVIDATPPRFNPAVVEEDDRVAVVSSQCNDRLRSALEDALREYRSTPTELRPRLPRLPMHNKNRALVCALDSQLKNLFESSENLVDTHSILYCAAVAACRLANVKFPNCDVATRPKPAVPAWQRRIECRIDGARVLIGKLHCFREGNTRPRVMRFVRRAFSGTGISPQEYMSRVTEHALCLRDFLKQKVYAWANRIRRYKRRVDRYSQNRMFQSDERWAYRAWERPDQNMTDMCRPDDAATSSFWRSIWSVPVCHTEADWMRDVEQVCEPIPEMEPILITPLDVARAVRPLPNWKSPGPDGLHNFWLKWLSSSHTCLASQFQSSLESGSLPQFLTTGVTHLLHKSGSPAEPKNYRPITCLSTVYKLLTSILRAKINTHIDKNSIMSASQNGCRNGSRATKELLLIDMAISQQVRRSRKDLSTCWIDYKKAYDSVPHTWLMRVLELYKIDATLRAFLESCMGQWRTVLRYPGCRQIQGNDEPVWIKRGIFQGDSLSPLWFCLALNPLSTLLEDSGLGYRLRRGGQVISHLLYMDDLKLFAPNKLQLMELLKVTETFSSAIRMEFGVDKCAVMYVKQGEIMESEGIQLSDSIHLRTLSSTESYKYLGMSEALGINVTDMKQSLKERFFGRLNKVLHSLLSGGNKVRAFNGWVMPVLMYSFGVLKWTQTELDALDRRVRTLLTANRMHHPRSSVMRLYIPRKCGGRGFINAKSLHNREMCSLREYFLKVEVGMHRDVVAVDKGLTPLSMAKENWRKPEVLTTDDRKEVWQGKELHGRFYRALHGPDVDFLASVSWLRFGDLFGETEGFVCAIMDEVMLTNNYRKYIMKDGTVDVCRACHRPGESIRHIISGCSRLANGEYLHRHNQVARIIHQQLALKYKLVESEVPYYKYVPDPVLEKDHVTLYWDQSIITDRTIVANKPDIVVIDRSARRVMIVDVTIPHDENLVKAEKEKQIKYLDLAREVVDMWNVNSAIIVPIVVTANGLIAKSLDDHLSKLSLGGWIKGLIQKAVLLDTARIVRRFLSLEP

SEQ ID NO: 28794 - protein, 1202 aa, Noctua fimbriata
MITRAASRRARLPPPDQSLSSASPPPESSPIVSAVTPAVAVASSSSDEYFSPPTSPTPVRRQGRGRPPRSLGLRGHPAPSRVPAAGGCVQRMRWTHSINENVMRAYYGSTEGGTNLTAYRVGMLSLFQVLEPTINVSAQRLSDQVRVIQRNHMLDDAVLDRLRSEVLSNRIVFTPAQTAVQASVIDATPPRFNPAVVEEDDRVAVVSSQCNDRLRSALEDALREYRSTPTELRPRLPRLPMHNKNRALVCALDSQLKNLFESSENLVDTHSILYCGAVAACRLANVKFPNCDVATRPKPAVPAWQRRIECRIDGARVLIGKLHCFREGNTRPRVMRFVRRAFSGTGISPQEYMSRVTERIDFLKQKVYAWANRIRRYKRRVDRYSQNRMFQSDERWVYRAWERPDQNMTDMCRPDDAATSSFWRSIWSVPVCHTEADWMRDVEQVCEPIPEMEPILITPLDVARAVRPLPNWKSPGPDGLHNFWLKWLSSSHTCLASQFQSSLESGSLPQFLTTGVTHLLHKSGSPAEPKNYRPITCLSTVYKLLTSILRAKINTHIDKNSIMSASQNGCRNGSRATKELLLIDMAISQQVRRSRKDLSTCWIDYKKAYDSVPHTWLMRVLELYKIDATLRAFLESCMGQWRTVLRYPGCRQIQGNDEPVWIKRGIFQGDSLSPLWFCLALNPLSTLLEDSGLGYRLRRGGQVISHLLYMDDLKLFAPNKLQLMELLKVTETFSSAIRMEFGVDKCAVMYVKQGEIMESEGIQLSDSIHLRTLSSTESYKYLGMSEALGINVTDMKQSLKERFFGRLNKVLHSLLSGGNKVRAFNGWVMPVLMYSFGVLKWTQTELDALDRRVRTLLTANRMHHPRSSVMRLYIPRKCGGRGFLNAKSLHNREMCSLREYFLKVEVGMHRDVVAVDKGLTPLSMAKENWRKPEVLTTDDRKEVWQGKELHGRFYRALHGPDVDFLASVSWLRFGDLFGETEGFVCAIMDEVMLTNNYRKYIMKDGTVDVCRACHRPGESIRHIISGCSRLANGEYLHRHNQVARIIHQQLALKYKLVESEVPYYKYVPDPVLEKDHVTLYWDQSIITDRTIVANKPDIVVIDRSARRVMIVDVTIPHDENLVKAEKEKQIKYLDLAHEVVDMWNVNSAIIVPIVVTANGLIAKSLDDHLSKLSLGSWIKGLIQKAVLLDTARIVRRFLSLEP

SEQ ID NO: 28795 - protein, 1202 aa, Noctua fimbriata
MITRAASRRARLPPPDQSLSSASPPPESSPIVSAVTPAVAVASSSSDEYFSPPTSPTPVRRQGRGRPPRSLGLRGHPAPSRVPAAGGCVQRMRWTHSINENVMRAYYGSTEGGTNLTAYRVGMLSLFQVLEPTINVSAQRLSDQVRVIQRNHMLNDAVLDRLRSEVLSNRIVLTPAQTAVQASVIDATPPRFNPAVVEEDDRVAVVSSQCNDRLRSALEDALREYRSTPTELRPRLPRLPMHNKNRALVCALDSQLKNLFESSENLVDTHSILYCGAVAACRLANVKFPNCDVATRPKPAVPAWQRRIECRIDGARVLIGKLHCFREGNTRPRVMRFVRRAFSGTGISPQEYMSRVTERIDFLKQKVYAWANRIRRYKRRVDRYSQNRMFQSDERWVYRAWERPDQNMTDMCRPDDAATSSFWRSIWSVPVCHTEADWMRDVEQVCEPIPEMEPILITPLDVARAVRPLPNWKSPGPDGLHNFWLKWLSSSHTCLASQFQSSLESGSLPQFLTTGVTRLLHKSGSPAEPKNYRPITCLSTVYKLLTSILRAKINTHIDKNSIMSASQNGCRNGSRGTKELLLIDMAISQQVRRSRKDLSTCWIDYKKAYDSLPHTWLMRVLELYKIDATLRAFLESCMGQWRTVLRYPGCRQIQGNDEPVWIKRGIFQGDSLSPLWFCLALNPLSTLLEDSGLGYRLRRGGQVISHLLYMDDLKLFAPNKLQLMELLKVTETFSSAIRMEFGVDKCAVMYVKQGEIMESEGIQLSDSIHLRTLSSTESYKYLGMSEALGINVTDMKQSLKERFFGRLNKVLHSLLSGGNKVRAFNGWVMPVLMYSFGVLKWTQTELDALDRRVRTLLTANRMHHPRSSVMRLYIPRKCGGRGFLNAKSLHNREMCSLREYFLKVEVGMHRDVVAVDKGLTPLSMAKENWRKLEVLTTDDRKEVWQGKELHGRFYRALHGPDVDFLASVSWLRFGDLFGETEGFVCAIMDEVMLTNNYRKYIMKDGTVDVCRACHRPGESIRHIISGCSRLANGEYLHRHNQVARIIHQQLALKYKLVESEVPYYKYVPDPVLEKDHVTLYWDQSIITDRTIVANKPDIVVIDRSARRVMIVDVTIPHDENLVKAEKEKQIKYLDLAHEVVDMWNVNSAIIVPIVVTANGLIAKSLDDHLSKLSLGGWIKGLIQKAVLLDTARIVRRFLSLEP

SEQ ID NO: 28796 - protein, 962 aa, Noctua fimbriata
MHNKNRALVCALDSQLENIFESSENLVDTHSILYCGAVAACRLANVKFPNCDVATRPKPAVPAWQRRIERRIDGARVLIGKLHCFREGNTRPRVMRFVRRAFSGTGISPQEYMSRVTERIDFLKQKVYAWANRIRRYKRRVDRYSQNRMFQSDERWVYRAWERPELNMTDVCRPDDAATSSFWRSIWSVPVCHTEADWMRDVERVCEPIPEMEPILITPLDIARAVRPLPNWKSPGPDGLHNFWLKWLSSSHTCLASQFQSSLESGSLPQFLTTGVTHLLHKSGSPAEPKNYRPITCLSTVYKLLTSILRAKINTHIDKNSIMSASQNGCRSGSRGTKELLLIDMAISQQVRRSRKDLSTCWIDYKKAYDSVPHTWLMRVLELYKIDATLRAFLESCMGQWRTVLRYPGCGQIQGNDEPVWIKRGIFQGDSLSPLWFCLALNPLSTLLEDSGLGYRLRRGGQVISHLLYMDDLKLFAPNKLQLMELLKVTETFSSAIRMEFGVDKCAVMYVKQGEIMESEGIQLSDSIHLRTLSSTESYKYLGMSEALGINVTDMKQSLKERFFGRLNKVLHSLLSGGNKVRAFNGWVMPVLMYSFGVLKWTQTELDALDRRVRTLLTANRMHHPRSSVMRLYIPRKCGGRGFLNAKSLHNREMCSLREYFLKVEVGMHRDVVAVDKGLTPLSMAKENWRKPEVLTTDDRKEVWQGKELHGRFYRALHGPDVDFLASVSWLRFGDLFGETEGFVCAIMDEVMLTNNYRKYIMKDGTVDVCRACHRPGESIRHIISGCSRLANGEYLHRHNQVARIIHQQLALKYKLVESEVPYYKYVPDPVLEKDHVTLYWDQSIITDRTIVANKPDIVVIDRSARRVMIVDVTIPHDENLVKAEKEKQIKYLDLAHEVVDMWNVNSAIIVPIVVTANGLIAKSLDDHLSKLSLGGWIKGLIQKAVLLDTARIVRRFLSLEP

SEQ ID NO: 28797 - protein, 1016 aa, Noctua fimbriata
MGNKRFNPAVVEEDDRVAVVSSQCNDRLRSALEDALREYRSTPTELRPRLPRLPMHNKNRALVCALDSQLKNLFESSENLVDTHSILYCGAVAACRLANVKFPNCDVATRPKPAVPAWQRRIECRIDGARVLIGKLHCFREGNTRPRVMRFVRRAFSGTGISPQEYMSRVTERIDFLKQKVYAWANRIRRYKRRVDRYSQNRMFQSDERWVYRAWERPDQNMTDMCRPDDAATSSFWRSIWSVPVCHTEADWMRDVEQVCEPIPEMEPILITPLDVARAVRPLPNWKSPGPDGLHNFWLKWLSSSHTCLASQFQSSLESGSLPQFLTTGVTHLLHKSGSPVEPKNYRPITCLSTIYKLLTSILRAKINTHIDKNSIMSASQNGCRNGSRATKELLLIDMAISQQVRRSRKDLSTCWIDYKKAYDSVPHTWLMRVLELYKIDATLRAFLESCMGQWRTVLRYPGCRQIQGNDEPVWIKRGIFQGDSLSPLWFCLALNPLSTLLEDSGLGYRLRRGGQVISHLLYMDDLKLFAPNKLQLMELLKVTETFSSAIRMEFGVDKCAVMYVKQGEIMESEGIQLSDSIHLGTLSSTESYKYLGMSEALGINVTDMKQSLKERFFGRLNKVLHSLLSGGNKVRAFNGWVMPVLMYSFGVLKWTQTELDALDRRVRTLLTANRMHHPRSSVMRLYIPRKCGGRGFLNAKSLHNREMCSLREYFLKVEVGMHRDVVAVDKGLTPLSMAKENWRKPEVLTTDDRKEVWQGKELHGRFYRALHGPDVDFLASVSWLRFGDLFGETEGFVCAIMDEVMLTNNYRKYIMKDGTVDVCRACHRPGESIRHIISGCSRLANGEYLHRHNQVARIIHQQLALKYKLVESEVPYYKYVPDPVLEKDHVTLYWDQSIITDRTIVANKPDIVVIDRSARRVMIVDVTIPHDENLVKAEKEKQIKYLDLAHEVVDMWNVNSAIIVPIVVTANGLIAKSLDDHLSKLSLGGWIKGLIQKAVLLDTARIVRRFLSLEP

SEQ ID NO: 28798 - protein, 1202 aa, Noctua fimbriata
MITRAASRRARLPPPDQSLSSASPPPESSPIVSAVTPAVAVASSSSDEYFSPPTSPTPVRRQGRGRPPRSLGLRGHPAPSRVPAAGGCVQRMRWTHSINENVMRAYYGSTEGGTNLTAYRVGMLSLFQVLEPTINVSAQRLSDQVRVIQRNHMLDDAVLDRLRSEVLSNRIVFTPAQTAVQASVIDATPPRFNPAVVEEDDRVAVVSSQCNDRLRSALEDALREYRSTPTELRPRLPRLPMHNKNRALVCALDSQLKNLFESSENLVDTHSILYCGAVAACRLANVKFPNCDVATRPKPAVPAWQRRIECRIDGARVLIGKLHCFREGNTRPRVMRFVRRAFSGTGISPQEYMSRVTERIDFLKQKVYAWANRIRRYKRRVDRYSQNRMFQSDERWVYRAWERPDQNMTDMCRPDDAATSSFWRSIWSVPVCHTEADWMRDVEQVCEPIPEMEPILITPLDVARAVRPLPNWKSPGPDGLHNFWLKWLSSSHTCLASQFQSSLESGSLPQFLTTGVTHLLHKSGSPAEPKNYRPITCLSTVYKLLTSILRAKINTHIDKNSIMSASQNGCRNGSRATKELLLIDMAISQQVRRSRKDLSTCWIDYKKAYDSVPHTWLMRVLELYKIDATLRAFLESCMGQWRTVLRYPGCRQIQGNDEPVWIKRGIFQGDSLSPLWFCLALNPLSTLLEDSGLGYRLRRGGQVISHLLYMDDLKLFAPNKLQLMELLKVTETFSSAIRMEFGVDKCAVMYVKQGEIMKSEGIQLSDSIHLRTLSSTESYKYLGMSEALGINVTDMKQSLKERFFGRLNKVLHSLLSGGNKVRAFNGWVMPVLMYSFGVLKWTQTELDALDRRVRTLLTANRMHHPRSSVMRLYIPRKCGGRGFLNAKSLHNREMCSLREYFLKVEVGMHRDVVAVDKGLTPLSMAKENWRKPEVLTTDDRKEVWQGKELHGRFYRALHGPDVDFLASVSWLRFGDLFGETEGFVCAIMDEVMLTNNYRKYIMKDGTVDVCRACHRPGESIRHIISGCSRLANGEYLHRHNQVARIIHQQLALKYKLVESEVPYYKYVPDPVLEKDHVTLYWDQSIITDRTIVANKPDIVVIDRSARRVMIVDVTIPHDENLVKAEKEKQIKYLDLAHEVVDMWNVNSAIIVPIVVTANGLIAKSLDDHLSKLSLGGWIKGLIQKAVLLDTARIVRRFLSLEP

SEQ ID NO: 28799 - protein, 1202 aa, Noctua fimbriata
MLTRAAARRARLPPPDPSLSSASPPPESSHIVSAVTPAVAVASSSSDEYFSPPTSPTPVRRQGRGRPPRSLGLRGHPAPSRVPAAGGCVQRMRWTHSINENVMRAYYGSTEGGTNLTAYRVGMLSLFQVLEPTVNVSAQRLSDQVRVIQRNHMLDDAVLDRLRSEVLSNRIVLTPAQTAVQASVIDATPPRFNPAVVEEDDRVAVVSSQCNDRLRSALEDALREYRSTPTELRPRLPRLPMHNKNKALVCALDSQLENIFESSENLVDTHSILYCGAVAACRLANVKFPNCDVATRPKPAVPAWQRRIERRIDGARVLIGKLHCFREGNTRPRVMRFVRRAFSGTGISPQEYMSRATERIDFLKQKVYAWANRIRRYKRRVDRYSQNRMFQSDERWVYRAWERPELNMTDVCRPDDAATSSFWRSIWSVPVCHTEADWMCDVERVCEPIPEMEPILITPLDIARAVRPLPNWKSPGPDGLHNFWLKWLSSSHTCLASQFQSSLESGSLPQFLTTGVTHLLHKSGSPAEPKNYRPITCLSTVYKLLTSILRAKINTHIDKNSIMSASQNGCRNGSRGTKELLLIDMAISQQVRRSRKDLSTCWIDYKKAYDSVPHTWLMRVLELYKIDATLRAFLESCMGQWRTVLRYPGCRQIQGNDEPVWIKRGIFQGDSLSPLWFCLALNPLSTLLEDSGLGYRLRRGGQVISHLLYMDDLKLFAPNELRLMELLKVTETFSSAIRMEFGVDKCAVMYVKQGEIMESEGIQLSDSIHLRTLSSTESYKYLGMSEALGINVTDMKQSLKERFFGRLNKVLHSLLSGGNKVRAFNGWVMPVLMYSFGVLKWTQTELDALDRRVRTLLTANRMHHPRSSVMRLYIPRKCGGRGFLNAKSLHNREMCSLREYFLKVEVGMHRDVVAVDKGLTPLSMAKENWRKPEVLTTDDRKEVWQGKELHGRFYRALHGPDVDFLASVSWLRFGDLFGETEGFVCAIMDEVMLTNNYRKYIMKDGTVDVCRACHRPGESIRHIISGCSRLANGEYLHRHNQVARIIHQQLALKYKLVESEVPYYKYVPDPVLEKDHVTLYWDQSIITDRTIVANKPDIVVIDRSARRVMIVDVTIPHDENLVKAEKEKQIKYLDLAHEVVDMWNVNSAIIVPIVVTANGLIAKSLDDHLSRLSLGGWIKGLIQKAVLLDTARIVRRFLSLEP

SEQ ID NO: 28800 - protein, 996 aa, Noctua fimbriata
MHNKNRALVCALDSQLKNIFESSENLVDTHSILYCGAVAACRLANVKFPNCDVATRPKPAVPAWQRRIERRIDGARVLIGKLHCFREGNTRPRVMRFVRRAFSGTGISPQEYMSRITERIDFLKQKVYAWANRIRRYKRRVDRYSQNRMFQSDERWVYRAWERPELNMTDACLPDDAAISYFWRSIWSVPVCHTEADWMRDVERVCEPIPEMEPILITPLDIARAVRPLPNWKSPGPDGLHNFWLKWLSSSHTCLASQFQSSLESGSLPQFLTTGVTHLLHKSGSPAEPKNYRPITCLSTVYKLLTSILRAKINTHINKNSIMSASQNGCRNGSRGTKELLLIDMAISQQVRRSRKDLSTCWIDYKKAYDSVPHTWLMRVLELYKIDATLRAFLESCMGQWRTVLRYPGCRQIQGNDEPVWIKRGIFQGDNLSPLWFCLALNPLSTLLEVSGLSYRLRRGGQVISHLLYMDDLKLFAPNKLRLMELLKVTETFSSAIRIEFGVDKCAVMYVKRGEIMESEGIQLSDSIHLRSLSSTESYKYLGMSEALGINVTDMKQSLKERFFGRLNKVLHSLLSGGNKVRAFNGRVMPVLMYSFGVLKWTQTELDALDRRVRTLLTANRMHHPRSSVMRLYIPRKCGGRKFLNAKSLHNREMCSLREYFLKAEVGMHRDVVAVDKGLTPLSMAKENWRKPVVVTTDDRKEIWQGKELHGRFYRALHGPDVDFLASVSWLRFGDLFGETEGFVCAIMDEVMLTNNYRKYIMKDGTVDVCRACHYPGESIRHIISGCSRLANGEYLHRHNQVARIIIHQQLALKYKLVESEVPYYKYVPDPVLEKDHVTFYWDQSIITDRTIVTNKPDIVVVDRSARRVMIVDVTIPHDENLVKAEKEKQIKNLDLAHEVVDMWNVNSAIIVPIVVTAKGLIAKSLERRPSFEALLRRLDQGPDSEGSTPRYGSYCEEVPVSGALTTGSLDPAPATGGPLFFIFFNVFYMFFLRNV

SEQ ID NO: 28801 - protein, 1202 aa, Atethmia centrago
MLTRSAARARPPPPDSSLSSASPPPVPSPTVSAVTTPAAVVASSSSDEYFSPPTSPTPVRRQGRGRPPKSLGLRGQLAPSRVPAAGGCVQRMRWTQSMNENVMRAYYGSTEGGTNLTAYRVRMLSLFQKLEPTVNVSAQRLSDQVRVIQHNHRLDDAALDRLRSEVLSNHIVSTPAQTAIHAPIINAIPPRSNHDVEEEDDRVATVSSQCNVRLRSALEDAFREYRSTPTELRPRLPRLPMHKKNRALVCALDSLLKDFFESSEDLVDTHSILYCAAVAACRLANVKFPNCDGATLPKPAVPAWQCRIERRIDGARVLIGKLYCFREGNTRPRVMRFVRRAFSGTGISPREYMSHVTERIDFLKQKVCAWASRIRRYKRRVDRYTQNRMFQSDERWVYRSWERPEQNETDVCRPDDATTTAFWRSIWSVPVCHAEADWMRDVERVCETIPEMEIVIITPSDIARAVRPLPNWKSPGPDGLHNFWLKWLTSSHTCLASQFQSSLESGSLPQFLTTGITHLLHKSGSPAEPKNYRPITCLSTVYKLFTSILRAKINTHIDSNSIMSASQNGCRNGSRGTKELLLIDMAISQQVRRFRKDLSTCWIDYKKAYDSVPHTWLMRVLELYKIDTTLRTFLESCMGQWRTVLRYPGCRQIQGNDEPVWIKRGIFQGDSLSPLWFCLALNPLSTLLEDSGLGYRLRRGGQVISHLLYMDDLKIFAPNKLQLMELLKVTETFSSAIRMEFGVDKCAVMHVKRGEIMESEGIQLSDPIHLRSLSSPESYKYLGMSEALGINVTDMKQSLKERFFGRLKKVLISPLSGGNKVRAFNGWVMPVLMYSFGILKWTQTELDALDRRVRTLLTANRMHHPRSSVMRLYIPRKCGGRGFLNAKTLHNREICSLREYFLKTEVGMHRDVVAVDKGLTPLSMAKENWCKPVILTTDDRREIWQNKELHGRFYRALHEPDVDFLASVSWLRFGDLFGETEGFVCAIMDEVILTNNYRRHIMKDGTVDVCRACHRPGESIRHIISGCSRLANGEYLHRHNQVARIIHQQLALKYKLVNSEVPYYKYAPDPVLENDHVTLYWDRSIITDRTIVANKPDIVVIDRLARRAMIVDVTIPHDENLVKAEKEKQIKYLDLAHEVVDMWNVDSAVIVPIVVTANGLMAESLNHHLSRLSLDGWIKGLIQKAVLLDTARIVRRFLSLES

SEQ ID NO: 28802 - protein, 1080 aa, Atethmia centrago
MLSLFQELEPTVNVSAQRLSDQVRVIQRNRRLDDATLDRLRSEVLSNYIISTPAQTAVHTPIIDVIPPRSNHGVEEEDDRAATVSSQCNVRLRSALEDAFREYRSTPTELRPRLPRLPMHKKNRALMCALDSQLKVFFESSEDLVDTHSILYCAAVAACRLANVKFPNSDGATRPKPAVPAWQCRIERRIDKARVLIGKLYCFREGNTRPRVMRFVRRAFSGTGISPREYMSHITERIDFLKQKVCAWASRIRRYKRRVDRYTQNRMFQSDERWVYRAWERPKQNVTDVCRPDDATTTAFWRSIWSVPVCHVEADWMRDVERVCETKPEMEVVIITPSDIARAVRPLPNWKSPGPDGLHNFWLKWLTSSHTCLASQFQSSLESGSLPQFMTTGITHLLHKSGSPAEPKNYRPITCLSTVYKLLTSILRAKINTHIDSNSIMSASQNGCRNGSRGTKELLLIDMAISQQVRRSRKDLSTCWIDYKKAYDSVPHTWLMRVLELYKIDTTLRTFLESCMGQWRTVLRYPGCRQIQGNDEPVWIKRGIFQGDSLSPLWFCLALNPLSMQLEDSGLGYRLRRGGQIISHLLYMDDLKIFAPNKLQLMKLLKVTETFSSAIRMEFGVDKCAVMHVKRGEIMESEGIQLSDSIHLRSLSSPESYKYLGMSEALGINVTDMKQSLKERFFGRLKKVLISLLSGGNKVRAFNSWVMPVLTYSFGILKWTQTELDALDRRVRTLLTANRMHHPRSSVMRLYIPRKCGGRGFLNAKTLHNREICSLREYFLKTEVGMHRDVVAVDKGLTPLSMAKENWCKPVVLTTDDRKEIWQSKELHGRFYRALHEPDVDFLASVSWLRFGDLFGETEGFVCAIMDEVILTNNYRRHIMKDGTVDVCRACHRPGESIRHIISGCSRLANGEYLHRHNQVARIIHQQLALKYKLVNSEVPYYKYVPDPVLENDHVTLYWDRSIITDRTIVANKPDIVVIDRLARRAMIVDVTIPHDDNLVKAEKEKQIKYLDLAHEVVDMWNVNSAVIVPIVVTANGLMARSLNHHLSRLALDGWIKGLIQKAVLLDTARIVRRFLSLEP

SEQ ID NO: 28803 - protein, 1202 aa, Atethmia centrago
MLTRSAARARPPPPDSLLSSASPPPVPSPTVSAVTTPAAVVASSSSDEYFSPPTSPTPVRRQGRGRPPKSLGLRGQLAPSRVPAAGGCVQRMRWTQSMNENVMRAYYGSTEGGTNLTAYRVRMLSLFQKLEPTVNVSAQRLSDQVRVIQRNHRLDDAALDRLRSEVLNNHIVSTPAQTATHAPIINAIPPRSNHDVEEEDDRVATVSSQCNVRLRSALEDAFREYRSTPTELRPRLPRLPMHKKNRALVCTLDSLLKDFFESSEDLVDTHSILYCAAVAACRLANVKFPNCDGATRPKPAVPAWQCRIERRIDGARVLIGKLYCFREGNTRPRVMRFVRRAFSGTGISPREYMSRVTERINFLKQKVCAWASRIRRYKRRVDRYTQNRMFQSDERWVYRAWERPEQNETDVCRPDDATTTAFWRSIWSVPVWHAEADWMRDVERVCETIPEMEVVIITPSDIARAVRPLPNWKSPGPDGLHNFWLKWLTSSHTCLASQFQSSLESGSLPQFLTTGITHLLHKSGSPAEPKNYRPITCLSTVYKLLTSILRAKINTHIDSNSIMSASQNGCRNGSRGTKELLLIDMAISQEVRRFRKDLSTCWIDYKKAYDSVPHTWLMRVLEFYKIDTTLRTFLESCMGQWRTVLRYPGCRQIQGNDEPVWIKRGIFQGDSLSPLWFCLALNPLSTLLEDSGLGYRLRRGGQVISHLLYMDDLKIFAPNKLQLMELLKVTETFSSAIRMEFGVDKCAIMHVKRGEIMESEGIQLSDSIHLRSLSSPESYKYLGMSEALGINVTDMKQSLKERFFGRLKKVLISPLSGGNKVRAFNGWVMPVLMYSFGILKWAQTELDALDRRVRTLLTANRMHHPRSSVMRLYIPRKCGGRGFLNAKTLHNREICSLREYFLKTEVGMHRDVVAVDKGLTPLSMAKENWCKPVILTTDDRKEIWQNKELHGRFYRALHEPDVDFLASVSWLRFGDLFGETEGFVCAIMDEVILTNNYRRHIMKDGTVDVCRACHRPGESIRHIISGCSRLANGEYLHRHNQVARIIHQQLALKYKLVNSEVPYYKYAPDPVLENDHVTLYWDRSIITDRTIVANKPDIVVIDRLARRAMIVDVTIPHDENLVKAEKEKQIKYLDLAHEVVDMWNVDSAVIVPIVVTANGLMAESLNHHLSRLSLGGWIKGLIQKAVLLDTARIVRRFLSLES

SEQ ID NO: 28804 - protein, 1202 aa, Atethmia centrago
MLTRSAARARPPPPDSSLSSASPPPVPSPTVSAVTTPAAVVALSSSDEYFSPPTSPTPVRRQGRGRPPKSLGLRGQLAPSRVPAAGGCVQRMRWTQSMNENVMRAYYGSTEGGTNLTAYRVRMLSLFQELEPTVNVSAQRLSDQVRVIQRNHRLDDAALDRLRSEVLSNHIVSTPAQTATHAPIIDAIPPRSNHDVEEEDDRVATVSSQCNVRLRSALEDAFREYRSTPTELRPRLPRLPMHKKNRALVCALDSLLKDFFESSEDLVDTHSILYCAAVAACRLANVKFPNCDEATRPKPAVPAWQYRIERRIDGARVLISKLYCFREGNTRPRVMRFVRRAFSGTGISPREYMSRVTERIDFLKQKVCAWASRIRRYKRRVDRYTQNRMFQSDERWVYRAWERPEQNETDMCRPDDATTTAFWRSIWSEPVCHAEADWMRDVERVCETIPEMEVVVITPSDIARAVRPLPNWKSPGPDGLHNFWLKWLTSSHTYLASQFQSSLESGSLPQFLTTGITHLLHKSGSPAEPKNYRPITCLSTVYKLLTSILRAKINTHIDSNSIMSASQNGCRNGSRGTKELLLIDMAISQQVRRSRKDLSTCWIDYKKAYDSVPHTWLMKVLELYKIDTTLRTFLESCMGQWRTVLRYPGCRRIQGNDEPVWIKRGIFQGDSLSPLWFCLALNPLSTLLEDSGLGYRLRRGGQVISHLLYMDDLKIFAPNKLRLMELLKVTETFSGAIRMEFGVDKCAVMHVKRGEIMESEGIQLSDSIYLRSLSSPESYKYLGMSEALGINVTDMKQLLKERFFGRLKKVLISLLSGGNKVRAFNGWVMPVLMYSFGILKWTQTELDALDRRVRTLLTANRMHHPRSSVMRLYIPRKCGGRGFLNAKTLHNREICSLREYFLKAEVGMHRDVVAVDKGLTPLSMAKENWCKPVVLTTDDRKEIWQNKELHGRFYRALHEPDVDFLASVSWLRFGDLFGETEGFVCAIMDEVILTNNYRRHIMKDGTVDVCRACHRPGESIRHIISGCSRLANGEYLHRHNQVARIIHQQLALKYKLVNSEVPYYKYVPDPVLENDHVTLYWDRSIITDRTIVANKPDIVVIDRLARRAMIVDVTIPHDDNLVKAEKEKQIKYLDLAHEVVDMWNVNSAVIVPIVVTANGLMAESLNHHLSRLSLGGWIKGLIQKAVLLDTARIVRRFLSLEP

SEQ ID NO: 28805 - protein, 1117 aa, Atethmia centrago
MRCVQRMRWTQSMNENVMRAYYGSTEGGTNLTAYRVRMLSLFQELEPTVNVSAQRLSDQVRVIQRNRRLDDATLDRLRSEVLSNYIISTPAQTAVHTPIIDVIPPRSNHGVEEEDDRAATVSSQCNVRLRSALEDAFCEYRSTPTELRPRLPRLPMHKKNRALMCALDSQLKVFFESSEDLVDTHSILYCAAVAACRLANVKFPNSDGATRPKPAVPAWQCRIERRIDKARVLIGKLYCFREGNTRPRVMRFVRRAFSGTGISPREYMSHITERIDFLKQKVCAWASRIRRYKRRVDRYTQNRMFQSDERWVYRAWERPKQNVTDVCRPDDATTTAFWRSIWSVPVCHVEADWMRDVERVCETIPEMEVVIITPSDIARAVRPLPNWKSPGPDGLHNFWLKWLTSSHTCLASQFQSSLESGSLPQFMTTGITHLLHKSGSPAEPKNYRPITCLSTVYKLLTSILRAKINTHIDSNSIMSASQNGCRNGSRGTKELLLIDMAISQQFRRSRKDLSTCWIDYKKAYDSVPHTWLMRVLELYKIDTTLRTFLESCMGQWRTVLRYPGCRQIQGNDEPVWIKRGIFQGDSLSPLWFCLALNPLSMQLEDSGLGYRLRRGGQIISHLLYMDDLKIFAPNKLQLMKLLKVTETFSSAIRMEFGVDKCAVMHVKRGKIMESEGIQLSDSIHLRSLSSPESYKYLGMSEALGINVTDMKQSLKERFFGRLKKVLISLLSGGNKVRAFNSWVMPVLTYSFGILKWTQTELDALDRKVRTLLTANRMHHPRSSVMRLYIPRKCGGRGFLNAKTLHNREICSLREYFLKTEVGMHRDVVAVDEGLTPLSMAKENWCKPVVLTTDDRKEIWQSKELHGRFYRALHEPDVDFLASVSWLRFGDLFGETEGFVCAIMDEVILTNNYRRHIMKDGTVDVCRACHRPGESIRHIISGCSRLANGEYLHRHNQVARIIHQQLALKYKLVNSEVPYYKYVPDPVLENDHVTLYWDRSIITDRTIVANKPDIVVIDRLARRAMIVDVTIPHDDNLVKAEKEKQIKYLDLAHEVVDMWNVNSAVIVPIVVTANGLMARSLNHHLSRLALDGWIKGLIQKAVLLDTARIVRRFLSLEP

SEQ ID NO: 28806 - protein, 1203 aa, Atethmia centrago
MLTTSAARARPPPPDSSLSSASPPPVPSPTVSAVTTPAAVVASSSSDEYFSPPTSPIPVRRQGRGRPPKSLGLRGQLAPSRVPAAGGCVQRMRWTQSMNENVMRAYYGSTEGGTNLTAYRVRMLSLFQKLEPTVNVSAQRLSDQVRVIQRNHRLDDAALDRLRSEVLSNHIVSTPAQTATHAPIINAIPPRSNHDVEEEDDRVATVSSQCNVRLRSALEDAFREYRSTPTELRPRLPRLPMHKKNRALVCTLDSLLKDFFESSEDLVDTHSILYCAAVAACRLANVKFPNCDGATRPKPAVPAWQCRIERRIDGARVLIGKLYCFREGNTRPRVMRFVRRAFSGTGISPREYMSRVTERIDFLKQKVCAWASRIRRYKRRVDRYTQNRMFQSDERWVYRAWERPEQNETDVCRPDDATTTAFWRSIWSVPVCHAEADWMRDVERVCETIPEMDVVIITPSDIARAVRPLPNWKSPGPDGLHNFWLKWLTSSHTCLASQFQSSLESGSLPQFLTTGITHLLHKSGSPAEPKNYRPITCLSTVYKLLTSILRAKINTHIDSNSIMSASQNGCRNGSRGTKELLLIDMAISQQVRRFRKDLSTCWIDYKKAYDSVPHTWLMRVLEFYKIDTTLRTFLESCMGQWRTVLRYPGCRQIQGNDEPVWIKRGIFQGDSLSPLWFCLALNPLSTLLEDSGLGYRLRRGGQVISHLLYMDDLKIFAPNKLQLMELLKVTETFSSAIRMEFGVDKCAVMHVKRGEIMESEGIQLSDSIHLRSLSSPESYKYLGMSEALGINVTDMKQSLKERFFGRLKKVLISPLSGGNKVRAFNGWVMPVLMYSFGILKWTQTELDALDRRVRTLLTANRMHHPRSSVMRLYIPRKCGGRGFLNAKTLHNREICSLREYFLKTEVGMHRDVVAVDKGLTPLSMAKENWCKPVILTTDDRKEIWQNKELHGRFYRALHEPDVDFLASVSWLRFGDLFGETEGFVCAIMDEVILTNNYRRHIMKDGTVDVCRACHRPGESIRHNIISGCSRLANGEYLHRHNQVARIIHQQLALKYKLVNSEVPYYKYAPDPVLENDHVTLYWDRSIITDRTIVANKPDIVVIDRLARRAMIVDVTIPHDENLVKAEKEKQIKYLDLAHEVVDMWNVDSAVIVPIVVTANGLMAESLNHHLSRLSLGGWIKGLIQKAVLLDTARIVRRFLSLES

SEQ ID NO: 28807 - protein, 1201 aa, Mesoligia furuncula
MLTRLAARRAHLPPPDSSLSSAPPPPEPSPIESAVTPAVAVASSSSDEYFSPPTSPTPVRRQGRGRPPNSLGLRGHPAPSRVPATGGCVQRMRWTQSMNENVIRAYYGSTEGGINLTAYRDRMLSLFQELEPTVNVSAQRLSDQVRVIQRNHRLDDIALDRLRSEVLSNHIVTTSAQTAAQASTVDAILPRFNHVEEEDDRVDTVSSQCNVRLRSALEDALREYRSTPTELRPRLPRLPMHKENKALVCALDSQLKNFFESSEDLVDTHSILYCAAVAACRLANVKFPSCDGATRPKPAVPAWQRRIERRIDGARVLIGKLYCFREGNTRPRVMRFVRRAFSGTGISPREYMSRLTERIDFLKQKVCAWASRIRRYKRRVDRYTQNRMFQSDERWVYRAWERPEQNVTDVCRPDDATTSAFWCSIWSVPVCHTEAGWMQDVERVCESIPQMEKVLITPSDVARAVRPLPNWKSPGPDGLHNFWLKWLISSHTCLASQFQSSLESGSLPQFLTTGVTHLLHKSGSPAEPKNYRPITCLSTVYKLLTSILRAKINTHIESNSIMSASQNGCRNGSRGTKELLLIDMAISQQVRRSRKDLSTCWIDYKKAYDSVPHTWLMRVLELYKIDATLRTFLESCMGQWKTVLRYPGCRQIQGNDEPVWIKRKIFQGDSLSPLWFCLALNPLSTLLEDSGLGYRLRRGGQVISHLLYMDDLKLFAPNKLRLMELLKVTETFSSAIRMQFGVDKCAVMHVKRGEIMESEGIQLSDSISLRSLSSSESYKYLGMSEALGINDADMKQSLKERFFCRLKKVLISLLSGGNKVLAFNGWVMPVLMYSFGILKWTQTELDALDRRVRTLLTANRMHHPRSSVMRLYILRKCAGRGFLNAKTLHNREVCSLREYFLKAEVGMHCDVVAVDKGLTPLSMAKENWRKPVVLSTDDRKKLWQSKELHGRFYRALHEPGVDFIASVSWLRFGDLFGETEGFVCAIMDEVILTNNYRRHIMKDGTVDVCRACHRPGESIRHIISGCSRLANGEYLHRHNQVARIIHQQLALKYKLVDSEVPYYKYVPDPVLENDHVTLYWDRSIITDRTIVANKPDIVVIDRLARRTMIVDVTIPHDGNLVKAEKEKEIKYLDLAHEVVDMWNVSSAIIVPIVVSANGLMAESLDQHLSRLSLGGWIKGLIQKAVLLDTARIVRRFLSLEP

SEQ ID NO: 28808 - protein, 1201 aa, Mesoligia furuncula
MLTRSAARRAHLPPPDSSLSPAPPPPEPSPIESAVTPAVAVASSSSDEYFSPPTSPTPVRRQGRGRPPNSLGLRGHPAPSRVPATGGCVQRMRWTQSMNENVMRAYYGSTEGGINLTAYRDRMLSLFQELEPTVNVSAQRLSDQVRVIQRNHRLDDIALDRLRSEVLSNHIVSTSAQTAAQVSTVDAIPPRFNRVEEEDDRVDTVSSQCNVRLRSALEDALREYRSTPTELRPRLPRLPMHKKNRALVCALDSQLKNFFESSEDLVDTHSILYCAAVAACRLANVKFSSCDGATRPKPAVPAWQRRIERRIDGARVLIGKLYCFREGNTRPRVMRFVRRAFSGTGISPREYMSRVTERIDFLKQKVCAWASRIRRYKRRVDRYTQNRMFQSDERWVYRAWERPEQNVTDVYRPDDAATSAFWCSIWSVPVCHTEAGWMQDVERVCESVPEMEKVLITPSDVARAVRPLSNWKSPGPDGLHNFWLKWLISSHTCLASQFQSSLESGSLPQFLTTGVTHLLHKSGSPAEPKNYRPITCLSTVYKLLTSILRAKINKHIESNSIMSASQNGCRNGSRGTKELLLIDMAISQQVRRSRKDLSTCWIDYKKAYDSVPHTWLMRVLELYKIDATLRTFLESCMGQWKTVLRYPGCRQIQGNDEPVWIKRGIFQGDSLSPLWFCLALNPLSTLLEDSGLGYRLRRGGQVISHLLYMDDLKLFAPNKLRLMELLKVTKTFSSAIKMEFGVDKCAVMHVKRGEIMESEGIQLSDSISLRSLSSSESYKYLGMSEALGINDADMKQSLKERFFCRLKKVLISLLSGGNKVRAFNGWVMPVLMYSFGILKWTQTELDALDRRVRTLLTANRIHHPRSSVMRLYIPRKCGGRGFLNAKTLHNREVCSLREYFLKAEVGMHRDVVAVDKGLTPLSMAKENWRKPVVLSTDDRKRVWQSKELHGRFYRALHEPGVDFIASVSWLRFGDLFGETEGFVCAIMDEVILTNNYRRHIMKDGTVDVCRACHRPGESIRHIISGCSRLANGEYLHRHNQVARIIHQQLALKYKLVDSEVPYYKYVPDPVLENDHVTLYWDRSIITDRTIVANKPDIVVIDRLARRTMIVDVTIPHDGNLVKAEKEKQIKYLDLAHEVVDMWNVSSAIIVPIVVSANGLMAESLDQHLSRLSLGGWIKGLIQKAVLLDTARIVRRFLSLEP

SEQ ID NO: 28809 - protein, 1200 aa, Xestia c-nigrum
MITRAASRRRARPPTPDSSLSSASPPPDPGSPVPPVAAVASSSSDEYFSPPTSPTPVRRAGRGRPPRSLGLRGQQALSRVPAAGGCVQRMRWTQSMNENVMRAYYGSTEGGINLTAYRDRMLSLFQDLEPAVNVSAQRLSDQVRVIQRSHRLDDATLDRLRSEVLSNLIIITPTQTAVQVSVVNATLPRSNPVVVEEDDRVALVSSQCNDRLRSALEDALREYRSTPTELRPRLPRLPMHKKNRALVCALDSQLKDIFESSEDLVDTHSILFCGAVAACRVANVKFPNCDIATRPKPAVPAWQRRIERRIDGARVLIGKLYSFREGNTRPRVMRFVRRAFLGTEISPQEYMSRVTERIDFLKQKVYAWANRIRRYKRRVDRYSQNRMFQSDERWVYRTWEQPQQNMTDVCRPDDAATSSFWRNIWSVPVCHTEADWMRDVERVCEPIPEMEPVFITPLDIANAVRPLPNWKSPGPDGLHNFWLKWLSSSHTCLASQFQSSLESGSLPQFLTAGVTHLLHKSGSAAEPKNYRPITCLSTVYKLLTSILRTKINIHIDKNSIMSASQNGCRNGSRGTKELLLIDMAISQQVRRSRKDLSTCWIDYKKAYDSVPYSWLMRVLELYKIDATLRTFLESCMGQWRTVLRYPGCRQIQGNDESVWIKRGIFQGDSLSPLWFCLALNPLSTLLENSGLGYRLRKDGQVISHLLYMDDLKLFAPNKLQLMELLKVTETFSSAIRMEFGVDKCAVMYVKRGEIMRSEGLQLSDSIHLRSLSSSESYKYLGMSEALGINVTDMKQSLRERFFGRLKKVFNSLLSGGNKVRAFNGWVMPVLMYSFGILKWTQTELDALDRRVRTLLTENRMHHPRSSVMRLYIPRKCGGRGFLNAKTLHNREVCSFREYFLKADVGMHRDVVAVDKGLTPLSMAKENWRKPVVLTTDDRKKEWQGKELHGRFYRALHGPDVDFLASVSWLRFGDLFGETEGFVCAIMDEVMLTNNYRKYIMKDGTVDVCRACHLPGESIRHIISGCSRLANGEYLHRHNQVARIIHQQLALKFNLVELEVPYYKYVPDPVLVKDHVTLYWDQSIITDRTIVANKPDIVVIDRSARRVMIIDVTIPHDENLVKAEKEKQIKYLDLAHEVRDMWNMNSVIIVPIVVTANGLIAKSLDDHLAKLSLGGWIKNLIQKAVLLDTARIVRRFLSLQP

SEQ ID NO: 28810 - protein, 903 aa, Xestia c-nigrum
MRKTSDTPIIIIIIILRVLIGKLICFREGNTRPRVMRFVRRAFSGTDVSFRDYLARITERIDFLKQKICAWASRIRRYKRRVERYTRNRSFQSDERWVYRAWERPDQGVTDTRLPDDDAMCSFWRSIWSVPVSHTEGDWIRKVEQVCDQIQEMGAIIISPQDVACAVRPLPNWKSPGPDGLHNFWIKWFQRSHARLASQFQSALESGSLPQFMTTGITHLLHKSGSTAEPKNYRPITCLPTVYKVLASILRAKINKHIESNSIMSTSQNGCRNGSRGTKELLLIDMAISQQVRRSRKNLSTCWIDYKKAYDSVPHTWLMRVLELYKINATLRAFLESCMGQWKTVLRYPGCRQIQGSDEPVWIKRGIFQGDSLSPLWFCLALNPLSTLLENSGLGYRLRKDGQVISHLLYMDDLKLFAPNKLQLLELLKVTETFSNAIRMEFGVDKCAVMYVKRGEIMESEGLQLSDSIHLRSLSSSESYKYLGMSEALGINVTDMKQSLKERFFGRLKKVLNSLLSGGNKVRAFNGWVMPVLMYSFGILKWTQTELDALDRRVRTLLTANRLRHPRSSMMRLYIPRKCGGRGFLNAKNLHNREVCSLREYFLEADVGMHRDVVSVDKGLTPLSLANGNWRKPKVLDTNDRREEWQGKELHGRFYRALHGPDVDFLASVSWLRFGDLFGESEGFVCAIMDEVMMTNNYRKYIVKDGTVDICRACHRPGESIRHIISGCSSLANGEYLHRHNLVARIIHQQLALKYNLVESEVPYYKYAPDPVLVNGNITLYWDRPITTDRTVVANRPDIVVIDRLERRTMIVDITVPHDENLVKAEQDKKNKYLDLAREVVDMWDVSTAIIVPIVVSANGLIAKSLDQHLRRVSLGSWIRGLIQKAVLLDTARIVRRFLSQEP

SEQ ID NO: 28811 - protein, 1111 aa, Xestia c-nigrum
MRWTQSMNENVMRAYYGSTEGGINLTAYRDRMLSLFQDLEPAVNVSAQRLSDQVRVIQRSHRLDDATLDRLRSEVLSNLITITPTQTAVHMSVVNATLPRSNPVVIEEDDRVALVSSQCNDRLRSALDNALREYRSISAELRPRLPRLPMHKKNRALVCALDSQLKNIFESSEDLVDTHSILFCGAVAACRLANVKFPNCDIAIRPKPAVPAWQRRIERRIDGARVLIGKLYCFREGNTRPRVMRFVRRAFSGTEISPQEYMSRVTERIDFLKQKVYAWASRIRRYKRRVDRYSQNRMFQSDERWVYRAWERPQQNMTDVCRPDDAATSSFWRSIWSVPVCHSEADWMRDVERVCEPIPTMEPILITPLDIARAVRPLPNWKSPGPDGLHNFWLKWFSSSHTCLASQFQSSLESGSLPQFLTTGVTHLLHKSGSPAEPKNYRPITCLSTVYKLLTSILRMKINTHVDSNSIMSASQNGCRNGSRGTKELLLIDMAISQQVRRARKDLSICWIDYKKAYDSVPHSWLKRVLELYKIDATLRAFLESCMGQRRTVLRYPGCRQIQGNDEPVWIKRGIFQGDSLSPLWFCLALNPVSTLLENSGLGYRLRKDGQVISHLLYMDDLKLFAPNKLQLMELLKVTETFSSAIGMEFGVDKCAVMYVKRGKIMGSEGLQLSDSIHLRSLSSSESYKYLGMSEALGINVTDMKQSLRERFFGRLKKVLNSLLSGGNKVRAFNGWVMPVLMYSFGILKWTQTELDALDRRVRTLLTENRMHHPRSSVMRLYIPRKCGGRGFLNAKTLHNREVCSLREYFLKADVGMHRDVAAVDKGLTPLSMAKENWRKPVVLTTDDRMKEWQGKELHGRFYRALHGPDVDFLASVSWLRFGDLFGETEGFVCAIMDEVMLTNNYRKYIMKDGTVDVCRACHLPGESIRHIISGCSRLANGEYLHRHNQVARIIHQQLALKFNLVELEVPYYKYVPDPVLVKDHVTLYWDQSIITDRTIVANKPDIVVIDRSARRVMIIDVTIPHDENLVKAEKEKQIKYLDLAHEVRDMWNMDSVIIVPIVVSANGLIAKSLDEHLSKLSLGGWIKGLIQKAVLLDTARIVRRFLSLQP

SEQ ID NO: 28812 - protein, 1200 aa, Xestia c-nigrum
MITRAASRRRARPPTPDSSLSSASPPPDPGSPVPPVAAVASSSSDEYFSPPTSPTPERRAGRGRPPRSLGLRGQQAPSRVPATGGCVQRMRWTQSMNENVMRAYYGSTEGGINLTAYRDRMLSLFQDLEPAVNVSAQRLSDQVRVIQRSHRLDDTTLDRLRSEVLSNLITITPTQTAVHMSVVNATLPRSNPVVVEEDDRVALVSSQCNDRLRSALDNALREYRSISAELRPRLPRLPMHKKNRALVCALDSQLKNIFESSEDLVDTHSILFCGAVAACRLANVKFPNCDIAIRPKPAVPAWQRRIERRIDGARVLIGKLYCFREGNTRPRVMRFVRRAFSGTEISPQEYMSRVTERIDFLKQKVYAWASRIRRYKRRVDRYSQNRMFQSDERWVYRAWERPQQNMMDVCRPDDAATSSFWRSIWSVPVCHSEADWMRDVERVCEPIPTMEPILITPLDIARAVRPLPNWKSPGPDGLHNFWLKWFSSSHTCLASQFQSSLESGSLPQFLTIGVTHLLHKSGSPAEPKNYRPITCLSTVYKLLTSILRTKINTHVDSNSIMSASQNGCRNGSRGTKELLLIDMAISQQVRRARKDLSICWIDYKKAYDSVPHSWLKRVLELYKIDATLRAFLESCMGQWRTVLRYPGCRQIQGNDEPVWIKRGIFQGDSLSPLWFCLALNPVSTLLENSGLGYRLRKDGQVISHLLYMDDLKLFAPNKLQLMELLKVTETFSSAIGMEFGVDKCAVMYVKRGKIMGSEGLQLSDSIHLRSLSSSESYKYLGMSEALGINVTDMKQSLRERFFGRLKKVLNSLLSGGNKVRAFNGWVMPVLMYSFGILKWTQTELDALDRRVRTLLTENRMHHPRSSVMRLYIPRKCGGRGFLNAKTLHNREVCSLREYFLKADVGMHRDVAAVDKGLTPLSMANENWRKPVVLSTDDRMKEWQGKELHGRFYRALHGPDVDFLASVSWLRFGDLFGETEGFVCAIMDEVMLTNNYRKYIMKDGTVDVCRACHLPGESIRHIISGCSRLANGEYLHRHNQVARIIHQQLALKFNLVELEVPYYKYVPDPVLVKDHVTLYWDQSIITDRTIVANKPDIVVIDRSARRVMIIDVTIPHDENLVKAEKEKQIKYLDLAHEVRDMWNMDSVIIVPIVVSANGLIAKSLDEHLSKLSLGGWIKGLIQKAVLLDTARIVRRFLSLQP

SEQ ID NO: 28813 - protein, 1199 aa, Xestia c-nigrum
MITRAASRRALIPSPDSSLSSASPPPDPGSPVSPVAAVASSSSDEYFSPPTSPTPVRRAGRGRPPKGLGLRGQQAPSRVPATGGCVQRMKWTQLMNENVMRAYYGSTEGGTNLTAYRVRMLSLFQDLEPTVNASAQRLSDQVRVIQRNHLLDGAALDRLRSEVLSNRIILTPAQTAVQVSSIDVNPPRSNPAVVEEDDRVATVSSQCNDRLRSALEDALHEYRSTSAELRPRLPRLPMHKKNRALVCALDSQLKNVFESSEDLVDTHSILFCGAVAACRLANVKFPNCDLATRPKPAVPAWQRRIERRIDGARVLIGKLHCFREGNTRPRVMRFVRRAFSGTEISPQEYMSRVTERIDFLKQKVYAWASRIRRYKRRVDRYSQNRMFQSDERWVYRAWERPQQNMTDVCRPDDAATSSFWRSIWSVPVCHSEADWMRDVERVCEPIQTMEPILITPLDIARAVRPLPNWKSPGPDGLHNFWLKWFSSSHTCLASQFQSSLESGSLPQFLTTGITHLLHKSGSPAEPKNYRPITCLSTVYKLLTSILRTKINTHVDSNSIMSASQNGCRNGSRGTKELLLIDMAISQQVRRARKDLSTCWIDYKKAYDSVPHSWLKRVLELYKIDATLRTFLESCMGQWRTVLRYPGCRQIQGNDEPVWIKRGIFQGDSLSPLWFCLALNPVSTLLENSGLGYRLRKDGQVISHLLYMDDLKLFAPNKLQLMELLKVTETFSSAIGMEFGVDKCAVMYVKRGKIMGSEGLQLSDSIHLRSLSSSESYKYLGMSEALGINVTDMKQSLKERFFGRLKKVLNSLLSGGNKVRAFNGWVMPVLMYSFGILKWTQTELDALDRRVRTLLTENRMHHPRSSVMRLYIPRKFGGRGFLNAKTLHNREVCSLREYFLKADVGMHRDVVAVDKGLTPLSMAKENWRKPVVLTTDDRKKEWQGKELHGRFYRALHGPDVDFLASVSWLRFGDLFGETEGFVCAIMDEVMLTNNYRKYIMKDGTVDVCRACHCPGESIRHIISGCSRLANGEYLHRHNQVARIIHQQLALKFKLVESEVPYYKYVPDPVLVKDHVTLYWDQSIITDRTIVANKPDIVVIDRSARRVMIIDVTIPHDENLVKAEKEKQMKYLDLAHEVRDMWNMNSVIIVPIVVTANGLIAKSLDEHLSKLSLGGWIKGLIQKAVLLDTARIVRRFLSLQP

SEQ ID NO: 28814 - protein, 1202 aa, Omphaloscelis lunosa
MLTRSAARSARLPPPDSPLSSASPPPVPSPIVNAVSTPAAVVASSSSDEYFSPPTSPTPVRRKGRGRPPRSLGLRGQPAPSRVPAAGGCVQRMRWTQLMNENVMRAYYGSTEGGTNLTAYRVRMLSLFQELEPTVNVSAQRLSDQVRVIQRNHRLDDIALDRLRSEVLSNHIVSTRAQTAAQESNIDPTPPRFNHGVEEDDRVATVSSQCNDRLRSALEDAFREYRYTPTELRPRLPRLPMHKKNRALVCALDSQLTNFFESSEDLIDTHSILYCAAVAACRLANVKFPNYDGATRPKPVVPAWQCRIERRIDGARVLIGKLYCFREGNTRPRVMRFVRRAFLGTGISPQEYMSRVTERIDFLKQKVCAWASRIRRYKRRVDRYTQNRMFQSDERWVYRAWERPEQNVTDVCRPDDAATSAFWRSIWSVPVCHTEAGWMQDVERVCETIPEMDAVFITPLDVARAVRPLPNWKSPGPDGLHNFWLKWLSSSHTRLASQFQSSLESGSLPQFLTTGVTHLLHKSGNPAEPKNYRPITCLSTVYKLLTSILRTKINTHIDSNSIMSVSQNGCRNGSRGTKELLLIDMAISQQVRRSRKDLSTCWIDYKKAYDSVPHTWLMRVLELYKVHTTLRTFLMSCMGQWRTVLRYPGCRQTQGNDEPVWIKRGIFQGDSLSPLWFCLALNPLSTLLEGSGLGYRLRRGGQVISHLLYMDDLKLFAPNKLRLMELLKVTETFSGAIRMEFGVDKCAVMHVKRGEIMESEGTQLSDSIHLRSLSSAENYRYLGMSESLGINVADMKQSLKERFFGRLKKVLISFLSGGNKVRAFNGWVMPVLIYSFGILKWTQTELDALDRRVRTLLTANRMHHPRSSVMRLYIPRKCGGRGFLNAKTLHNREVCSLREYFFKADVGMHRDVVAVDNGLTPLSMAKENWRKPVVLTTHDRKEVWQSKALHGRFYRALHEPGVDFLASVSWLRFGDLFGETEGFICAIMDEVILTNNYRRHIMKDGTVDVCRACHRPGESIRHIISGCSRLANGEYLHRHNQVARIIHQQLALKYKLVDSEVPYYKYVPDPVLENDHVTLYWDRSIITDRTIIANKPDIVVIDRLARRAMIVDVTIPHDENLVKAEKEKQIKYLDLAHEVVDMWNVSSAIIVPIVVTANGLMAESLDQHLSRLSLGGWIKRLIQKAVLLDTARIVRRFLSLQP

SEQ ID NO: 28815 - protein, 1202 aa, Omphaloscelis lunosa
MLTRSAARSARLPPPDSPLSSASPPPVPSPIVNAVSTPAAVVASSSSDEYFSPPTSPTPVRRQGRGRPPRSLGLRGQPAPSRVPAAGGCVQRMRWTQLMNENVMRAYYGSTEGGTNLTAYRVRMLSLFQELEPTVNVSAQRLSDQVRVIQRNHRLDDIALDRLRSEVLSNHIVSTRAQTAAQESNIDPTPPRCNHGVEEDDRVATVSSQCNDRLRSALEDAFREYRYTPTELRPRLPRLPMHKKNRALVCALDSQLTNFFESSEDLIDTHSILYCAAVAACRLANVKFPNYDGATRPKPVVPAWQCRIERRIDGARVLIGKLYCFREGNTRPRVMRFVRRAFLGTGISPQEYMSRVTERIDFLKQKVCAWASRIRRYKRRVDRYTQNRMFQSDERWVYRAWERPEQNVTDVCRPDDAATSAFWRSIWSVPVCHTEAGWMQDVERVCETIPEMDAVFITPLDVARAVRPLPNWKSPGPDGLHNFWLKWLSSSHTRLASQFQSSLESGLLPQFLTTGVTHLLHKSGNPAEPKNYRPITCLPTVYKLLTSILRTKINTHIDSNSIMSASQNGCRNGSRGTKELLLIDMAISQQVRRSRKDLSTCWIDYKKAYDSVPHTWLMRVLELYKVHTTLRTFLMSCMGQWRTVLRYPGCRQTQENDEPVWIKRGIFQGDSLSPLWFCLALNPLSTLLEGSGLGYRLRRGGQVISHLLYMDDLKLFAPNKLRLMELLKVTETFSGAIRMEFGVDKCAVMHVKRGEIMESEGTQLSDSIHLRSLSSAENYRYLGMSESLGINVADMKQSLKERFFGRLKKVLISFLSGGNKVRAFNGWVMPVLMYSFGILKWTQTELDALDRRVRTLLTANRMHHPRSSVMRLYIPRKCGGRGFLNAKTLHNREVCSLREYFFKADVDMHRDVVAVDNGLTPLSMAKENWRKPVVLTTDDRKEVWQSKALHGRFYRALHEPGVDFLASVSWLRFGDLFGETEGFICAIMDEVILTNNYRGHIMKDGTVDVCRACHRPGESIRHIISGCSRLANGEYLHRHNQVARIIHQQLALKYKLVDSEVPYYKYVPDPVLENDHVTLYWDRSIITDRTIIANKPDIVVIDRLARRAMIVDVTIPHDENLVKAEKEKQIKYLDLAHEVVDMWNASSAIIVPIVVTANGLMAESLDQHLSRLSLGGWIKRLIQKAVLLDTARIVRRFLSLQP

SEQ ID NO: 28816 - protein, 1202 aa, Sesamia nonagrioides
MLTRSATRKARPPPPDSLLSSASPPPVSSPIVNAVTTSAAAVESSSSDEYFSPPTSPTPVRRQGRGRPPKSLGLRGHPAPSRVPAVGGCVQRMRWSQTMNENVMRAYYGATEGGTNLTAYRERMLSLFQALEPTVNVSAQRLSDQVRVIQRNHRLDDTALDRLRSEVLSNQIAPTLTQTAALASIIDAVPPRSNRVEEEDDGVETVSSQYNDRLRSTLEDAFREYRFTPTDLRPRLPRLPMHKKNRALVSALDSQLKNVFESSEDLIDTHSILFCGAVAACRLANIKFPNCDEANRPRPAVPAWQHRIERRIDGARVLIGKLYCFREGNTRPRVMRFVRQAFSGTGISPREYISHVTERIDFLKQKVCAWASRIRRYKRRVDRYTQNRMFQSDERWVYRAWERTEQNEADVCRPDDAATSAFWRSIWSVPVCHAEGHWIQDVEQVCEMIPEMDTILITPIDVATAVRSLPNWKSPGPDGLHNFWLKWLSSSHTCLASQFQSSLESGSLPQFLTTGTTHLLHKSGSTAEPNNYRPITCLPTVYKVLTSILKAKINKHLDSNSIMSVSQNGCRSGSRGTKELLLIDMAISQQVRRSRKDLSTCWIDYKKAYDSVPHTWLMRVLELYKVNATLRTFLRSCMGQWKTVLRYPGSRRIQGNDEPVWIKRGIFQGDSLSPLWFCLALNPLSTLLEDSGLGYRLRRGGQVISHLLYMDDLKLFAPNKLHLMKLLNVTETFSSGIKMEFGVDKCAVMHVKRGQIMESEGITLPDSIHLRSLSSVESYKYLGMSEALGINDADMKQSLKERFFGRLKKVLKSLLSGGNKVRAFNGWVMPVLMYSFGILKWTQTELDALDRRVRTLLTANRMHHPRSSVMRLYIPRKCGGRGFLNAKTLHNREVCSLREHFLKTVVGMHHDVVTVDKGLTPLSMAKENWHKPIILSTNDRKMIWQSKELHGRFYRALHEPDVDFLASVSWLRFSDLFGETEGFVCAIMDEVILTNNYRRYIMRDGTIDVCRACHHPGESIRHIISGCSRLANGEYLHRHNQVARIIHQQLALKYKLVDSEVPYYKYVPDPVLENDHATLYWDRSIITDRTIVANKPDIVVIDRLARLAMIVDVTIPHDGNLVKAEKEKQIKYLDLAHEVVDMWNVNSAVIVPIVVSANGLIAKSLDQHLLRLSLGSWIKGLIQKAVLLDTARIVRRFLSLEP

SEQ ID NO: 28817 - protein, 1203 aa, Sesamia nonagrioides
MLTRSAARQRARPPSPDSLLSSASPPPVSSATVNAVTTPAAAVALSSSDEYFSPPTSPTPVRRQGRGRPPKSLGLRGHPAPSRVPAAGGCVQRMRWSQTMNENVMRAYYGATEGGTNLTAYRERMLSLFQALEPTVNVSAQRLSDQVRVIQRNHRLDDTALDRLRSEVLSNQIAPTLTQTAALASIIDAVPPRSNRVEEEDDRVETVSSQYNDRLRSTLEDAFREYRSTPTDLRPRLPRLPMHKKNRALVSALDSQLKNVFESSEDLIDTHSILFCAAVAACRLANIKFPNCDEANRPKPAVPAWQHRIERRIDGARVLIGKLYCFREGNTRPRVMRFVRQAFSGTGISPREYLTHVTERIDFLKQKVCAWANRIRRYKRRVDRYTQNRMFQSDERWVYRAWERSELNEADVCRPDVAATSAFWRSIWSVPVCHAEGDWIQNVEQVCEMIPEMDTILITPIDVATAVRSLPNWKSPGPDGLHNFWLKWLSSSHTCLASQFQSSLESGSLPQFLTTGITHLLHKSGSTAEPNNYRPITCLPTVYKVLTSILKAKINKHLDSNSIMSVSQNGCKSGSRGTKELLLIDMAISQQVRRSRKDLSTCWIDYKKAYDSVPHTWLMRVLELYKINATLRTFLRSCMGQWKTVLRYPGSRRIQGNDEPVWIKRGIFQGDSLSPLWFCLALNPLSTLLEDSGLGYRLKRGGQVISHLLYMDDLKLFAPNKLHLMKLLNVIETFSSGIKLEFGVDKCAVMHVERGQIMESEGITLPDSIHLRSLSSFESYKYLGMSEALGINDADMKQSLKERFFGRLKKVLKSLLSGGNKVRAFNGWVMPVLMYSFGILKWTQTELDALDRRVRTLLTANRMHHPRSSVMRLYIPRKCGGRGFLNAKTLHNREVCSLREHFLKTVVGMHHDVVTVDKGLTPLSMAKGNWHKPIILTTDDRKMIWQSKELHGRFYRALHGPDVDFLASVSWLRFGDLFGETEGFVCAIMDEVILTNNYRRYIMKDGTIDVCRACHHPGESIRHIISGCSRLANSEYLHRHNQVARIIHQQLVLKYKLVDSEVPYYKYVPDPVLENDHVTLYWDRSIITDRTIVANKPDIVVIDRLARLAMIVDVTIPHDGNLVKAEKEKQMKYLDLAHEVVDMWNVNSAVIVPIVVSANGLIAKSLDQHLLRLSLGSWIKGLIQKAVLLDTARIVRRFLSLEP

SEQ ID NO: 28818 - protein, 868 aa, Sesamia nonagrioides
MRFVRQAFSGTGISPREYINNVTERIDFLKQKVCAWASRIRRYKKRVDRYTQNRMFQSDERWVYRAWERPEQNEADECRPDDATTSAFWRGIWSVSVCHTEGDWTQDVEQVCEAIPEMDNILITPLDVATAVRSLPNWKSPGPDGLHNFWLKWLSSSHTCLASQFQSSLESGSLPQFLTTGITHLLHKSGSTAEPKNYRPITCLPTVYKVLTSILKAKINNHLDSNSIMSVSQNGCRGGSRGTKELLLIDMAISQQVRRSRKDLSTCWIDYKKAYDSVPHTWLMRVLELYKINATLRTFLKSCMGQWKTVLRYPGSRQIQGNDEPVWIKRGIFQGDSLSPLWFCLALNPLSTLLEDSGLGYRLKRDGQVISHLLYMDDLKLFAPNKLHLMKLLNVTETFSSGIKMEFGVDKCAVMHVKRGQIMESERITLPDSIHLRSLSSIESYKYLGMSEALGINDADMKQSLKERFFGRLKKVLNSLLSGGNKVRAFNGWVMPVLMYSFGILKWTQTELDALDRRVRTLLTANRMHHPRSSVMRLYISRKCGGRGFLNAKTLHNREVFSLREYFLKTVVGMHHDVVTVDKGLTPLSMAKENWHKPIILTTDDRKMVWQSKELHGRFYRALHGPDVDFLASVSWLRFGDLFGETEGFVCAIMDEVILTNNYRRYIMKDGTIDVCRACHHPGESIRHIISGCSRLANSEYLHRHNQVARIIHQQLALKYKLVDSEVPYYKYVPDPVLENDHVTLYWDRSIITDRTIVANKPDIVVIDRLARLAMIVDVTIPHDGNLVKAEKEKQMKYLDLAHEVVDMWNVNSAVIVPIIVSANGLIAKSLDQHLLRLSLGSWIKGLIQKAVLLDTARIVRRFLSLEP

SEQ ID NO: 28819 - protein, 962 aa, Apamea monoglypha
MHKKNRALVCALDSQLKNFFESSEDLVDTHSILYCAAVAACRLANVKFPNCDGAARPKPAVPAWQYRIERRIDGARVLIGKLYCFREGNTRPRVMRFVRQAFSGTGISPREYISNVTERIDFLKQKVCAWASRIRRYKRRVDRYTQNRMFQSDERWVYRAWERPEQNVTDVCRPDDANTNAFWRSIWSVPVYHAEGGWMQDIERVCGTIPEMDPVLITPLDVARAVRPLPNWKSPGPDGLHNFWLKWLISSHSRLASQFQSSLESGSLPQFLTTGVTHLLHKSGSPAEPKNYRPITCLSTVYKLLTSILRAKINTHIDNNSIMSASQNGCRNGSRGTKELLLIDMAISQQVRRSRKDLSTCWIDYKKAYDSVPHAWLMRVLELYKIDATLRTFLESCMGQWRTVLRYPGCRQIQGNDEPVWIKRGIFQGDSLSPLWFCLALNPLSTLLEDSGLGYRLKRGGQVISHLLYMDDLKLFAPNKLRLLELLKVTETFSSAIRMEFGVDKCAVMHVKRGEIMESEGIQLSDSIHLRSLSSSESYKYLGMSEALGINFADMKQTLRERFFGRLKKVLVSLLSGGNKVRAFNSWVMPVLMYSFGILKWTQTELEALDRRVRTLLTANRMHHPRSSVMRLYIPRKCGGRGFLNAKTLHNREVCNLREYFIKAEVGMHRDVVAVDKGLTPLSMAKENWRKPVILTTDDRKEVWQSKELHGRFYRALHEPGVDFLASVSWLRFGDLFGETEGFVCAIMDEVVLTNNYRRYIMKDGTVDVCRACHRPGESIRHIISGCSRLANGEYLHRHNQVARIIHQQLALKYKLVDSEVPYYKYVPDPVLENDHVTLYWDRSIITDRTIVANKPDIVVIDRLARRTMIVDVTIPHDGNLVKAEKEKQIKYLDLAHEVVDMWNVSSAIIVPIVVSANGLMAESLDQHLSRLSLGGWIKGLIQKAVLLDTARIVRRFLSLEP

SEQ ID NO: 28820 - protein, 1174 aa, Mamestra configurata
MITRAAARRAHPPPPGSSLSSASPTPDIGSQVSPVVAVASSSSDEYFSPPTSPTPVRRQGRGRPPRSLGSRGQPAPSRVPAAGGCVQRMRWTQSMNENVMRAYYGSTEGGTNLTAYRVRMLSLFQDLEPTVNVSAQRLSDQVRVIQHNCRLDDAALERLRSEVLSNLIISTPTQTVVQAPASGAITPRPNNGSDEVDDRVVTVSSQCNDRLRSALEDALREYRLTPTELRPRLPRLPMHKKNRALVCALDSLLQNIFESSESLVDTHSILFCGAVAACRIANVKFPSCDEAIRPKPAAPAWQCRIERRIDEARALIGKLYCFREGNTRPRVMRFVRRAFSGTGISPREYTFRVTERIDFLKQKVCAWANRIRRYKRRVDRYSQNRMFQSDERWVYRAWERPEQSVTDVYRPDDVATSTFWRSIWSVPICHAEGGWMRDVERVCEAIPQMEKITITTLDIAKAVRPLPNWKSPGPDGLHNFWLKWYSSSHALLASQFQSSLESGSLPQFLTTGITHLLHKTGSPAEPKNYRPITCLSTVYKLLTSILRAKINEHIESNSIISASQNGCRKGSRGTKELLLIDMAISQQVRRSRKDLSTCWIDYKKAYDSVPHTWLMKVLELYKIDATLRTFLESCMRQWKTVLRYPGCQPIQGSDEPVWIKRGIFQGDSLSPLWFCLALNPLSTLLEDSGLGYRLRRGGQAISHLLYMDDLKLFAPNNLRLMELLKVTETFSSAIRMEFGVDKCAVMHVKKGEIMESEGIQLSDSIQVRSLSSTETYKYLGMSEALGINGTDMKQSLRERFFGRLKKVLNSLLSGGNKVRAFNGWVMPVLMYTFGILKWTQTELDALDRRVRTLLTANRMHHPRSSVMRLYIPRKCGGRGFLNAKTLHNREMCSLREYFLKADVGMHRDVVAVDKGLTPLSMAKENWRTPVILTTDDRKEVWKGKELHGRFYRALHGSDVDFSASVAWLRFGDLFGETEGFVCAIMDEVILTNNYRRHIMKDGTVDVCRACHRPGESIRHIISGCSRLAHGEYLHRHNQVARIIHQQLALKYKLVDSEVPYYKYVPDPVLENDHVTLYWDRSIFTDRTIVANKPDIVVIARLARRTMIIDVTIPHDENLLKAEKEKQIKYLDLAHEVVDMWHVDSTVIVPIVVAANGLMAKASTTIYRSWRYAVG

SEQ ID NO: 28821 - protein, 977 aa, Mythimna ferrago
MSTPTELRPRLPRLPMHKKNRALVCALDSLLKNIFESSENLVDTHSILYCGAVAACRLAKIKFPNIDGTIRPKTAVPAWQCRIERRIDEARVLIGKLHCFREGNTRPRVMRFVRRAFLGTGISPQGYMSRVTERIDFLKQKVCAWASRIRRYKRRVDRYSQNRMFQSDERWVYRAWERPEHSVTDECRPDDLATITFWRNIWSVPVSHTEGGWMRDVERVCEAIPEMEKVTITPEDVARAVRPLPNWKSPGPDGLQNFWLKWYSSSHAPLALQFQSILESGSLPEYLTTGVTHLLHKTGNPVDPKNYRPITCLSTVYKLLTSILRAKINIHIENNQIISPSQNGCRNGSRGTKELLLIDMAISQQTRRSRKDLSTCWIDYKKAYDSVPHTWLMKVLELYKIDITLRTFLESCMRQWKTVLRYPGCRPIQGNDELIWIKRGIFQGDSLSPLWFCLALNPLSTLLEDSGLGYRLRRGGQVISHLLYMDDLKLFAPSNLQLMELLKVTETFSSAIRMEFGVDKCAGMHVKRGEIMESEGIQLPDSIHLRSLSSTETYRYLGMSEALGINNADMKQSLKERFFGRLKKVLNSLLSGGNKMRAFNGWVMPVLMYSFGILKWTQTELDALDRRVRTLLTANRMHHPRSSVMRLYIPRKCGGRGFLNAKTLHNREVCSLREYFLKTDVGMHRDVVAVDKGLTPLSMAKEDWHKPVIMTTDNRMEIWKGKELHGRFFRALHEPDVDFLASVAWLRFSDLFGETEGFVCAIMDEVILTNNYRRYIMKDGTVDVCRACHRPGESIKHIISGCSRLANGEYLHRHNQVARIIHQQLALKYNLVDLEVPYYKYVPDPVLENDHVTLYWDRSIITDRTIVANKPDIVVIDRLARRAMIVDVTIPHDENLVKAEKEKQIKYLDLAHEVVDMWNVDSAIIVPIVVTVNGLIAKSFDDHLSKLSLRGWIKGLIQKAVLLDTARIVRRFLSLEP

SEQ ID NO: 28822 - protein, 1200 aa, Mythimna ferrago
MLTRTAARRARHPPPDSSLSSASPPPDPGSSVSPVAAAASSSSDEYFSPPTSPTPVRRPGRGRPPNGLGPRGQPAPSRVPAAGGCVQRMKWTQSINENVMRAYYGATEGGTNLTAYRVRMLSLFQELEPSVNVTTQRLSDQVRVIQRNHRLDDAALDRLRSEVLSNRIISTPTQTQTAAPRATDAIMPRSNHGDDEADDRVVTVSSQCNDRLRSALEDALREYRSTPIARRPRLPRLPMHKKNRALVCALDSLLENVFESSVNLVDTHSILYCGAIAACRLANVKLLSCDEATRPKPAVPAWQYRIERRIDGARALIGKLYCFREGNTRPRVMRFVRRAFSGTGISPREYSSHVTERIDFLKQKVCAWASRIRRYKRRVDRYSQNRMFQSDERWVYRAWERPEQNVTDVLRPDDAATNAFWRSIWSVPVSHTEGGWMRDVERVCEAIPEMEKVIISSTDVARAVRPLPNWKSPGPDGLQNFWLKWYSSSHALLASQFQSSLESGSLPQFLTTGVTHLLHKTGSTAEPKNYRPITCLSTVYKLLTSILRTKINKHIENNSIMSASQNGCRNGSRGTKELLLIDMAISQQVRRSRKDLSTCWIDYKKAYDSVPHTWLMRVMELYKIDATLRTFLESCMGGWNTVLRYPGCRTIRGDDEPIWIKRGIFQGDSLSPLWFCLALNPLSTLLEDSGLGYRLRRGGQVLSHLLYMDDLKLIAPNKLRLMELLKVTENFSSAIRMEFGVDKCAVMHVKRGEIMESEGVQLSDSIHLRSLSSTETYKYLGMSEALGINVTDMKQSLRERFFGRLKKVLNSLLSGGNKVRAFNGWVMPVLMYSFGILKWTQTELDALDRRVRTLLTANRMHHPRSSVMRLYIPRKCGGRGFLNAKTLHNREVCSLREYFLKTDVGMHRDVVAVDKGLTPLSMAKENWRKPVVLTTDDRKEVWKGKELHGRFFRALHEPDVDFSASVAWLRFSNLFGETEGFVCAIMDEVILTNNYRRHIMKDGTIDVCRACHRPGESIRHIISGCSRLANGEYLHRHNQVARILHQQLALKYNLVDSEVPYYRYVPDPVLENDHVTLYWDRSIITDRTIVANKPDIVVIDRLARRAMIVDVTIPHDENLVKAEKEKQIKYLDLAHEVVDMWNVDSAIIVPIVVTANGLIAKSFDDHLSKLSLHGWIKGLIQKAVLLDTARIVRRFLSLEP

SEQ ID NO: 28823 - protein, 962 aa, Mythimna ferrago
MHKKNRALVCALDSLLKNVFESSDSLLDTHSILYCGAVAACRLANVKFPCYGVATRPTPAAPAWQCRIERRIDEARALIGKLYCFREGNTRPRVMRFVRRAFSGTEISPREYMSRVTERIDFLKQKVCAWANRIRRYKRRVDRYSQNRMFQSDERWVYRAWERPGQNVTDGFHPDSVATNTFWRSIWSEPVCHNEGGWMRDVERVCEAIPEMDKVFITPLDVARAVRPLPNWKSPGPDGLQNFWLKWYSSSHAILASQFQSSLESGSLPQILTTGTTHLLHKTGSTADPKNYRPITCLSTVYKLLTSILRVKITLHIEKNSIMFASQNGCRNGSRGTKELLLIDMAISQQVRRSRKDLSTCWIDYKKAYDSVPHTWLMKVLELYKIDATLRTFLESCMRQWKTVLRYPGCRPIQGNDEPIWIKRGIFQGDSLSPLWFCLALNPLSTLLEDSGLGYRLRRGGQVLSHLLYMDDLKLFAHNNSQLMELLKVTETFSSAIRMEFGVDKCAVMHVRRGEIVESEGIQLSDSIHLRSLSSTETYKYLGMSEALGINVADMKQTLKERFFGRLKKVLNSLLSGGNKVRAFNGWVMPVLMYSFGILKWTQTELDALDRRVRTLLTANRMHHPRSSVMRLYIPRKCGGRGFLNAKTLHNREVCSLREYFLKTDVGMHRDVVAVDKGLTPLSMAKENWRKPVVLTTDDRKEVWKGKELHGRFFRALHEPDVDFSASVAWLRFSNLFGETEGFVCAIMDEVILTNNYRRHIMKDGTVDVCRACHRPGESIRHIISGCSRLANGEYLHRHNQVARILHQQLALKYNLVDSEVPYYRYVPDPVLENDHVTLYWDRSIITDRTIVANKPDIVVIDRLARRAMIVDVTIPHDENLVKAEKEKQIKYLDLAHEVVDMWNVDSAIIVPIVVTANGLIAKSFDDHLSKLSLHGWIKGLIQKAVLLDTARIVRRFLSLEP

SEQ ID NO: 28824 - protein, 1200 aa, Mythimna ferrago
MLTRAAARRARHPPPGLSLSSASPPPDSGSPVSPTAAVASSSSDEYFSPPTSPTPVRRPGRGRPPKSMGPRGQPAPSRVPAAGGCVQRMRWTQSMNENVMRAYYGSTEGGTNLTAYRERMLSLFQDLEPTVNVSAQRLSDQVRVIQRNHRLDDAALDRLRSEILSNQIVSTSTQTQTAATPTTNAISPRSDHNNDDADDRVVTVSSQCNERLRSALEDALCEYMSTPTELRPRLPRLPMHKKNRALVCALDSLLKNIFESSENLVDTHSILYCGAVAACRLAKIKFPNIDGTIRPKTAVPAWQCRIERRIDEARVLIGKLHCFREGNTRPRVMRFVRRAFLGTGISPQGYMSRVTERIDFLKQKVCAWASRIRRYKRRVDRYSQNRMFQSDERWVYRAWERPEHSVTDGCRPDDLATITFWRNIWSVPVSHTEGGWMRDVERVCEAIPEMEKVTITPEDVARAVRPLPNWKSPGPDGLQNFWLKWYSSSHAPLASQFQSILESGSLPEYLTTGVTHLLHKTGNPVDPKNYRPITCLSTVYKLLTSILRAKINIHIENNQIISPSQNGCRNGSRGTKELLLIDMAISQQTRRSRKDLSTCWIDYKKAYDSVPHTWLMRVLELYKIDITLRTFLESCMRQWKTVLRYPGCRPIQGNDEPIWIKRGIFQGDSLSPLWFCLALNPLSTLLEDSGLGYRLRRGGQVISHLLYMDDLKLFAPSNLQLMELLKVTETFSSAIRMEFGVDKCAGMHVKRGEIMESEGIQLPDSIHLRSLSSTETYRYLGMSEALGINNADMKQSLKERFFGRLKKVLNSLLSGGNKVRAFNGWVMPVLMYSFGILKWTQTELDALDRRVRTLLTANRMHHPRSSVMRLYIPRKCGGRGFLNAKTLHNREVCSLREYFLKTDVGMHRDVVAVDKGLTPLSMAKEDWHKPVIMTTDNRKEIWKGKELHGRFFRALHEPDVDFLASVAWLRFSDLFGETEGFVCAIMDEVILTNNYRRYIMKDGTVDVCRACHRPGESIRHIISGCSRLANGEYLHRHNQVARIIHQQLALKYNLVDLEVPYYKYVPDPVLENDHVTLYWDRSIITDRTIVANKPDIVVIDRLARRAMIVDITIPHDENLVKAEKEKQMKYLDLAHEVVDMWNVDSAIIVPIVVTANGLIAKSFDDHLSKLSLRGWIKGQIQKAVLLDTARIVRKFLSLEP

SEQ ID NO: 28825 - protein, 1202 aa, Noctua pronuba
MLTRAAARRARLSPPDSSLSSASPLPESSPIVSAVTPAVAVASSSSDEYFSPPTSPTPVRRQGRGRPPRSLGLRGHPAPSRVPATGGCVQRMRWTHPINENVMRAYYGSTEGGTNLTAYRVRMLSLFQVLEPTVNVSAQRLSDQVRVIQRNHMLDDAVLDRLRSEVLSNRIVLTPSQTVVQTTAIDVSPPRSNPAVVEEDDRVATVSSQCNDRLRSALEDALREYRYTPTELRPRLPRLPMHKKNRALVCALDSQLKNLFESSEDLVDTHSILYCGAVAACRLANVKFTNSDAATRPKPAVPAWQCRIERRIDGARVLIGKLHCFREGNTRPRVMRFVRRAFSGTGISPQEYMSRVTERIDFLKQKVYAWANRIRRYKRRVDRYSQNRMFQSDERWVYRAWERPEQNMTDVCRPDDATTSSFWSSIWSVPVCHTEGDWMRAVERVCEPIPEMEPILITSLDVARSVRPLPNWKSPGPDGLHNFWLKWLSSSHTCLASQFQSSLESGALPQFLTTGVTHLLHKSGSPAEPKNYRPITCLSTVYKLLTSILRAKINTHIDKNSIMSASQNGCRNGSRGTKELLLIDMAISQQVRRSRKDLSTCWIDYKKAYDSVPHTWLMRVLELYKIDATLRTFLESCMGQWRTVLRYPGCRQIQGNDEPVWIKRGIFQGDSLSPLWFCLALNPLSTLLEDSGLGYRLRRGGQVISHLLYMDDLKLFAPNKLRLMELLKVTETFSSAIRMEFGVDKCAVMYVKRGEIMESEGIQLSDSIHLRSLSSSESYKYLGMSEALGINVTDMKQSLRERFFGRLKKVLNSLLSGGNKVRAFNGWVMPVLMYSFGILKWTQTELDALDRRVRTLLTANRMHHPRSSVMRLYIPRKCGGRGFLNAKTLHNRELCSLREYFLKAEVGMHRDVVAVDKGFTPLSMAKENWRKPVVLTTDDRKEVWQGKELHGRFYRALHGPDVDFLASVSWLRFGDLFGETEGFVCAIMDEVMLTNNYRKYIMKDGTVDVCRACHRPGESIRHIISGCSRLANGEYLHRHNQVARIIHQQLALKYKLVESEVPYYKYVPDPVLEKDHVTLYWDRSIITDRTIVANKPDIVVIDRSARRVMIVDVTIPHDENLVKAEKEKQIKYLDLAHEVVDMWNVNSAIIVPIVVTANGLMAKSLDDHLSRLSLGGWIKGLIQKAVLLDTARIVRRFLSLEP

SEQ ID NO: 28826 - protein, 1102 aa, Noctua pronuba
MIMRAYYGSTEGGTNLTAYRVRMLSLFQVLEPTVNVSAQRLSDQVRVIQRNHMLDDAVLDRLRSEVLSNRIVLTPSQTVVQTIAIDVSPPRSNPAVVEEDDRVATVSSQCNDRLRSALEDALREYRYTPTELRPRLPRLPMHKKNRALVCALDSQLKNLFESSEDLVDTHSILYCGAVAACRLANVKFTNSDAATRPKPAVPAWQCRIERRIDGARVLIGKLHCFREGNTRPRVMRFVRRAFSGTGISPQEYMSRVTERIDFLKQKVYAWANRIRRYKRRVDRYSQNRMFQSDERWVYRAWERPEQNMTDVCRPDDATTSSFWSSIWSVPVCHTEGDWMRAVERVCEPIPEMEPILITSLDVARSVRPLPNWKSPGPDGLHNFWLKWLSSSHTCLASQFQSSLESGALPQFLTTGVTHLLHKSGNPAEPKNYRPITCLSTVYKLLTSILRAKINTHIDKNSIMSASQNGCRNGSRGTKELLLIDMAISQQVRRSRKDLSTCWIDYKKAYDSVPHTWLMRVLELYKIDATLRTFLESCMGQWRTVLRYPGCRQIQGNDEPVWIKRGIFQGDSLSPLWFCLALNPLSTLLEDSGLGYRLRRGGQVISHLLYMDDLKLFAPNKLRLMELLKVTETFSSAIRMEFGVDKCAVMYVKRGEIMESEGIQLSDSIHLRSLSSSESYKYLGMSEALGINVTDMKQSLRERFFGRLKKVLNSLLSGGNKVRAFNGWVMPVLMYSFGILKWTQTELDALDRRVRTLLTANRMHHPRSSVMRLYIPRKCGGRGFLNAKTLHNRELCSLREYFLKAEVGMHRDVVAVDKGLTPLSMAKENWRKPVVLTTDDRKEVWQGKELHGRFYRALHGPDVDFLASVSWLRFGDLFGETEGFVCAIMDEVMLTNNYRKYIMKDGTVDVCRACHRPGESIRHIISGCSRLANGEYLHRHNQVARIIHQQLALKYKLVESEVPYYKYVPDPVLEKDHVTLYWDRSIITDRTIVANKPDIVVIDRSARRVMIVDVTIPHDENLVKAEKEKQIKYLDLAHEVVDMWNVNSAIIVPIVVTANGLMAKSLDDHLSRLSLGGWIKGLIQKAVLLDTARIVRRFLSLEP

SEQ ID NO: 28827 - protein, 1202 aa, Noctua pronuba
MLTRAAARRARLSPPDSSLSSASPLPESSPIVSAVTPAVAVASSSSDEYFSPPTSPTPVRRQGRGRPPTSLGLRGHPAPNRVPATGGCVQRMRWTHPINENVMRAYYGSTEGGTNLTAYRVRMLSLFQVLEPTVNVSAQRLSDQVRVIQRNHMLDDAVLDRLRSEVLSNRIVLTPSQTVVQTTAIDVSPPRSNPAVVEEDDRVATVSSQCNDRLRSALEDALCEYRYTPTELRPRLPRLPMHKKNRALVCALDSQLKNLFESIEDLVDTHSILYCGAVAACRLAKLKFTNSDAATRPKPAVPAWQCRIERRIDGARVLIGKLHCFREGNTRPRVMRFVRRAFSGTGISPQEYMSCVTERIDFLKQKVYAWANRIRRYKRRVDRYSQNRMFQSDERWVYRAWERPEQNMADVCRPDDATTSSFWSSIWSVPVCHTEGDWMRAVERVCEPIPEMEPILITSLDVARSVRPLPNWKSPGPDGLHNFWLKWLSSSHTCLASQFQSSLESGALPQFLTTGVTHLLHKSGNPAEPKNYRPITCLSTVYKLLTSILRAKINTHIDKNSIMSASQNGCRNGSRGTKELLLIDMAISQQVRRSRKDLSTCWIDYKKAYDSVPHTWLMRVLELYKIDATLRTFLESCMGQWRTVLRYPGCRQIQGNDEPVWIKRGIFQGDSLSPLWFCLALNPLSTLLEDSGLGYRLRRGGQVISHLLYMDDLKLFAPNKLRLMELLKVTETFSSAIRMEFGVDKCAVMYVKRGEIMESEGIQLSDSIHLRSLSSSESYKYLGMSEALGINVTDMKQSLRERFFGRLKKVLNSLLSGGNKVRAFNGWVMPVLMYSFGILKWTQTELDALDRRVRTLLTANRMHHPRSSVMRLYIPRKCGGRGFLNAKTLHNRELCSLREYFLKAEVGMHRDVVAVDKGLTPLSMAKENWRKPVVLTTDDRKEVWQGKELHGRFYRALHGPDVDFLASVSWLRFGDLFGETEGFVCAIMDEVMLTNNYRKYIMKDGTVDVCRACHRPGESIRHIISGCSRLANGEYLHRHNQVARIIHQQLALKYKLVESEVPYYKYVPDPVLEKDHVTLYWDRSIITDRTIVANKPDIVVIDRSARRVMIVDVTIPHDENLVKAEKEKQIKYLDLAHEVVDMWNVNSAIIVPIVVTANGLMAKSLDDHLSRLSLGGWIKGLIQKAVLLDTARIVRRFLSLEP

SEQ ID NO: 28828 - protein, 1205 aa, Ochropleura plecta
MLTRRRAQEQQALPPSPGSSLSSASQSPGRATHVSTVSPVAAVASSSSDEFFSPPSSPPPTRQRRGRGRPPAGLGSRGQQAPIRVPAAGGNVSRMRWTSSINANVMRAYYGSTEGGTNLTAYRVRMLSLFQDLEPTINVSAQRLSDQVRVIQRNHMLDDAALDRLRSEVLSNRIILTTPQTAVQASVIDGMQPRSDPAVVEEDDRVATVSSQCNERLRSALEDALRDYRSTPAELRPRLPRLPMHKKNRALVCALDSQLKNLFESNEDLVDTHSILYCGAVAVCRLANVKFPSCDVATRPKPSVPTWQCRIERRIDEARVLIGKLYCFREGNTRPRVMRFVRRAFSGTGISPQEYMSRTTERIDFLKQKVYAWANRIRRYKRRVDRYSQNRIFRSDERWVYRAWERPEQSVTDVCRPDDVATSSFWHSIWSVPVCHTEADWMRDVERVCETIPDMEPILITSLDIASAVRPLPNWKSPGPDGLHNFWLKWLTSSHTRLASQFQSCLESGSLPQFLTTGVTHLLYKSGSPAEPKNYRPITCLSTVYKLLTSILRAKINSHIDKNSIMSASQNGCRNGSRGTKELLLIDMAISQQVRRSRKDLSTCWIDYKKAYDSVPHTWLKRVLELYKIDATLRAFLESCMGQWRTVLRYPGCRQIQGNDEPVWIKRGIFQGDSLSPLWFCLALNPLSTLLEDSGLGYRLRRGGQVISHLLYMDDLKLFASNKLRLMELLKVTETFSNAIRMEFGVDKCAVMYVKRGEIMESEGIQLSDSIHLRSLSSSESYKYLGMSEALGINVADMKQLLRERFFGRLKKVLKSLLSGGNKVRAFNSWVMPVIMYSFGILKWTQTELDALDRRVRTLLTGNRMHHPRSSVMRLYIPRKCGGRGFLNAKTLHNREVCSLREYFLKTDVGMHRDVVAVDKGLTPLSMAKENWRKPVILTTDDRKVVWQGKELHGRFYKALHGPDVDFLASVSWLRFGDLFGETEGFVCAIMDEVMLTNNYRKYIMKDGTVDVCRACHRPGESIRHIISGCSRLANSEYLHRHNQVARIIHQQLALKYNLVESEVPYYKYVPDPVLEKDHVTLYWDRSIITDRTIVANKPDIVVIDRSARRVMIIDVTIPHDENLVKAEKEKQLKYLDLAHEVVDMWNVNSAIIVPIVVTANGLIAKSLDEHLSKLSLGGWIKGLIQKAVLLDTARIVRRFLSLEP

SEQ ID NO: 28829 - protein, 1205 aa, Ochropleura plecta
MLTRRRAQEQKALPPSPGSPLSSASQPPGRATRVSAVSPVAAVASSSSDEFFSPPSSPPPPTRQRRGRGRPPAGLGSRSQQAPIRVPAVGGNVSRMRWTSSINANVMRAYYGSTEGGTNLTAYRVRMLSLFQDLEPTINVSAQRLSDQVRVIQRNHMLDDAALDRLRSEVLSNRIILTTPQTAMQASVIDGMQPRSDPAVVEEDDRVATVSSQCNERLRSALEDALRDYRSTPAELRPRLPRLPMHNKNRALLCALDSQLKNLFESSEDLVDTHSILYCGAVAVCRLTNVKFPSCDVATRPKPSVPAWQCRIERRIDEARVLIGKLYCFREGNTRPRVMRFVRRAFSGTGISPQEYMSRTTERIDFLKQKVYAWANRIRRYKRWVDRYSQNRMFRSDERWVYRAWERPEQSVTDVCRPDDVATSSFWHSIWSVPVCHTEADWMRDVERVCETIPEMEPILITSLDIASAVRPLPNWKSPGPDGLHNFWLKWLSSSHTRLASQFQSCLESGSLPQFLTTGVTHLLYKSGSPAEPKNYRPITCLSTVYKVLTSILRAKINSHIDNNSIMSASQNGCRNGSRGTKELLLIDMAISQQVRRSRKDLSTCWIDYKKAYDSVPHTWLKRVLELYKIDATLRAFLESCMGQWRTVLRYPGCRQIQGNDEPVWIKRGIFQGDSLSPLWFCLALNPLSTLLEDSGLGYRLRRGGQVISHLLYMDDLKLFAPNKLRLMELLKVTETFSNAIRMEFGVDKCAVMYVKRGEIMESEGIQLSDSIHLRSLSSSESYKYLGMSEALGINVADMKQLLRERFFGRLKKVLKSLLSGGNKVRAFNSWVMPVIMYSFGILKWTQTELDALDRRVRTLLTGNRMHHPRSSVMRLYIPRKCGGRGFLNAKTLHNREVCSLREYFLKTDVGMHRDVVAVDKGLTPLSMAKENWRKPVVLTTDDRKVVWQGKELHGRFYKALHGPYVDFLASVSWLRFGDLFGETEGFVCAIMDEVMLTNNYRKYIMKDGTVDVCRACHRPGESIRHIISGCSRLANSEYLHRHNQVARIIHQQLALKYNLVESEVPYYKYVPDPVLEKDHVTLWDRSIITDRTIVANKPDIVVIDRSAGRVMIIDVTIPHDENLVKAEKEKQLKYLDLAHEVVDMWNVNSAIIVPIVVTANGLIAKSLDEHLSKLSLGGWIKGLIQKAVLLDTARIVRRFLSLEP

SEQ ID NO: 28830 - protein, 1207 aa, Ochropleura plecta
MLTRRRAQEQQALPSSPGSSLSSASQPPGRATRVSAVSPVAAVASSSSDEFFSPPSSPPPPPTRQRRGRGRPPAGLGSRGQQAPIRVPAAGGNVSRMRWTSFINANVMRAYYGSTEGGTNLTAYRVRMLSLFQDLEPTINVSAQRLSDQVRVIQRNHLLDDAALDRLRSEVLSNRVILTTPQTAVQASAIDVTQPRSNPAVVEEDDRVATVSSQCNDRLRSALEDALRDYRSTPAELRPRLPRLPMHKKNRALVCALDSQLKNLFESSEDLVDTHSILYCGAVAVCRLANVKFPNCDVATRPKPSVPAWQCRIERRIDEARALIGKLYCFREGNTRPRVMRFVRRAFSGTGISPQEYMSRTTERIDFLKQKVYAWANRIQRYKRRVDRYSQNRMFRSDERWVYRAWERPEQSVTDVCRPDDVATSSFWHSIWSVRVCHTEAGWMRDVERVCETIPEMEPILITSLDIASAVRPLPNWKSPGPDGLHNFWLKWLSSSHTRLASQFQSCLESGSLPQFLTTGVTHLLYKSGSPAEPKNYRPITCLSTVYKLLTSILRAKINSHIVKNSIISASQNGCRNGSRGTKELLLIDMAISQQVRRSRKDLSTCWIDYKKAYDSVPHTWLKRVLELYKIDTTLRTFLESCMGQWRTVLRYPGCRQIQGNDEPVWIKRGIFQGDSLSPLWFCLALNPLSTLLEDSGLGYRLRRGGQVISHLFYMDDLKLFAPNKLRLMELLKVTETFSNAIRMEFGVDKCAVMYVKRGEIMESEGIHLSDSIHLRSLSSSESYKYLGMSEALGINVADMKQLLRERFFGRLKKVLKSLLSGGNKVRAFNSWVMPVLMYSFGILKWTQTELDALDRRVRTLLTANRMHHPRSSVMRLYIPRKCGGRGFLNAKTLHNREVCSLREYFLKTDVGMHRDVVAVDKGLTPLSMAKENWRKPVVLTTDYRKEVWQGKELHGRFYKALHGPDVDFLASVSWLRFGDLFGETEGFVCAIMDEVMLTNNYRKYIMKDGTVDVCRACHRPGESIRHIISGCSHLANGEYLHRHNQVARIIHQQLALKYNLVESEVPYYKYVPDPVLEKDHVTLYWDRSIITDRTIVANKPDIVVIDRSARRVMIIDVTIPHDENLVKAEKEKQLKYLDLAHEVVDMWNVNSAIIVPIVITANGLIAKSLDEHLSKLSLGGWIKGLIQKAVLLNTARIVRRFLSLEP

SEQ ID NO: 28831 - protein, 1198 aa, Hecatera dysodea
MLTRAATLRARHPPPGSPLSSASPPPDIESQVSPAVAVASSSSDEYFSPPTSPPPVRRQGRGRPPRGLGPRGQPAPSRVPATGGCVQRMRWTQSMNENVMRAYYGSTEGGINLTAYRVRMLSLFQDLEPTVNVSAQRLSDQVRVIQRSHRLDEAALDRLRSEVLNNLIISTPTQTAVQAPGSGAIIPRPIHVCDEVVDRVVTVSSQCNDRLRSALEDALREYRSTSTELRPRLPRLPMHKKNRALVCALDSLLKNIFESSENLVDTHSILYCGAVAACRVANVKFSNSDGATRPKNAPAWQCRIERRIDEARVLIGKLYCFREGNTRPRVMRFVRRAFLGTEISPQEYMSRVTERIDFLKQKVCAWANRIRRYKRRVDRYSQNRMFQSDERWVYRAWERPEQSVTDVCRPDDVTTNTFWRSIWSVPVCHAEGGWMRDVERVCEAIPQMEKITITTVDIATAVRPLPNWKSPGPDGLHNFWLKWYSSSHALLASQFQSSLDSGSLPQFLTTGITHLLHKTGSPAEPKNYRPITCLSTVYKLLTSILRVKINEHIESNSIMSYSQNGCRKGSRGTKELLLIDMAISQQVRRSRKDLSTCWIDYKKAYDSVPHTWLLKVLELYKVDATLRTFLESCMRQWKTVLRYPGCRPIQGNEEPVWIKRGIFQGDSLSPLWFCLALNPLSTLLEDSGLGYRLRRGGQTISHLLYMDDLKLFAPNNLRLMELLKVTETFSSTIRMEFGVDKCAVMHVKKGEIMESEGIQLSDSIQVRSLSSTETYKYLGMSEALGINGADMKQSLKERFFGRLKKVLNSLLSGGNKVRAFNGWVMPVLMYSFGILKWTQTELDALDRRVRTLLTANRMHHPRSSVMRLYIPRKCGGRGFLNAKTLHNREMCSLREYFLKADVGMHRDVVAVDKGFTPLSMAKENWRKPVIPTTDDRREVWRGKELHGRFYRALYGSDVDFSASVAWLRFGDLFGETEGFVCAIMDEVILTNNYRRHIMKDGTVDVCRACHRPGESIRHIISGCSRLANGEYLHRHNQVARIIHQQLALKYKLVDSEVPYYKYVPDPVLENDHATLYWDRSIITDRTIIANKPDIVVIDRLARRTMIIDVTIPHDENLVKAEKEKQIKYLDLAHEVVDMWNVDSAVIVPIVVTANGLMAKSFDEHLSKLALHGWLKGLIQKAVLLDTARIVRRFLSLEP

SEQ ID NO: 28832 - protein, 1024 aa, Hecatera dysodea
MEQVPASSTLTPRSINVCDEVDDRVVTVSSQCNDRLRSALEDALREYRSTPTELRPRLPRLPMHKKNRALVCALDSLLKNIFESSDNLIDTHSILYCGAVAACRIANVKFINSDGAIRPKSVAPAWQCRIERRIDEARVLIGKLYCFREGNTRPRVMRFVRRAFLGTQISPQEYMSRVTERIDFLKQKVCAWANRIRRYKRRVDRYSQNRMFQSDERWVYRAWERPEQSVTDACRPDDVATNTFWRSIWSVPVCHTEGGWMRDVERVCEAIPQMEKINITSLDVAKAVRPLPNWKSPGPDGLHNFWLKWYSSSHALLASQFQSSLESGSLPQFLTTGVTHLLHKTGSLAEPKNYRPITCLSTVYKLLTSILRVKINEHIETNSIMSYSQNGCRKGSRGTKELLLIDMAISQQVRRSRKDLSTCWIDYKKAYDSVPHTWLLKVLELYKLDATLRTFLESCMRQWKTVLRYPGCRPIQGSDEPVWIKRGIFQGDSLSPLWFCLALNPLSTLLEDSDLGYRLRRGGQAISHLLYMDDLKLFAPNKLRLMELLKVTETFSSDIRMEFGVDKCAVMHVKKGKIMESEGIQLSDSIQVRSLSSTETYKYLGMSEALGINVADMKQSLKERFFGRLKKVLNSLLSGGNKVRAFNGWVMPVLMYSFGILKWTQTELDALDRRVRTLLTANRMHHRRSSVMRLYIPRKCGGRGFLNAKTLHNREMCSLREYFLETDVGMHRDVVAVDKGLTPLSMANENWRKPVIQTTDDRKEVWKGKELHGRFYRALYGSDVDFSASVAWLRFGDLFGETEGFVCAIMDEVILTNNYRRHIMKDGTIDVCRACHRPGESIRHIISGCSRLANGEYLHRHNQVARIIHQQLALKYKLVDSEVPYYKYVPDPVLENGHVTLYWDRSIITDRTIVANKPDIVVIDRLARRTMIIDVTIPHDENLVKAEKEKQIKYLDLAHEVVDMWNVDSAVIVPIVITANGLMAKSFDDHLSKLALHGWLKGLIQKAVLLDTARIVRRFLSLEP

SEQ ID NO: 28833 - protein, 1202 aa, Mythimna impura
MIMLTRAATRRARPSPLGSSLSSASPPPDLGSPVSSTAAVASSSSDEYFSPPTSPTPVRRPGRGRPPKSLGPRGQPAPSRVPATGGCVQRMKWTQSMNENVMRAYYGSTEGGTNLTAYRVRMLSLFQELEPTVNVTAQRLSDQVRVIQRNHRLDGAALDRLRSEVLSNRIISTPSQTQTEAPQATDAILPRSNHIDDEPDDRVVTVSSQCNDRLRSALEDALREYRSTPIALRPRLPRLPMHKKNRALVCALDSLLENVFESSVNLADTHSILYCGAIAACRLANVKLPSCDGATRPKPAAPAWQCRIERRIDEARALIGKLYCFREGNTRPRVMRYVRRAFSGTEISPREYLSRVTERIDFLKQKVCAWANRIRRYKRRVDRYSQNRMFQSDERWVYRAWERPEQNVTDVTRPDAVATNTFWRNIWSVPVCHTEDDWMREVERVCEAIPEMEKIVISPIDVARAVRPLPNWKSPGPDGLQNFWLKWYSSSHALLASQFQSSLESGSLPQFLTTGVTHLLHKTGSTAEPKNYRPITCLSTVYKLLTSILRTKINKHIDSNSIMSASQNGCRNGSRGTKELLLIDMAISQQVRRSRKDLSTCWIDYKKAYDSVPHTWLMRVLELYKIDATLRTFLESCMGQWNTVLRYPGCRSIRRDDEPIWIKRGIFQGDSLSPLWFCLALNPLSTLLEESGLGYRLRRGGQVLSHLLYMDDLKLIAPNKLRLMELLKVTETFSSAIRMEFGVDKCAVMHVKRGEIMESEGIQLSDSIHFRSLSSTETYKYLGMSEALGINVADMKQSLKERFFGRLKKVLNSLLSGGNKVRAFNGWVMPVLMYSFGILKWTQTELDAVDRRVRTLLTANRMHHPRSSVMRLYIPRKCGGRGFLNAKTLHNREVCSLREYFHKTDVGMHRDVVAVDKGLTPLSMAKENWRKPVVLTTDDRKEVWKSKELHGRFYRALHESDIDLAASVAWLRFSNLFGETEGFICAIMDEVILTNNYRRYIMKDGTVDVCRACHRPGESIRHIISGCSRLANGEYLHRHNQVARIIHQQLALKYNLVDYEVPYYRYVPDPVLENDHVTLYWDRSIITDRTIVANKPDIVVIDRLARRVMIVDVTIPHDENLVKAEKEKQIKYLDLAHEVVDMWNVDSTVIVPIVVTANGLIAKSFDDHLSKLSLRGWIKGLIQKAVLLDTARIVRRFLSLEP

SEQ ID NO: 28834 - protein, 1202 aa, Mythimna impura
MIMLTRAAIRRARPSPLGSSLSSASPPPDLGSPVSPTAAVASSSSDEYFSPPTSPTPVRRPGRGRPPKSLGPRGQPAPSRVPATGGCVQRMKWTQSMNENVMRAYYGSTEGGTNLTAYRVRMLSLFQELEPTVNVTAQRLSDQVRVIQRNHRLDGAALDRLRSEVLSNRIISTPSQTQTEAPQATDATLPRSNHIDDEADDRVVTVSSQCNDRLRSALEDALREYRSTPIALRPRLPRLPMHKKNRALVCALDSLLENVFESSVNLADTHSILYCGAIAACRLANVKLPSCDGATRPKPAAPAWQCRIERRIDEARALIGKLYCFREGNTRPRVMRYVRRAFSGTEISPREYLSRVTERIDFLKQKVCAWANRIRRYKRRVDRYSQNRMFQSDERWVYRAWERPEQNVTDVTRPDAVATNTFWRNIWSVPVCHTEDGWMREVERVCEAIPEMEKIVISPIDVARAVRPLPNWKSPGPDGLQNFWLKWYSSSHALLASQFQSSLESGSLPQFLTTGVTHLLHKTGSTAEPKNYRPITCLSTVYKLLTSILRTKINKHIDSNSIMSASQNGCRNGSRGTKELLLIDMAISQQVRRSRKDLSTCWIDYKKAYDSVPHTWLMRVLELYKIDATLRTFLESCMGQWNTVLRYPGCRSIRRDDEPIWIKRGIFQGDSLSPLWFCLALNPLSTLLEESGLGYRLRRGGQVLSHLLYMDDLKLIAPNKLRLMELLKVTETFSSAIRMEFGVDKCAVMHVKRGEIMESEGIQLSDSIHFRSLSSTETYKYLGMSEALGINVADMKQSLKERFFGRLKKVLNSLLSGGNKVRAFNGWVMPVLMYSFGILKWTQTELDAVDRRVRTLLTANRMHHPRSSVMRLYIPRKCGGRGFLNAKTLHNREVCSLREYFHKTDVGMHRDVVAVDKGLTSLSMAKENWRKPVVLTTDDRKEVWKSKELHGRFYRALHESDIDFAASVAWLRFSNLFGETEGFICAIMDEVILTNNYRRYIMKDGTVDVCRACHRPGESIRHIISGCSRLANGEYLHRHNQVARIIHQQLALKYNLVDYEVPYYRYVPDPVLENDHVTLYWDRSIITDRTIVANKPDIVVIDRLARRVMIVDVTIPHDENLVKAEKEKQIKYLDLAHEVVDMWNVDSAVIVPIVVTANGLIAKSFDDHLSKLSLRGWIKGLIQKAVLLDTARIVRRFLSLEP

SEQ ID NO: 28835 - protein, 1199 aa, Phlogophora meticulosa
MITRAATRRARPPSPDSPLSSASPPPDLGSPVTPAVAAASSSSDEYFSPPTSPTPVRRQGRGRPPKSLGSRGQPAPSQVPATGGCVQRMRWTQSMNENVMRAYYGSTEGGTNLTAYRVRMLSLFQGFEPTVNVSAQRLSDQVRVIQRNHRLDDAALDRLRSEMLSNHIVLTSTQTAVQAPAFNAILPRSNHVSNEADDRVDTVCSQYNDRLRSALEDALREYRSTPTELRPRLPRLPMHRKNRALVCALDSLLKNFFESSEDLVDTHSILYCAAVAACRLANVKFPKNDLAIRPKPAVPAWQSRIERRIDGARVLIGKLYCFREGNTRPRVMRFVRRAFSGTGISPREYMSRIVERIDFLKQKVCAWANRIRRYKRRVDRYSQNRMFQSDERWVYRAWERPEQDVAGEHRPDDVATNAFWRSIWSVPAHHVEAHWMSDYESVCETIPEMEKIIITPEDVATAVRPVPNWKSPGPDGLHNFWLKWLSSSHTRLASQFQSCLESGSLPQFLTTGITHLLYKSGSTTEPKNYRPITCLSTVYKLLTSILRAKITEHIVGNSIMSASQNGCKNGSRGTKELLLIDVAISQQVRRSRKDLSTCWIDYKKAYDSVPHAWLTRVLELYKIDATLRTFLASCMGQWKTVLRYPGCRQIQGNDEPIWIKRGIFQGDSLSPLWFCLALNPLSTLLEDSGLGYRLKRGGQVISHLLYMDDLKLFAPNNLRLMELLKITESFSSAIRMEFGVDKCAVMHVKRGEIVESEGIQLSDSIHLRSLSSSENYKYLGMSEALGINATDMKQSLKERFFGRLKKVLNCLLSGGNKVRAFNGWVMPVLMYSFGILKWTQTELDALDRRVRTLLTANRMHHPRSSVMRLYIPRKCGGRGLLNAKTLHNREVCNLRDYFLKTEVGMHRDVVAVDKGLTPLSMAKENWRKPVVLTTDNRKQVWQSKELHGRFYRALHGPDVDFLASVSWLRFGDLFGETEGFVCAIMDEVILTNNYRKHIMKDGTVDMCRACHRPGESIRHIISGCSRLANGEYLHRHNQVARIIHQQLALRYKLVESEVPYYKYVPDPVLQDDHVTLYWDRSIITDRTIVANKPDIVVIDRLARRAMIVDVTIPHDENLVKAEKEKQIKYLDLAHEVVDMWNVDSAVIVPIVVTANGLLAKSLDDHLSRLSLHGWIKGLIQKAVLLDTARIVRRFLSLQP

SEQ ID NO: 28836 - protein, 1199 aa, Xestia xanthographa
MLTRAAARRARLPSPESSLSSASPPPDPGSPVSPVAAVASSSSDEYFSPPTSPPPVRRAGRGRPPTSLGLRGQQAPSRVPATGVCVQRMKWTQSINENVMRAYYGSTEGGTNLTAYRVRMLSLFQDLEPTVNVSAQRLSDQVRVIQRNHRLDDAALDRLRSEVLSNLIILTPTQTAVHTLVNNVTLPRSNPDVVEEDDRVATVSSQCNYRLRSALEDAFREYRSTPTELRPRLPRLPMHKKNRALVCALDSQLKNIFESSENLVDTHSILFCGAVAACRLANVKFPNCDVATRPKPAVPAWQCRIERRIDEARVLIGKLYCFREGNTRPRVMRFVRRAFSGTEISPQEYMSRVTERIDFLKQKVYAWANRIRRYKRRVDRYSQNRMFQSDERWVYRAWERPEQNMTDVCRPDDAATSSFWRSIWSVPVCHTESDWMRDVERVCEPIPEMEPILITPLDIAKAVRPLPNWKSPGPDGLHNFWLKWFSSSHTCLASQFQSSLESGSLPQFLTTGVTHLLHKSGSPAEPKNYRPITCLSTIYKLLTSILRVKINTHIDKNSIMSASQNGCRNGSRGTKELLLIDMAISQQVRRSRKDLSTCWIDYKKAYDSVPHTWLMRVLELYKIDATLRAFLESCMGQWKTVLQYPGCRQIQGSDEPVWIKRGIFQGDSLSPLWFCLALNPLSTLLENSGLGCRLRKDGQVISHLLYMDDLKLFAPNKLRLMELLKVTETFSSAIRMEFGVDKCAVMYVKRGEIMESEGLQLSDSIHLRSLSSSETYKYLGMSEALGINVTDMKQSLKERFFGRLRKVLNSLLSGGNKVRAFNGWVMPVLMYSFGILKWTQTELDALDRRVRTLLTETRMHHPRSSVMRLYIPRKCGGRGFLNAKTLHNREVCSLREYFLKAEVGMHRDVVAVDKGLTPLSMAKENWHKPEVLTTDDRKEVWQGKELHGRFYRALHGPDVDFIASVFWLRFGDLFGETEGFVCAIMDEVMLTNNYRKYIMKDGTVDVCRACHLPGESIRHIISGCSRLANGEYLHRHNQVARIIHQQLALKYKLVESEVPYYKYVPDPVLEKDHVTLYWDRSIITDRTIVANKPDIVMIDRSARRVMIIDVTIPHDENLVKAEKEKQIKYLDLAHEVRDMWNMNSVIIVPIVVTANGLIAKSFDDHISKLSLGGWIKGLIQKAVLLDTARIVRRFLSLQP

SEQ ID NO: 28837 - protein, 1199 aa, Xestia xanthographa
MITRAAARRAHLPTPDSSLSSASPPPDPGSPVSPVAAVASSSSDEYFSAPTSPPPVRRAGRGRPPKSLGLRGQQTPSRVPATGGCVQRMKWTQSMNENVMRAYYGSTEGGTNLTAYRVRMLSLFQGLEPTVNVSAQRLSDQVRVIQRSHRLDDAALDRLRSEVLSNLIVLTPTQTAVQVSAIDATPPRLNPVVVEEDDGVATVSSQCNDRLRSALENALHEYRSTPTELRPRLPRLPMHKTNRALVCALDSQLKNIFESSENLVDTHSILFCGAVAACRLANVKFPNCDVANRPKPAVPAWQRRIERRIDGARVLIGKLYCFREGNTRPRVMRFVRRAFSGTEISPQEYMSRVTERIDFLKQKVYAWANRIRRYKRRVDRYSQNRMFQSDERWVYRAWERPEQNMTDVCRPDDAATSSFWRSIWSVPVCHTEADWMRDVERVCEPIPEMEPIFITPLDVARAVRPLPNWKSPGPDGLHNFWLKWFSSSHTCLASQFQSSLESGSLPQFLTTGVTHLLHKSGSPAEPKNYRPITCLSTIYKLLTSILRVKINTHIDKNSIMSASQNGCRNGSRGTKELLLIDMAISQQVRRSRKDLSTCWIDYKKAYDSVPHTWLMRVLELYKIDTTLRTFLESCMGQWRTVLRYPGCRQIQGSDDPVWIKRGIFQGDSLSPLWFCLALNPLSTLLENSGLGCRLRKDGQVISHLLYMDDLKLFASNKLRLMELLKVTETFSNAIRMEFGVDKCAVMYVKRGEIMESEGLQLSDSIQLRSLSSSETYKYLGMSEALGINITDMKQSLKERFFSRLRNVLNSLLSGGNKVRAFNGWVMPVLMYSFGILKWTQTELDALDRRVRTLLTGSRMHHPRSSVMRLYIPRKCGGRGFLNAKTLHNREVCSLREYFLKAEVGMHRDVVAVDKGLTPLSMAKENWHKPEVLTTDDRKEVWQGKELHGRFYRALHGPDVDFLASVSWLRFGDLFGETEGFVCAIMDEVMLTNNYRKYIMKDGTVDMCRACHLPGESIRHIISGCSRLANGEYLHRHNQVARIIHQQLALKYKLVESEVPYYKYVPDPVLESDHVTLYWDRSVITDRTVVANKPDIVMIDRSARRVMIIDVTIPHDENLVKAEKEKQIKYLDLAHEVRDMWNMNSVIIVPIVVTANGLIAKSFDDHLSKLSLGGWIKGLIQKAVLLDTARIVRRFLSLQP

SEQ ID NO: 28838 - protein, 1202 aa, Cosmia trapezina
MLTRSAARARPPPPDSSLSSASPPPVSSPIVGAVITPAAAVASSSSDEYFSPPTSPTPVRRQGRGRPPRSLGLRGQPAPSRVPAAGGCVQRMRWTQSMNENVMRAYYGSTEGGTNLTAYRVRMLSLFQELEPTVNVSAQRISDQVRVIQRNHRLDDAALDRLRSEVLSNHIISNPTQTAVQPSIIDALPPRSNHVVEEEDDRVATVSSQCNDRLRDALEDAFCEYRSTPTELRPRLPRLPMHKKNRALMCALDSLLKDFFESSENLVDTHSILYCAAVAACRLANVKFPNCDGATRPKPAVPAWQCRIERRIDGARVLIGKLYCFRQGNTRPRVMRFVRRAFSGTGISPPEYMSRVTERIDFLKQKVCAWASRIRRYKRRVDRYTQNRMFQSDERWVYRAWERPEQNMTDVCRPDDAATSAFWRSIWSVPVCHAEAGWMKDVERVCEAIPEMEPVLITPLDVARAVRPLPNWKSPGPDGLHNFWLKWLISSHTRLASQFQSSLESGSLPQFLTTGVTHLLHKSGSPAEPKNYRPITCLSTIYKLLTSILRAKINMHIDSNSIMSTSQNGCRNGSRGTKELLLIDMAINQQVRRSRKDLSTCWIDYKKAYDSVSHAWLMRVLELYKIDATLRTFLESCMGQWRTVLRYPGCRRIRGNDEPVRIKRGIFQGDSLSPLWFCLALNPLSTLLEDSGLGYRLRRGGQVISHLLYMDDLKLFAPNKLRLMELLKVTESFSSAIRMEFGVDKCAVMHVKRGEIMESEGIQLSDSIHLRSLSSSETYKYLGMSEALGINVADMKQSLRERFFGRLKKVLISLLSGGNKVRAFNGWVMPVLMYSFGILKWTQTELDALDRRVRTLLTANRMHHPRSSVMRLYIPRKCGGRGFLNAKTLHNREVCSLREYFLKSDVGMHRDVVAVDKGLTPLSMAKENWRKPVVLTTDDRKKVWQSKELHGRFYRALHEPSVDFLASVSWLRFGDLFGETEGFVCAIMDEVILTNNYRRYIMKDGTVDVCRACHRPGESIRHIISGCSRLANGEYLHRHNQVARIIHQQLALKYKLVDSEVPYYKYVPDPVLENDHVTLYWDRSIITDRTIVANKPDIVVIDRLARRAMIVDVTIPHDGNLVKAEKEKQIKYLDLAHEVVDMWNVDSAVIVPIVVTANGLIADSLDQHLSRLSLGGWIKGQIQKAVLLDTARIVRRFLSLQP

SEQ ID NO: 28839 - protein, 1199 aa, Mamestra brassicae
MITRAAARRAHPPPPGSSLSSASPTPDIGSQVSPVVAVASSSSDEYFSPPTSPTPVRRQGRGRPPRSLGSRGQPALSRVPAAGGCVQRMRWTQSMNENVMRAYYGSTEGGTNLTAYRVRMLSLFQDLEPTVNVSAQRLSDQVRVIQHNCRLDDAALERLRSEVLSNLIISTPTQTVVQAPASGAITPRPNNGSDEVDDRVVTVSSQCNDRLRSALEDALREYRLTPTELRPRLPRLPMHKKNRALVCALDSLLQNIFESSESLVDTHSILFCGAVAACRIANVKFPSCDEAIRPKPAAPAWQCRIERRIDEARALIGKLYCFREGNTRPRVMRFVRRAFSGTGISSREYTFRVTERIDFLKQKVCAWANRIRRYKRRVDRYSQNRMFQSDERWVYRAWERPEQSVTDVYRPDDVATSTFWRSIWSVPICHAEGGWMRDVERVCEAIPQMEKITITTLDIAKAVRPLPNWKSPGPDGLHNFWLKWYSSSHALLASQFQSSLESGSLPQFLTTGITHLLHKTGSPAEPKNYRPITCLSTVYKLLTSILRAKINEHIESNSIMSASQNGCRKGSRGTKELLLIDMAISQQVRRSRKDLSTCWIDYKKAYDSVPHTWLMKVLELYKIDATLRTFLESCMRQWKTVLRYPGCQPIQGSDEPVWIKRGIFQGDSLSPLWFCLALNPLSTLLEDSGLGYRLRRGGQAISHLLYMDDLKLFAPNNLRLMELLKVTETFSSAIRMEFGVDKCAVMHVKKGEIMESEGIQLSDSIQVRSLSSTESYKYLGMSEALGINGTDMKQSLRERFFGRLKKVLNSLLSGGNKVRAFNGWVMPVLMYTFGILKWTQTELDALDRRVRTLLTANRMHHPRSSVMRLYIPRKWGGRGFLNAKTLHNREMCSLREYFLKADVGMHRDVVAVDKGLTPLSMAKENWRKPVILTTDDRKEVWKGKELHGRFYRALYGSDVDFSASVAWLRFGDLFGETEGFVCAIMDEVILTNNYRKHIMKDGTVDVCRACHRPGESIRHIISGCSRLANGEYLHRHNQVARIIHQQLALKYKLLDSEVPYYKYVPDPVLENDHVTLYWDRSIITDRTIVANKPDIVVIDRLARRTMIIDVTIPHDENLVKAEKEKQIKYLDLAHEVVDMWNVDSAVIVPIVITANGLIAKSFDDHLSKLALRGWIKGLIQKAVLLDTARIVRRFLSLEP

SEQ ID NO: 28840 - protein, 1199 aa, Mamestra brassicae
MLTRAALQRARPPPPDPSLSSASPPPDIGSPLSPAVAVASSSSDEYFSPPTSPTPVRRQGRGRPPRGLGPRGQPAPSRVPATGGCVQRMRWTQSMNENVMRAYYGSTEGGTNLTAYRVRMLSLFQDLEPTVNVSAQRLSDQVRVIQRNHRLDDAALDRLRSEVLNNLIISTPTQTAVQAPVNGRITPRPNNVSDEVDDRVVTVSSQCNDRLRSALEDALREYRSTPTELRPRLPRLPMHKKNRALVCALDSLLQNIFESSESLVDTHSILYCGAVAACRIANVKFPGCDEAIRPKPAAPAWQRRIERRIDETRALIGKLYCFREGNTRPRVMRFVRRAFSGTEISPRDFTSRVTERIDFLKQKVCAWASRIRRYKRRVDRYSQNRMFQSDERWVYRAWERPEQSVTDVCRPDDVATSIFWRSIWSVPICHAEGGWMRDVERVCEAIPQMEKITITTLDVAKAVRPLPNWKSPGPDGLHNFWLKWYSSSHALLASQFQSSLDSGSLPQFLTTGVTHLLHKTGSPAEPKNYRPITCLSTVYKLLTSILRAKINEHIESNSIMSASQNGCRKGSRGTKELLLIDMAISQQVRRSRKDLSTCWIDYKKAYDSVPHTWLMKVLELYKIDATLRTFLESRMRQWKTVLRYPGCRPIQGSDEPVWIKRGIFQGDSLSPLWFCLALNPLSTLLEDSGLGYRLRRGGQAISHLLYMDDLKLFAPNNLRLMELLKVTETFSSAIRMEFGVDKCAVMHVKKGEIMESEGIHLSDSIQVRSLSSTETYKYLGMLEALGINGTEMKQSLRERFFGRLKKVLNSLLSGGNKVRAFNGWVMPVLMYTFGILKWTQTELDALDRRVRTLLTANRMHHPRSSVMRLYIPRKCGGRGFLNAKTLHNREMCSLREYFLKADVGMHRDVVAVDKGLTPLSMAKENWRTPVILTTDDRKEVWKGKELHGRFYRALHGSDVDFSASVAWLRFGDLFGETEGFVCAIMDEVILTNNYRRHIMKDGTVDMCRACHRPGESIRHIISGCSRLANGEYLHRHNQVARIIHQQLALKYNLVDSEVPYYKYVPDPVLENDHVTLYWDRSIITDRTIVANKPDIVVIDRLARRTMIIDVTIPHDENLVKAEKEKQIKYLDLAHEVVDMWNVESAVIVPIVVTANGLMAKSFDDHLSKLALRSWVKGLIQKAVLLDTARIVRRFLSLEP

SEQ ID NO: 28841 - protein, 1199 aa, Mamestra brassicae
MLTRAALQRARPPPPDPSLSSASPPPDIGSPLSPAVAVASSSSDEYFSPPTSPTPVRRQGRGRPPRGLGPRGQPAPSRVPATGGCVQRMRWTQSMNENVMRAYYGSTEGGTNLTAYRVRMLSLFQDLEPTVNVSAQRLSDQVRVIQRNHRLDDAALDRLRSEILNNLIISTPTQTAVQAPVNGRITPRPNNVSDEVDDRVVTVSSQCNDRLRSALEDALREYRSTPTELRPRLPRLPMHKKNRALVCALDSLLQNIFESSESLVDTHSILYCGAVAACRIANVKFPGCDEAIRPKPAAPAWQRRIERRIDETRALIGKLYCFREGNTRPRVMRFVRRAFSGTEISPRDFTSRVTERIDFLKQKVCAWASRIRRYKRRVDRYSQNRMFQSDERWVYRAWERPEQSVTDVCRPDDVATSIFWRSIWSVPICHAEGGWMRDVERVCEAIPQMEKITITTLDVAKAVRPLPNWKSPGPDGLHNFWLKWYSSSHALLASQFQSSLDSGSLPQFLTTGVTHLLHKTGSPTEPKNYRPITCLSTVYKLLTSILRAKINEHIESNSIMSASQNGCRKGSRGTKELLLIDMAISQQVRRSRKDLSTCWIDYKKAYDSVPHTWLMKVLELYKIDATLRTFLESCMRQWKTVLRYPGCRPIQGSDEPVWIKRGIFQGDSLSPLWFCLALNPLSTLLEDSGLGYRLRRGGQAISHLLYMDDLKLFAPNNLRLMELLKVTETFSSAIRMEFGVDKCAVMHVKKGEIMESEGIHLSDSIQVRSLSSTETYKYLGMLEALGINGTDMKQSLKERFFGRLKKVLNSLLSGGNKVRAFNGWVMPVLMYTFGILKWTQTELDALDRRVRTLLTANRMHHPRSSVMRLYIPRKCGGRGFLNAKTLHNREMCSLREYFLKADVGMHRDVVAVDKGLTPLSRAKENWRTPVILTTDDRKEVWKGKELHGRFYRALHGSDVDFSASVAWLRFGDLFGETEGFVCAIMDEVILTNNYRRHIMKDGTFDMCRACHRPGESIRHIISGCSRLANGEYLHRHNQVARIIHQQLALKYNLVDSEVPYYKYVPDPVLENDHVTLYWDRSIITDRTIVANKPDIVVIERLARRTMIIDVTIPHDENLVKAEKEKQIKYLDLAHEIVDMWNVESAVIVPIVVTANGLMAKSFDDHLSKLALRSWVKGLIQKAVLLDTARIVRRFLSLEP

SEQ ID NO: 28842 - protein, 1199 aa, Noctua fimbriata
MITRAAYRRARLTTPDTPLSSASPPPDPGSPVLPAAAVASSSSDEYFSPPTSPTPVRRQGRGRPPRSLGLRGHPAPSRVPAAGGCVQRMRWTHSINENVMRAYYGSTEGGTNLTAYRVRMLSLFQVLEPTVNVSAQRLSDQVRVIQRNHMLDDAVLDRLRSEVLSNRVILTPAQTAVQASVIDATPPRFNTAVVEEDSRVAVVSSQCNDRLRSALEDALREYRSTPTEFRPRLPRLPMHNKNRALVCALDSQLKNIFESSENLVDTHSILYCGAVAACRLANVKFPNCDVATRPKPAVPAWQCRIERRIDGARVLIGKLHCFREGNTRPRVMRFVRRAFSGTGISPQEYMSRVTERIDFLKQKVYAWANRIRRYKRRVDRYSQNRMFQSDERWVYRAWERPEQNITDVCRPDDAATSSFWRSIWSVPVCHTEADWMRDVEQVCEPIPEMKPILITPLDVARAVRPLPNWKSLGPDGLHNFWLKWLSSSHTCLASQFQSSLESGSLPQFLTTGVTHLLHKSGSPAEPKNYRPITCLSTVYKLLTSILRAKINTHIDKNSIMSASQNGCRNGSRGTKELLLIDMAISQQVRRSRKDLSTCWIDYKKAYDSVPHTWLMRVLELYKIDATLRAFLESCMGQWRTVLRYPGCQQIQGNDEPVWIKRGIFQGDSLSPLWFCLALNPLSTLLEDSGLSYRLRRGGQVISHLLYMDDLKLFAPNKLRLMELLKVTETFSSAIRMEFGVDKCAVMYVKQGEIMESEGIQLSDSIHLRTLSSTESYKYLGMSEALGINVTDMKQSLKERFFGRLNKVLHSLLSGGNKVRAFNGWVMPVLMYSFGVLKWTQTELDALDRRVRTLLTANRMHHPRSSVMRLYIPRKCGGRGFLNAKSLHNREMCSLREYFLKIEVGMHRDVVAVDKGLTPLSMAKENWRKPEVLTTDDRKEVWQGKELHGRFYRALHGPDVDFLASVSWLRFGDLFGETEGFVCAIMDEVMLTNNYRKYIMKDGTVDVCRACHRPGESIRHIISGCSRLANGEYLHRHNQVARIIHQQLALKYKLVESEVPYYKYVPDPVLEKDHVTLYWDQSIITDRTIVANKPDIVVIDRSARRVMIVDVTIPHDENLVKAEKEKQIKYLDLAHEVVDMWNVNSAIIVPIVVTANGLIAKSLDDHLSKLSLGGWIKGLIQKAVLLDTARIVRRFLSLEP

SEQ ID NO: 28843 - protein, 1050 aa, Noctua fimbriata
MLDDAVLDRLRSEVLSNRIVLTPAQTAVQASVIDATPPRFNPAVVEEDDRVAVVSSQCNDRLRSALEDALREYRSTPTELRPRLPRLPMHNKNRALVCALDSQLENIFESSENLVDTHSILYCGAVAACRLANVKFPNCDVATRPNPAVPAWQRRIERRIDGARVLIGKLHCFREGNTRPRVMRFVRRAFSGTGISPQEYMSRVTERIDFLKQNVYAWANRIRRYKRRVDRYSQNRMFQSDERWVYRAWERPELNMTDVCRPDDAATSSFWRSIWSVPVCHTEADWMRDVERVCEPIPEMEQILITPLDIARAVRPLPNWKSPGPDGLHNFWLKWLSSSHTCLASQFQSSLESGSLPQFLTTGVTHLLHKSGSPAEPKNYRPITCLSTVYKLLTSILRAKINTHIDKNSIMSASQNGCRNGSRGTKELLLIDMAISQQVRRSRKDLSTCWIDYKKAYDSVPHTWLMRVLELYKIDATLRAFLESCMGQWRTVLRYPGCRQIQGNDEPVWIKRGIFQGDSLSPLWFCLALNPLSTLLEDSGLGYRLRRGGQVISHLLYMDDLKPFAPNKLRLMELLKVTETFSSAIRMEFGVDKCAVMYVKQGEIMESEGIQLSDSIHLRTLSSTESYKYLGMSEALGINVTDMKQSLKERFFGRLNKVLHSLLSGGNKVRAFNGWVMPVLMYSFGVLKWTQTELDALDRRVRTLLTANRMHHPRSSVMRLYIPRKCGGRGFLNAKSLHNREMCSLREYFLKVEVGMHRDVVAVDKGLTPLSMAKENWRKPEVLTTDDRKEVWQGKELHGRFYRALHGPDVDFLASVTWLRFGDLFGETEGFVCAIMDEVMLTNNYRKYIMKDGTVDVCRACHRPGESIRHIISGCSRLANGEYLHRHNQVARIIHQQLALKYKLVESEVPYYKYVPDPVLEKDHVTLYWDQSIITDRTIVANKPDIVVIDRSARRVMIVDVTIPHDENLVKAEKEKQIKYLDLAHEVVDMWNVNSAIIVPIVVTANGLIAKSLDDHLSRLSLGGWIKGLIQKAVLLDTARIVRRFLSLEP

SEQ ID NO: 28844 - protein, 1202 aa, Noctua fimbriata
MITRAASRRARLPPPDQSLSSASPPPESSPIVSAVTPAVAVASSSSDEYFSPPTSPTPVRRQGRGQPPRSLGLRGHPAPSRVPAAGGCVQRMRWTHSINENVMRAYYGSTEGGTNLTAYRVGMLSLFQVLEPTINVSAQRLSDQVRVIQRNHMLDDAVLDRLRSEVLSNRIVFTPAQTAVQASVIDATPPRFNPAVVEEDDRVAVVSSQCNDRLRSALEDALREYRSTPTELRPRLPRLPMHNKNRALVCALDSQLKNLFESSENLVDTHSILYCGAVAACRLANVKFPNCDVATRPKPAVSAWQRRIECRIDGARVLIGKLHCFREGNTRPRVMRFVRRAFSGTGISPQEYMSRVTERIDFLKQKVYAWANRIRRYKRRVDRYSQNRMFQSDERWVYRAWERPDQNMTDMYRPDDAATSSFWRSIWSVPVCHTEADWMRDVEQVCEPIPEMEPILITPLDVARAVRPLPNWKSPGPDGLQNFWLKWLSSSHTCLASQFQSSLESGSLPQFLTTGVTHLLHKSGSPAEPKNYKPITCLSTVYKLLTSILRAKINTHIDKNSIMSASQNGCRNGSRATKELLLIDMAISQQVRRSRKDLSTCWIVYKKAYDSVPHTWLMRVLELYKIDATLRAFLESCMGQWRTVLRYPGCRQIQGNDEPVWIKRGIFQGDSLSPLWFCLALNPLSTLLEDSGLGYRLRRGGQVISHLLYMDDLKLFAPNKLQLMELLKVTETFSSAIRMEFGVDKCAVMYVKQGEIMESEGIQLSDSIHLRTLSSTESYKYLGMSEALGINVTDMKQSLKERFFGRLNKVLHSLLSGGNKVRAFNGWVMPVLMYSFGVLKWTQTELDALDRRVRTLLTANRMHHPRSSVMRLYIPRKCGGRGFLNAKSLHNREMCSLREYFLKVEVGMHRDVVAVDKGLTPLSMAKENWRKPEVLTTDDRKEVWQGKELHGRFYRALHGPDVDFLASVSWLRFGDLFGETEGFVCAIMDEVMLTNNYRKYIMKDGTVDVCRACHRPGESIRHIISGCSRLANGEYLHRHNQVARIIHQQLALKYKLVESEVPYYKYVPDPVLKKDHVTLYWDQSIITDRTIVANKPDIVVIDRSARRVMIVDVTIPHDENLVKAEKEKQIKYLDLAHEVVDMWNVNSAIIVPIVVTANGLIAKSLDDHLSKLSLGGWIKGLIQKAVLLDTARIVRRFLSLEP

SEQ ID NO: 28845 - protein, 1202 aa, Noctua fimbriata
MITRAASRRARLPPPDQSLSSASPPPESSPIVSAVTPAVAVASSSSDEYFSPPTSPTPVRRQGSGRPPRSLGLRGHPAPSRVPAAGGCVQRMRWTHSINENVMRAYYGSTEGGTNLTAYRVGMLSLLQVLEPTINVSAQRLSDQVRVIQRNHMLDDAVLDRLRSEVLSNRIVFTPAQTAVQASVIDATPPRFNPAVVEEDDRVAVVSSQCNDRLRSALEDALREYRSTPTELRPRLPRLPMHNKNRALVCALDSQLKNLFESSENLVDTHSILYCGAVAACRLANVKFPNCDVATRPKPAVPAWQRRIECRIDGARVLIGKLHCFRESNTRPRVMRFVRRAFSGTGISPQEYMSRVTERIDFLKQKVYAWANRIRRYKRRVDRYSQNRMFQSDERWVYRAWERPDQNMTDMCRPDDAATSSFWRSIWSVPVCHTEADWMRDVEQVCEPIPEMEPILITPLDVARAVRPLPNWKSPGPDGLHNFWLKWLSSSHTCLASQFQSSLESGSLPQFLTTGVTHLLHKSGSPAEPKNYRPITCLSTVYKLLTSILRAKINTHIDKNSIMSASQNGCRNGSRATKELLLIDMAISQQVRRSRKDLSTCWIDYKKAYDSVPHTWLMRVLELYKIDATLRAFLESCMGQWRTVLRYPGCRQIQGNDEPVWIKRGIFQGDSLSPLWFCLALNPLSTLLEGSGLGYRLRRGGQVISHLLYMDDLKLFAPNKLQLMELLKVTETFSSAIRMEFGVDKCAVMYVKQGEIMESEGIQLSDSIHLRTLSSTESYKYLGMSEALGINVTDMKQSLKERFFGRLNKVLHSLLSGGNKVRAFNGWVMPVLMYSFGVLKWTQTELDALDRRVRTLLTANRMHHPRSSVMRLYIPRKCGGRGFLNAKSLHNREMCSLREYFLKVEVGMHRDVVAVDKGLTPLSMAKENWRKPEVLTSDDRKEVWQGKELHGRFYRALHGPDVDFLASVSWLRFGDLFGETEGFVCAIMDEVMLTNNYRKYIMKDGTVDVCRACHRPGESIRHIISGCSRLANGEYLHRHNQVARIIHQQLALKYKLVESEVPYYKYVPDPVLEKDHVTLYWDQSIITDRTIVANKPDIVVIDRSARRVMIVDVTIPHDENLVKAEKEKQIKYLDLAHEVVDMWNVNSAIIVPIVVTANGLIAKSLDDHLSKLSLGGWIKGLIQKAVLLDTARIVRRFLSLEP

SEQ ID NO: 28846 - protein, 1202 aa, Noctua fimbriata
MITRAASRRARLPPPDQSLSSASPPPESSPIVSAVTPAVAVASSSSDEYFSPPTSPTPVRRQGRGRPPRSLGLRGHPAPSRVPAAGGCVQRMRWTHSINENVMRAYYGSTEGGTNLTAYRVGMLSLFQVLEPTINVSAQRLSDQVRVIQRNHMLDDAVLDRLRSEVLSNRIVFTPAQTAVQASVIDATPPRFNPAVVEEDDRVAVVSSQCNDRLRSALEDALREYRSTPTELRPRLPRLPMHNKNRALVCALDSQLKNLFESSENLVDTHSILYCGAVAACRLANVKFPNCDVATRTKPAVPAWQRRIECRIDGARVLIGKLHCFREGNTRPRVMRFVRRAFSGTGISPQEYMSRVTERIDFLKQKVYAWANRIRRYKRRVDRYSQNRMFQSDERWVYRAWERPDQNMTDMCRPDDAATSSFWRSIWSVPVCHTEADWMRDVEQVCEPIPEMEPILITPLDVARAVRPLPNWKSPGPDGLHNFWLKWLSSSHTCLASQFQSSLESGSLPQFLTTGVTHLLHKSGSPAEPKNYRPITCLSTVYKLLTSILRAKINTHIDKNSIMSASQNGCRNGSRATKELLLIDMAISQQVRRSRKDLSTCWIDYKKAYDSVPHTWLMRVLELYKIDATLRAFLESCMGQWRTVLRYPGCRQIQGNDEPVWIKRGIFQGDSLSPLWFCLALNPLSTLLEDSGLGYRLRRGGQVISHLLYMDDLKLFAPNKLQLMELLKVTETFSSAIRMEFGVDKCAVMYVKQGEIMKSEGIQLSDSIHLRTLSSTESYKYLGMSEALGINVTDMKQSLKERFFGRLNKVLHSLLSGGNKVRAFNGWVMPVLMYSFGVLKWTQTELDALDRRVRTLLTANRMHHPRSSVMRLYIPRKCGGRGFLNAKSLHNREMCSLREYFLKVEVGMHRDVVAVDKGLTPLSMAKENWRKPEVLTTDDRKEVWQGKELHGRFYRALHGPDVDFLASVSWLRFGDLFGETEGFVCAIMDEVMLTNNYRKYIMKDGTVDVCRACHRPGESIRHIISGCSRLANGEYLHRHNQVARIIHQQLALKYKLVESEVPYYKYVPDPVLEKDHVTLYWDQSIITDRTIVANKPDIVVIDRSARRVMLVDVTIPHDENLVKAKKEKQIKYLDLAHQVVDMWNVNSAIIVPIVVTANGLIAKSLDDHLSKLSLGGWIKGLIQKAVLLDTARIVRRFLSLEP

SEQ ID NO: 28847 - protein, 961 aa, Noctua fimbriata
MHNKNRALVALDSQLKNILFESSENLVDTHSILYCGAVAACRLANVKFPNCDVTRPKPAVPAWQRRIERRIDGARVLIGKLHCFREGNTRPRVMRFVRRAFSGTGISPQEYVYRVTERIDFLKQKVYAWANRIRRYKRRVDRYSQNRMFQSDERWVYRAWERPELNMTDVCRPDDAATSSFWRSIWSVPVCHTEADWMRDVERVCEPIPEMEPILITLLDIARAVRPLPNWKSPGPDGLHNFWLKWLSSSHTCLASQFQSSLESGSLPQFLTTGVTHLLHKSGSPAEPKNYRPITCLSMVYKLLTSILRAKINTHIDKNSIMSASQNGCRNGSRGTKELLLIDMAISQQVRRSRKNLSTCWIDYKKAYDSVPHTWLMRVLELYKIDATLRAFLESCMGQWRTVLRYPGCPQIQRNDEPVWIKRGIFQGDSLSPLWFCLALNPLSTLLEDSGLGYQLRRGGQVISHLLYMDDLKLFAPNKLRLMELLKVTETFSSAIRMEFGVDKCAVMYVKRGEIMESEGIQLSDSIHLRSLSSSESYKYLGMSEALGINVTDMKQSLKERFFGRLNKVLHSLLSGGNRVRAFNGWVMPVLMYSFGVLKWTQTELDALDRRVRTLLTANRMHHPRSSVMRLYIPRKCGGRGFLNAKSLHNREMCSLREYFLKAEVGMHRDVVAVDKGLTPLSMAKENWRKPEVLTTDDRKEVWQGKELHGRFYRALHGPDVDFLASVSWLRFGDLFGETEGFVCAIMDEVMLTNNYRKYFMKDGTVDVCRACHRPGESIRHIISGCSRLANGEYLHRHNQVARIIHQQLALKYKLVESEVPYYKYVPDPVLEKDHVTLYWDESIITDRTIVANKPDIVVIDRSARRVMIVDVTIPHDENLVKAEKEKQIKYLDLAHEVVDMWNVNSAIIVPIVVTANGLKVKSLDDHLSRLSLRGWIKGLIQKAVLLDTARIVRSFLSLEP

SEQ ID NO: 28848 - protein, 984 aa, Noctua fimbriata
MRFVNIDPLLPNLGPDYHGYPCIIKIGRWCVPWTHNSRIYSRVARTSLIHTHSILYCGAVAACRLANVKFPNCDVATRPKPAVPAWQRRIERRIDGARVLIGKLHCFREGNTRPRVMRFVRRAFSGTGISPQEYMSRVTERIDFLKQKVYAWANRIRRYKRRVDRYSQNRMFQSDERWVYRTWERPELNMADVCRPDDATTSSFWRSIWSVPVCHTEADWMHDVERVCEPIPEMEPVLITPLDIARAVRPLPNWKSPGPDGLHNFWLKWLSSSHTCLASQFQSSLESGSFPQFLTTGVTHLLHKSGSPAEPKNYRPITCLSTVYKLLTSILRAKINTHIDKNSIMSASQNGCRNGSRGTKELLLIDMAISQQVRRSRKDLSTCWIDYKKAYDSVPHTWLMRVLELYKIDATLRAFLESCMGQWRTVLRYPGCRQIQGNDEPVWIKRGIFQGDSLSPLWFCLALNPLSTLLEDSGLGYRLRRGGQVISHLLYMDDLKLFAPNKLRLMELLKVTETFSSAIRMEFGVDKCAVMYVKQGEIMESEGIQLSDSIHLRTLSSTESYKYLGMSEALGINVTDMKQSLKERFFGRLNKVLHSLLSGGNKVRAFNGWVMPVLMYSFGVLKWTQTELDALDRRVRTLLTANRMHHPRSSVMRLYIPRKCGGRGFLNAKSLHNREICSLREYFLKVEVGMHRDVVAVDKGLTPLSMAKENWRKPEVLTTDDRKEVWQGKELHGRFYRALHGPDVDFLASVSWLRFGDLFGETEGFVCAIMDEVMLTNNYRKYIMKDGTVDVCRACHRPGESIRHIISGCSRLANGEYLHRHNQVARIIHQQLALKYKLVESEVPYYKYVPDPVLEKDHVTLYWDQSIITDRTIVANKPDIVVIDRSARRVMIVDVTIPHDENLVKAEKEKQIKYLDLAHEVVDMWNVNSAIIVPIVVTANGLIAKSLDDHLSRLSLGGWIKGLIQKAVLLDTARIVRRFLSLEP

SEQ ID NO: 28849 - protein, 1202 aa, Noctua fimbriata
MITRAASRRARLPPPDQSLSSASPPPESSPIVSAVTPAVAVASSSSDEYFSPPTSPTPVRRQGRGRPPRSLGLRGHPAPSRVPAAGGCVQRMRWTHSINENVMRAYYGSTEGGTNLTAYRVGMLSLFQVLEPTINVSAQRLSDQVRVIQRNHMLDDAVLDRLRSEVLSNRIVFTPAQTAVQASVIDATPPRFNPAVVEEDDRVAVVSSQCNDRLRSALEDALREYRSTPTELRPRLPRLPMHNKNRALVCALDSQLKNLFESSENLVDTHSILYCGAVAACRLANVKFPNCDVATRPKPAVPAWQRRIECRIDGARVLIGKLHCFREGNTRPRVMRFVRRAFSGTGISPQEYMSRVTERIDFLKQKVYAWANRIRRYKRRVDRYSQNRMFQSDERWVYRAWERPDQNMTDMCRPDDAATSSFWRSIWSVPVCHTEADWMRDVERVCEPIPEMEPILITPLDVARAVRPLPNWKSPGPDGLHNFWLKWLSSSHTCLASQFQSSLESGSLPQFLTTGVTHLLHKSGSPAEPKNYRPITCLSTVYKLLTSILRAKINTHIDKNSIMSASQNGCRNGSRGTKELLLIDMAISQQVRRSRKDLSTCWIDYKKAYDSVPHTWLMRVLELYKIDATLRAFLESCMGQWRTVLRYPGCRQIQGNDEPVWIKRGIFQGDSLSPLWFCLALNPLSTLLEDSGLGYRLRRGGQVISHLLYMDDLKLFAPNKLRLMELLKVTETFSSAIRMEFGVDKCAVMYVKQGEIMESEGIQLSDSIHLRTLSSTESYKYLGMSEALGINVTDMKQSLKERFFGRLNKVLHSLLSGGNKVRAFNGWVMPVLMYSFGVLKWTQTELDALDRRVRTLLTANRMHHPRSSVMRLYIPRKCGGRGFLNAKSLHNREICSLREYFLKVEVGMHRDVVAVDKGLTPLSMAKENWRKPEVLTTDDRKEVWQGKELHGRFYRALHGPDVDFLASVSWLRFGDLFGETEGFVCAIMDEVMLTNNYRKYIMKDGTVDVCRACHRPGESIRHIISGCSRLANGEYLHRHNQVARIIHQQLALKYKLVESEVPYYKYVPDPVLEKDHVTLYWDQSIITDRTIVANKPDIVVIDRSTRRVMIVDVTIPHDENLVKAEKEKQIKYLDLAHEVVDMWNVNSAIIVPIVVTANGLIAKSLDDHLSRLSLGGWIKGLIQKAVLLDTARIVRRFLSLEP

SEQ ID NO: 28850 - protein, 1220 aa, Noctua fimbriata
MENRGKHTEKQLSPMITRSRAKQLQEAHTPSPGSSLSSASQPPRRATSVSTVSPVAAVASSSSDEFFSPPSTPPPSPRRRGRGRPPAGLGPRGQPAPNRVPAAGGNVSRMRWTQSINEQVMRAYYGATEGGTNLTAYRVGMLSLFQVLEPTVNVSAQRLSDQVRVIQRNHMLDDAVLDRLRSEVLSNRIVLTPAETAVQASVIDATPPRFNPAVVEEDDRVAVVSSQCNDRLRSALEDALREYRSTPTELRPRLPRLPMHNKNRALVCALDSQLENIFESSENLVDTHSILYCGAVAACRLANVKFPNCDVATRPKPAVPAWQRRIERRIDGARVLIGKLHCFREGNTRPRVIRFVRRAFSGTGISPQEYMSRVTERIDFLKQKVYAWANRIRRYKRRVDRYSQNRMFQSDERWVYRAWERPELNMTDVCRPDDAATSSFWRSIWSVPVCHTEADWMRDVERVCEPIPEMEPILITPLDIARAVRPLPNWKSPGPDGLHNFWLKWLSSSHTCLASQFQSSLESGSLPQFLTTGVTHLLHKSGSPAEPKNYRPITCLSTVYKLLTSILRAKINTHIDKNSIMSASQNGCRNGSRGTKELLLIDMAISQQVRRSRKDLSTCWIDYKKAYDSVPHTWLMRVLELYKIDATLRAFLESCMGQWRTVLRYPGCRQIQGNDEPVWIKRGIFQGDSLSPLWFCLALNPLSTLLEDSGLGYRLRRGGQVISHLLYMDDLKLFAPNKLRLMELLKVTETFSSAIRMEFGVDKCAVMYVKQGEIMQSEGIQLSDSIHLRTLSSTESYKYLGMSEALGINVTDMKQSLKERFFGRLNKVLHSLLSGGNKVRAFNGWVMPVLMYSFGVLKWTQTELDALDRRVRTLLTANRMHHPRSSVMRLYIPRKCGGRGFLNAKSLHNREMCSLREYFLKVEVGMHRDVVAVDKGLTPLSMAKENWRKPEVLTTDDRKEVWQGKELHGRFYRALHGPDVDFLASVSWLRFGDLFGETEGFVCAIMDEVMLTNNYRKYIMKDGTVDVCRACHRPGESIRHIISGCSRLANGEYLHRHNQVARIIHQQLALKYKLVESEVPYYKYVPDPVLEKDHVTLYWDQSIITDRTIVANKPDIVVIDRSARRVMIVDVTIPHDENLVKAEKEKQIKYLDLAHEVVDMWNVNSAIIVPIVVTANGLIAKSLDDHLSRLSLGGWIKGLIQKAVLLDTARIVRRFLSLEP

SEQ ID NO: 28851 - protein, 1202 aa, Atethmia centrago
MLTRSATRTRPPPPDPSLSSASPPPVPSATMSAMTTPTAAVASSSSDEYFSPPSSPTPVRRQERSRPPKSLGLRGHPAPSRVPAAGGCVQRMKWTQSMNENVMRAYYRSTEGGTNLTAYRVKMLSLFQELEPAVNVSAQRLSDQVRVIQRNRRLDDATLDRLRSEVLSNYIISTPAQTAVHTPIIDVIPPRSNHCVEEEDDRAATVSSQCNVRLRSALEDAFREYRSTPTELRPRLPRLPMHKKNRALMCALDSQLKVFFESSEDLVDTHSILYCAAVAACRLANVKFPNSDGATRPKPAVPAWQCRIERRIDKARVLIGKLYCFREGNTRPRVMRFVRRAFSGTGISPREYMSHITERIDFLKQKVCAWASRIRRYKRRVDRYTQNRMIQSDERWVYRAWEQPKQNVTDVCRPDDATTTAFWRSIWSVPVCHVEADWMRDVERVCETIPEMEVVIITLSDIARAVRPLPNWKSPGPDGLHNFWLKWLTSSHTCLASQFQSSLESGSLPQFMTTGITHLLHKSGSPAEPKNYRPITCLSTVYKLLTSILRAKINTHIDSNSIMSASQNGCRNGSRGTKELLLIDMAISQQVRRSRKDLSTCWIDYKKAYDSVPHTWLMRVLELYKIDTTLRTFLESCMGQWRTVLRYPGCRQIQGNDEPVWIKRGIFQGDSLSPLWFCLALNPLSMQLEDSGLGYRLRRGGQVISHLLYMDDLKIFAPNKLQLMKLLKVTETFSSAIRMEFGVDKCAVMHVKRGEIMESEGIQLSDSIHLRSLSSPESYKYLGMSEALGINVTDMKQSLKERFFGRLKKVLISLLSGGNKVRAFNGWVMPVLMYSFGILKWTQTELDALDRRVRTLLTANRMHHPRSSVMRLYIPRKCGGRGFLNAKTLHNREICSLREYFLKTEVGMHRDVVAVDKGLTPLSMAKENWCKPVVLTTDDRKEIWQSKELHGRFYRALHEPDVDFLASVSWLRFGDLFGETEGFVCAIMDEVILTNNYRRHIMKDGTVDVCRACHRPGESIRHIISGCSRLANGEYLHRHNQVARIIHQQLALKYKLVNSEVPYYKYVPDPVLENDHVTLYWDRSIITDRTIVANKPDIVVIDRLARRAMIVDVTIPHDDNLVKAEKEKQIKYLDLAHEVVDMWNVNSAVIVPIVVTANGLMARSLNHHLSRLALDDWIKGLIQKAVLLDTARIVRRFLSLEP

SEQ ID NO: 28852 - protein, 1164 aa, Atethmia centrago
MTTPAAVVASSSSDEYFSPPTSPTPVRRQGRGRPPKSLGLRGQLAPSRVPAAGGCVQRMRWTQSMNENVMRAYYGSTEGGTNLTAYRVRMLSLFQKLEPTVNVSAQRLSDQVRVIQRNHRLDDAALDRLRSEVLSNHIVSTPAQTATHAPIINAIPPRSNHDVEEEDDRVATVSSQCNVRLRSALEDAFREYRSTPTELRPRLPRLPMHKKNTALVCALDSLLKDFFESSEDLVDTHSILYCAAVAACRLANVKFPNCDGATRPKPAVPAWQCRIERRIDGARVLIGKLYCFREGNTRPRVMRFVRRAFSGTGISPREYMSRVTERIDFLKQKVCAWASRIRRYKRRVDRCTQNRMFQSDERWVYRSWERPEQNETDVCRPDDATTTAFWRSIWSVPVCYAEADWMRDVERVCEIIPEMEVVIITPSDIARAVRPLPNWKSPGPDGLHNFWLKWLTSSHTCLASQFQSSLESGSLPQFLMTGITHLLHKSGSPAEPKNYRPITCLSTVYKLLTSILRAKINTHIDSNSIMSASQNGCRNGSRGTKELLLIDMAISQQVRRFRKDLSTCWIDYKKAYDSVPHTWLMRVLELYKIDTTLRTFLESCMGQWRTVLRYPGCRQIQGNDVPVWIKRGIFQGDSLSPLWFCLALNPLSTLLEDSDLGYRLRRGGQVISHLLYMDDLKIFAPNKLQLMELLKVTETFSSAIRMEFGVDKCAVMHVKRGEIMEPEGIQLSDSIHLRSLSSPESYKYLGMSEALGINVTDMKQSLKERFFGRLKKVLISPLSGGNKVRAFNGWVMPVLMYSFGILKWTQTELDALDRRVRTLLTANRMHHPRSSVMRLYIPRKCGGRGFLNAKTLHNREICSLREYVLKTEVGMHRDVVAVDKGLTPLSMAKENWCKPVILTTDDRKEIWQNKELHGRFYRALHEPDVDFLASVSWLRFGDLFGETEGFVCAIMDEVILTNNYRRHIMKDGTVDVCRACHRPGESIRHIISGCSRLANGEYLHRHNQVARIIHQQLALKYKLVNSEVPYYKYAPDPVLENDHVTLYWDRSIITDRTIVANKPDIVVIDRLARRAMIVDVTIPHDENLVKAEKEKQIKYLDLAHEVVDMWNVDSAVIVPIVVTANGLNHHLSRLSLGGWIKGLIQKAVHLDTARIVRRFLSLES

SEQ ID NO: 28853 - protein, 1202 aa, Atethmia centrago
MLTRSAARARPPPPDSSLSSASPPPVPSPTVSAVTTPAAVVALSSSDEYFSPPTSPTPVRRQGRGRPPKSLGLRGQLAPSRVPAAGGCVQRMRWTQSMNENVMRAYYGSTEGGTNLTAYFVRMLSLFQELEPTVNVSAQRLSDQVRVIQRNHGLDDAALDRLRSEVLSNHIVSTPAQTATHAPIIDAIPPRSNHDVEEEDDRVATVSSQCNVRLRSALEDAFREYRSTPTELRPRLPRLPMHKKNRALVCALDSLLKDFFERSEDLVDTHSILYCAAVAACRLANVKFPNCDEATRPKPAVPAWQYRIERRIDGARVLISKLYCFREGNTRPRVMRFVRRAFSGTGISPREYMSRVTERIDFLKQKVCAWASRIRRYKRRVDRYTQNRMFQSDERWVYRAWERPEQNETDMCRPDDATTTAFWRSIWSEPVCHAEADWMRDVERVCETIPEMEVVVITPSDIARAVRPLPNWKSPGPDGLHNFWLKWLTSSHTCLASQFQSSLESGSLPQFLTTGITHLLHKSGSPAEPKNYRPITCLSTVYKLLTSILRAKINTHIDSNSIMSASQNGCRNGSRGTKELLLIDMAISQQVRRSRKDLSTCWIDYKKAYDSVPHTWLMKVLELYKIDTTLRTFLESCMGQWRTVLRYPGCRRIQGNDEPVWIKRGIFQGDSLSPLWFCLALNPLSTLLEDSGLGYRLRRGGQVISHLLYMDDLKIFAPNKLRLMELLKVTETFSGAIRMEFGVDKCAVMHVKRGEIMESEGIQLSDSIHLRSLSSPESYKYLGMSEALGINVTDMKQLLKERFFGRLKKVLISLLSGGNKVRAFNGWVMPVLMYSFGILKWTQTELDALDRRVRTLLTANRMHHPRSSVMRLYIPRKCGGRGFLNAKTLHNREICSLREYFLKADVGMHRDVVAVDKGLTPLSMAKENWCKPVVITTDDRKEIWQNKELHGRFYRALHEPDVDFLASVAWLRFGDLFGETEGFVCAIMDEVILTNSYRRHIMKDGTVDVCRACHRPDESIRHIISGCSRLANGEYLHRHNQVARIIHQQLALKYKLVNSEVPYYKYVPDPVLENDHVTLYWDRSIITDRTIVANKPDIVVIDRLARRAMIVDVTIPHDDNLVKAEKEKQIKYLDLAHEVVDMWNVNSAVIVPIVVTANGLMAESLNHHLSRLSLGGWIKGLIQKAVLLDTARIVRRFLSLEP

SEQ ID NO: 28854 - protein, 1202 aa, Atethmia centrago
MLTRSAARARPPPPDSSLSSASPPPVPSPTVSAVTTPAAVVASSSSDEYFSPPTSPTPVRRQGRGRPPKSLGLRGQLAPSRVPAAGGCVQRMRWTQSMNENVMRAYYGSTEGGTNLTAYRVRMLSLFQKLEPTVNVSAQRLSDQVRVIQRNHRLDDAALDRLRSEVLSNHIVSTPAQTATHAPIINAIPPRSNHDVEEEDDRVATVSSQCNVRLRSALEDAFREYRSTPTELRPRLPRLPMHKKNRALVCTLDSLLKVFFESSEDLVDTHSILYCAAVAACRLANVKFPNCDGATRPKPAVPAWQCRIERRIDGARVLIGKLYCFREGNTRPRVMRFVRRAFSGTGISPREYMSRVTERIDFLKQKVCAWASRIRRYKRRVDRYTQNRMFQSDERWVYRAWERPEQNETDVCRPDDATTTAFWRSIWSVPVCHAEADWMRDVERVCETIPEMDVVIITPSDIARAVRPLPNWKSPGPDGLHNFWLKWLTSSHTCLASQFQSSLESGSLPQFLTTGITHLLHKSGSPAEPKNYRPITCLSTVYKLLTSILRAKINTHIDSNSIMSASQNGCRNGSRGTKELLLIDMVISQQVRRFRKDLSTCWIDYKKAYDSVPHTWLMRVLEFYKIDTTLRTFLESCMGQWRTVLRYPGCRQIQGNDEPVWIKRGIFQGDSLSPLWFCLALNPLSTLLEDSGLGYRLRRGGQVISHLLYMDDLKIFAPNKLQLMELLKVTETFSSAIRMEFGVDKCAVMHVKRGEIMESEGIQLSDSIHLRSLSSPESYKYLGMSEALGINVTDMKQSLKERFFGRLKKVLISPLSGGNKVRAFNGWVMPVLMYSFGLLKWTQTELDALDRRVRTLLTANRMHHPRSSVMRLYIPRKCGGRGFLNAKTLHNREICSLREYFLKTEVGMHRDVVAVDKGLTPLSMAKENWCKPVILTTDDRKEIWQNKELHGRFYRALHEPDVDFLASVSWLRFGDLFGETEGFVCAIMDEVILTNNYRRHIMKDGTVDVCRACHRPGESIRHIISGCSRLANGEYLHRHNQVARIIHQQLALKYKLVNSEVPYYKYAPDPVLENDHVTLYWDRSIITDRTIVANKPDIVVIDRLARRAMIVDVTIPHDENLVKAEKEKQIKYLDLAHEVVDMWNVDSAVIVPIVVTANGLMAESLNHHLSRLSLGGWIKGLIQKAVLLDTARIVRRFLSLES

SEQ ID NO: 28855 - protein, 1199 aa, Xestia c-nigrum
MITRAASRRALIPSPDSSLSSASPPPDPGSPVSPVAAVASSSSDEYFSPPTSPTPVRRAGRGRPPKGLGLRGQQAPSRVPATGGCVQRMKWTQLMNENVMRAYYGSTEGGTNLTAYRVRMLSLFQDLEPTVNASAQRLSDQVRVIQRNHLLDGAALDRLRSEVLSNRIILTPAQTAVQASSIDANPPRSNPAVVEEDDRVATVSSQCNDRLRSALEDALHEYRSTSAELRPRLPRLPMHKKNRALVCALDSQLKNVFESSEDLVDTHSILFCGAVAACRLANVKFPNCDLATRPKPAVPAWQRRIERRIDGARVLIGKLHCFREGNTRPRVMRFVRRAFSGTEISPQEYMSRVTERIDFLKQKVYAWASRIRRYKRRVDRYSQNRMFQSDERWVYRAWERPQQNMTDVCRPDDAATSSFWRSIWSVPVCHSEADWMRDVERVCEPIPTMEPILITPLDIARAVRPLPNWKSPGPDGLHNFWLKWFSSSHTCLASQFQSSLESGSLPQFLTTGITHLLHKSGSPAEPKNYRPITCLSTVYKLLTSILRTKINTHVDSNSIMSASQNGCRNGSRGTKELLLIDMAISQQVRRARKDLSTCWIDYKKAYDSVPHSWLKRVLELYKIDATLRTFLESCMGQWRTVLRYPGCRQIQGNDEPVWIKRGIFQGDSLSPLWFCLALNPVSTLLENSGLGYRLRKDGQVISHLLYMDDLKLFAPNKLQLMELLKVTETFSSAIGMEFGVDKCAVMYVKRGKIMGSEGLQLSDSIHLRSLSSSESYKYLGMSEALGINVTDMKQSLKERFFGRLKKVLNSLLSGGNKVRAFNGWVMPVLMYSFGILKWTQTELDALDRRVRTLLTENRMHHPRSSVMRLYIPRKCGGRGFLNAKTLHNREVCSLREYFLKADVGMHRDVVAVDKGLTPLSMAKENWRKPVVLTTDDRKKEWQGKELHGRFYRALHGPDVDFLASVSWLRFGDLFGETEGFVCAIMDEVMLTNNYRKYIMKDGTVDVCRACHCPGESIRHIISGCSRLANGEYLHRHNQVARIIHQQLALKFKLVESEVPYYKYVPDPVLVKDHVTLYWDQSIITDRTIVANKPDIVVVDRSARRVMIIDVTIPHDENLVKAEKEKQMKYLDLAHEVRDMWNMNSVIIVPIVVTANGLIAKSLDEHLSKLSLGGWIKGLIQKAVLLDTARIVRRFLSLQP

SEQ ID NO: 28856 - protein, 1111 aa, Xestia c-nigrum
MRWTQSMNENVMRAYYGSTEGGINLTAYRDRMLSLFQDLEPAVNVSAQRLSDQVRVIQRSHRLDDATLDRLRSEVLSNLIIITPTQTAVQVSVVNATLPRSNPVVVEEDDRVALVSSQCNDRLRSALEDALREYRSTPTELRPRLPRLPMHKKNRALVCALDSQLKDIFESSEDLVDTHSILFCGAVAACRVANVKFPNCDIATRPKPAVPAWQRRIERRIDGARVLIGKLYSFREGNTRPRVMRFVRRAFLGTEISPQEYMSRVTERIDFLKQKVYAWANRIRRYKRRVDRYSQNRMFQSDERWVYRTWEQPQQNMTDVCRPDDAATSSFWRNIWSVPVCHTEADWMRDVERVCEPIPEMEPVFITPLDIANAVRPLPNWKSPGPDGLHNFWLKWLSSSHTCLASQFQSSLESGSLPQFLTAGVTHLLHKSGSAAEPKNYRPITCLSTVYKLLTSILRTKINIHIDKNSIMSASQNGCRNGSRGTKELLLIDMAISQQVRRSRKDLSTCWIDYKKAYDSVPHSWLMRVLELYKIDATLRTFLESCMGQWRTVLRYPGCRQIQGNDESVWIKRGIFQGDSLSPLWFCLALNPLSTLLENSGLGYRLRKDGQVISHLLYMDDLKLFAPNKLQLMELLKVTETFSSAIRMEFGVDKCAVMYVKRGEIMRSEGLQLSDSIHLRSLSSSESYKYLGMSEALGINVTDMKQSLRERFFGRLKKVFNSLLSGGNKVRAFNGWVMPVLMYSFGILKWTQTELDALDRRVRTLLTENRMHHPRSSVMRLYIPRKCGGRGFLNAKTLHNREVCSLREYFLKADVGMHRDVVAVDKGLTPLSMAKENWRKPVVLTTDDRKKEWQGKELHGRFYRALHGPDVDFLASVSWLRFGDLFGETEGFVCAIMDEVMLTNNYRKYIMKDGTVDVCRACHLPGESIRHIISGCSRLANGEYLHRHNQVARIIHQQLALKFNLVELEVPYYKYVPDPVLVKDHVTLYWDQSIITDRTIVANKPDIVVIDRSARRVMIIDVTIPHDENLVKAEKEKQIKYLDLAHEVRDMWNMNSVIIVPIVVTANGLIAKSLDDHLAKLSLGGWIKNLIQKAVLLDTARIVRRFLSLQP

SEQ ID NO: 28857 - protein, 1200 aa, Xestia c-nigrum
MITRAASRRRARLPSPDSSLSSASPPPDPGSPVSTVAAVASSSSDEYFSPPTSPTPVRRAGRGRPPRSLGLRGQQAPSRVPATGGCVQRMRWTQSMNENAMRAYYGSTEGGTNLTAYRVRMLSLFQDLEPAVNVSAQRLSDQVRVIQRNHMLDDAALDRLRSEVLSNRIILTPAQTAVQASAIDATPPRSNPAVVEEDGRVATVSSQCNERLRSALEDALREYRSTPTELRPRLPRLPMHKKNRALVCALDSQLKNVFESSEDLVDTHSILFCGAVAACRLANVKFPNCDLATRPKPAVPVWQRRIERRIDGARVLIGKLYCFREGNTRPRVMRFVRRAFSGTEISPQEYMSRVTERIDFLKQKVYAWASRIRRYKRRVDRYSQNRMFQCDERWVYRAWERPDQNVTDVCHPGDAATSSFWRSIWSVPVCHSEADWMRDVERVCEPIPEMAPVVITSLDIARAVRPLPNWKSPGPDGLHNFWLKWLSSSHTCMASQFQSSLESGSLPQFLTTGVTHLLHKSGSPTEPQNYRPITCLSTVYKLLTSILRTKINTHIDNNSIMSASQNGCRNGSRGTKELLLIDMAISQQVRRSRKDLSTCWIDYKKAYDSVPHSWLMRVLELYKIDATLCTFLKSCMGQWRTVLRYPGCRQIQGNDESVWIKRGIFQGDSLSPLWFCLALNPLSTLLENSGLGYQLRKDGQVISHLLYMDDLKLFAPNKLRLMELLKVTETFSNAIRMEFGVDKCAVMYVKRGEIMESEGLQLSDPIHLRSLSSSESYKYLGMSEALGINVTDMKQSLRERFFGRLKKVLNSLLSGGNKVRAFNGWVMPVLMYSFGILKWTQTELDALDRRVRTLLTENRMHHPRSSVMRLYIPRKCGGRGFLNAKTLHNREVCSLREYFIKAEVGMHRDVVAVDKGLTPLSMAKENWRKPVILTTDDRKKEWQGKVLHGRFYRALHGPDVDFLASVSWLRFGDLFGETEGFVCAIMDEVMLTNNYRKYIMKDGTVDVCRACHCPGESIRHIISGCSRLANGEYLHRHNQVARIIHQQLALKFRLVESEVPYYKYVPDPVLVKDLITLYWDQSIITDRTIVANKPDIVVIDRSARRVMIIDVTIPHDENLVKAEKEKQIKYLDLAHEVRDMWNMNSVIIVPIVVTANGLIAKSLDEHLSKLSLGGWIKGLIQKAVLLDTARIVRRFLSLQP

SEQ ID NO: 28858 - protein, 1200 aa, Xestia c-nigrum
MITRAASRRRARPPTPDSSLSSASPPPDPGSPVPPVAAVASSSSDEYFSPPTSPTPVRRAGRGRPPRSLGLRGQQAPSRVPATGGCVQRMRWTQSMNENVMRAYYGSTEGGINLTAYRDRMLSLFQDLEPAVNVSAQRLSDQVRVIQRSHRLDDTTLDRLRSEVLSNLITITPTQTAVHMSVVNATLPRSNPVVVEEDDRVALVSSQCNDRLRSALDNALREYRSISAELRPRLPRLPMHKKNRALVCALDSQLKNIFESSEDLVDTHSILFCGAVAACRLANVKFPNCDIAIRPKPAVPAWQRRIERRIDGARVLIGKLYCFREGNTRPRVMRFVRRAFSGTEISPQEYMSRVTERIDFLKQKVYAWASRIRRYKRRVDRYSQNRMFQSDERWVYRAWERPQQNMMDVCRPDDAATSSFWRSIWSVPVCHSEADWMRDVERVCEPIPTMEPILITPLDIARAVRPLPNWKSPGPDGLHNFWLKWFSSSHTCLASQFQSSLESGSLPQFLTTGVTHLLHKSGSPAEPKNYRPITCLSTVYKLLTSILRTKINTHVDSNSIMSASQNGCRNGSRGTKELLLIDMAISQQVRRARKDPSICWIDYKKAYDSVPHSWLKRVLELYKIDATLRAFLESCMGQWRTVLRYPGCRQIQGNDEPVWIKRGIFQGDSLSPLWFCLALNPVSTLLENSGLGYRLRKDGQIISHLLYMDDLKLFAPNKLQLMELLKVTETFSSAIGMEFGVDKCAVMYVKRGKIMGSEGLQLSDSIHLRSLSSSESYKYLGMSEALGINVTDMKQSLRERFFGRLKKVLNSLLSGGNKVRAFNGWVMPVLMYSFGILKWTQTELDALDRRVRTLLTENRMHHPRSSVMRLYIPRKCGGRGFLNAKTLHNREVCSLREYFLKADVGMHRDVAAVDKGLTPLSMANENWRKPVVLTTDDRMKEWQGKELHGRFYRALHGPDVDFLASVSWLRFGDLFGETEGFVCAIMDEVMLTNNYRKYIMKDGTVDVCRACHLPGESIRHIISGCSRLANGEYLHRHNQVARIIHQQLALKFNLVELEVPYYKYVPDPVLVKDHVTLYWDQSIITDRTIVANKPDIVVIDRSARRVMIIDVTIPHDENLVKAEKEKQIKYLDLAHEVRDMWNMDSVIIVPIVVSANGLIAKSLDEHLSKLSLGGWIKGLIQKAVLLDTARIVRRFLSLQP

SEQ ID NO: 28859 - protein, 962 aa, Xestia c-nigrum
MHKKNRALVCALDSQLKNIFESSEDLVDTHSILFCGAVAACRLANVKFPNCDIATRPKPAVPAWQRRIERRVDGARVLIGKLYCFREGNTRPRVMRFVRRAFSGTEISPQEYMSRVTERIDFLKQKVYAWASRIRRYKRRVDRYSQNRMFQSDERWVYRAWERPQQNMTDVCRPDDAATSSFWRSIWSVPVCHSEADWMRDIERVCEPIPTMEPILITPLDIARAVRPLPNWKSPGPDGLHNFWLKWFSSSHTCLASQFQSSLESGSLPQFLTTGVTHLLHKSGSPAEPKNYRPITCLSTVYKLLTSILRTKINTHVDSNSIMSASQNGCRNGSRGTKELLLIDMAISQQVRRARKDLSTCWIDYKKAYDSVPHSWLRRVLELYKIDATLRAFLESCMGQWRTVLRYPGCRQIQGNDEPVWIKRGIFQGDSLSPLWFCLALNPVSTLLENSGLGYRLRKDGQVISHLLYMDDLKLFAPNKLQLMELLKVTETFSSAIGMEFGVDKCAVMYVKRGKIMGSEGLQLSDSIHLRSLSSSESYKYLGMSEALGINVTDMKQSLKERFFGRLKKVLNSLLSGGNKVRAFNGWVMPVLMYSFGILKWTQTELDALDRRVRTLLTENRMHHPRSSVMRLYIPRKCGGRGFLNAKTLHNREVCSLREYFLKADVGMHRDVVAVDKGLTPLSMAKENWRKPVVLTTDDRKKEWQGKELHGRFYRALHGPDVDFLPSVSWLRFGDLFGETEGFVCAIMDEVMLTNNYRKYIMKDGTVDVCRACHCPGESIRHIISGCSRLANGEYLHRHNQVARIIHQQLALKFKLVESEVPYYKYVPDPVLVKDHVTLYWDQSIITDRTIVANKPDIVVIDRSARRVMIIDVTIPHDENLVKAEKEKQMKYLDLAHEVRDMWNMNSVIIVPIVVTANGLIAKSLDEHLSKLSLGGWIKGLIQKAVLLDTARIVRRFLSLQP

SEQ ID NO: 28860 - protein, 1199 aa, Xestia c-nigrum
MITRAASRRALIPSPDSSLSSASPPPDPGSPVSPVAAVASSSSDEYFSPPTSPTPVRRAGRGRPPKGLGLRGQQAPSRVPATGGCVQRMKWTQLMNENVMRAYYGSTEGGTNLTAYRVRMLSLFQDLEPTVNASAQRLSDQVRVIQRNHLLDGAALDRLRSEVLSNRIILTPAQTAVQASSIDANPPRSNPAVVEEDDRVATVSSQCNDRLRSALEDALHEYRSTSVELRPRLPRLPMHKKNRALVCALDSQLKNVFESSEDLVDTHSILFCGAVAACRLANVKFPNCDLATRPKPAVPAWQRRIERRIDGARVLIGKLHCFREGNTRPRVMRFVRRAFSGTEISPQEYMSRVTERIDFLKQKVYAWASRIRRYKRRVDRYSQNRMFQSDERWVYRAWERPQQNMTDVCRPDDAATSSFWRSIWSVPVCHSEADWMRDVERVCEPIPTMEPILITPLDVARAVRPLPNWKSPGPDGLHNFWLKWFSSSHTCLASQFQSSLESGSLPQFLTTGITHLLHKSGSPAEPKNYRPITCLSTVYKLLTSILRTKINTHVDSNSIMSASQNGCRNGSRGTKELLLIDMAISQQVRRARKDLSTCWIDYKKAYDSVPHSWLRRVLELYKIDATLRTFLESCMGQWRTVLRYPGCRQIQGNDEPVWIKRGIFQGDSLSPLWFCLALNPVSTLLENSGLGYRLRKDGQVISHLLYMDDLKLFAPNKLQLMELLKVTETFSSAIGMEFGVDKCAVMYVKRGKIMGSEGLQLSDSIHLRSLSSSESYKYLGMSEALGINVTDMKQSLKERFFGRLKKVLNSLLSGGNKVRAFNGWVMPVLMYSFGILKWTQTELDALDRRVRTLLTENRMHHPRSSVMRLYIPRKCGGRGFLNAKTLHNREVCSLREYFLKADVGMHRDVVAVDKGLTPLSMAKENWRNPVVLTTDDRKKEWQGKELHGRFYRALHGPDVDFLASVSWLRFGDLFGETEGFVCAIMDEVMLTNNYRKYIMKDGTVDVCRACHCPGESIRHIISGCSRLANGEYLHRHNQVARIIHQQLALKFKLVESEVPYYKYVPDPVLVKDHVTLYWDQSIITDRTIFANKPDIVVIDRSARRVMIIDVTIPHDENLVKAEKEKQTKYLDLAHEVRDMWNMSSVIIVPIVVTANGLIAKSLDEHLSKLSLGGWIKGLIQKAVLLDTARIVRRFLSLQP

SEQ ID NO: 28861 - protein, 1111 aa, Omphaloscelis lunosa
MRWTQSMNENVMRAYYGSTEGGTNLTAYRVRMLSLFQELEPTVNVSAQRLSDQVRVIQRNHRLDDTALDRLRSEVLSNHIVSTRAQTAAQASNIDATPPRFNHGVEEEDDRVATVSSQCNNRLRSALEDAFREYRYTPTELRPRLPRLPMHNKNRALVCALDSQLTNFFESSEDLIDTHSILYCAAVAACRLANVKFPNCDGATRPKPVVPAWQCRIERRIDGARILIGKLYCFREGNTRPRVMRFVRRAFSGTGISPQDYMSRVTERIDFLKQKVCAWASRIRRYKRRVDRYTQNRVFQSDERWVYRAWERPEQNVTDVCRPEDAATSAFWRSIWSVPVCHTEAGWMQDVERVCETIPVMDAVYITPLDVARAVRPLPNWKSPGPDGLHNFWLKWLSSSHTRLASQFQSSLESGSLPQFLTTGVTHLLHKSGNPAEPKNYRPITCLSTVYKLLTSILRMKINTHIDNNSIMSVSQNGCRNGSRGTKELLLIDMAISQQVRRSRKDLSTCWIDYKKAYDSVPHTWLMRVLELYKVDTTLRTFLMSCMGQWRTVLRYPGCRQTQGNDEPVWIKRGIFQGDSLSPLWFCLALNPLSTLLEDSGLGYRLRRGGQVISHLLYMDDLKLFAPNKLRLMELLKVTETFSGAIRMEFGVDKCAVMHVKRGEIMESEGIQLSDSIHLRSLSSAENYRYLGMSESLGINVADMKQSLKERFFGRLKKVLISFLSGGNKVRAFNGWVMPVLMYSFGILKWTQTELDALDRRVRTLLTANRMHHPHSSVMRLYIPRKCGGRGFLNAKTLHNREVCSLREYFFKADVGMHRDVVAVDNGLTPLSMAKENWRKPVVLTTDDRKEVWQSKALHGRYFRALPEPDVDFLASVSWLRFGDLFGETEGFICAIMDEVILTNNYRRHIMKDGTVDVCRACHRPGESIRHIISGCSRLANGEYLHRHNQVARIIHQQLALKYKLVDSEVPYYKYVPDPVLENDHVTLYWDRSIITDRTIVANKPDIVVIDRLARHAMIVDVTIPHDENLVKAEKEKQIKYLDLAHEVVDMWNVSSAIIVPIVVTANGLMAKSLDQHLSRLSLDGWIKRLIQKAVLLDTARIVRRFLSLQP

SEQ ID NO: 28862 - protein, 1094 aa, Omphaloscelis lunosa
MVPRYVKTKIIIIIIITLFQELEPTVNVSAQRLSDQVRVIQRNHRLDDTALDRLRSEVLSNHIVSTRAQTAAQASNIDATPPRFNHGVEEEDDRVATVSSQCNKRLRSALEDALREYRYTPTELRPRLPRLPMHNKNRALVCALDSQLKNFFESSEDLIDTHSILYCAAVAACRLANVKFPNCDGATRPKPVVPAWQCRIERRIDGARVLIGKLYCFREGNTRPRVMRFVRRAFSGTGISPQDYMSRVTERIDFLKQKVCAWASRIRRYKRRVDRYTQNRVFQSDERWVYRAWERPEQNVTDVCRPDDAATSAFWRSIWSVPVCHTEAGWMQDVERVCETIPVMDAVFITPLDVAKAVRPLPNWKSPGPDGLHNFWLKWLSSSHTRLASQFQSSLESGSLPQFLTTGVTHLLHKSGNPAEPKNYRPITCLSTVYKLLTSILRTKINTHIDSNSIMSVSQNGCRNGSRGTKELLLIDMTISQQVRRFRKDLSTCWIDYKKAYDSVPHTWLMRVLELYKVDTTLRTFLMSCMGQWRTVLRYPGCRQTQGNDEPVWIKRGIFQGDSLSPLWFCLALNPLSTLLEDSGLGYRLRRGGQVISHLLYMDDLKLFAPNKLRLMELLKVTETFSGAIRMEFGVDKCAVMHVKRGEIMESEGIQLSDSIHLRSLSSAENYRYLGMSESLGINVADMKQSLKERFFGRLKKVLISFLSGGNKVRAFNGWVMPVLMYSFGILKWTQTELDALDRRVRTLLTANRMHHPHSSVMRLYIPRKCGGRGFLNAKTLHNREVCSLREYFFKADVGMHRDVVAVDNGLTPLSMAKENWRKPVVLTTDDRKEVWQSKALHGRYFRALHEPDVDFLASVSWLRFGDLFGETEGFICAIMDEVILTNNYRRHIMKDGTVDVCRACHRPGESIRHIISGCSRLANGEYLHRHNQVARIIHQQLALKYKLVDSEVPYYKYVPDPVLENDHVTLYWDRSIITDRTIVANKPDIVVIDRLARHAMIVDVTIPHDENLVKAEKEKQIKYLDLAHEVVDMWNVSSAIIVPIVVTANGLMAKSLDQHLSRLSLDGWIKRLIQKAVLLDTARIVRRFLSLQP

SEQ ID NO: 28863 - protein, 1204 aa, Apamea monoglypha
MLKMLTRSAARARLLPPDSSLSPAPPPPESSPIESAVTPAVAVASSSSDEYFSPPTSPTPVRRQGRGRPPRSLGLRGHPAPSRVPAAGGCVQRMRWTQSMNENVMRAYYGSTEGGINLTAYRDRLLSLFQELEPTVNVSAQRLSDQVRVIQRNHRLDDIALDRLRSEVLSNQIVSTLAQTAAQASTIDATPPRSNHVEEEDDDRVDTVSSQCNVRLRSALEDAFREYRSTPTELRPRIPRLPMHKKNRALVCALDSQLKNFFESSEDLVDTHSILYCAAVAACRLANVKFPNCDGATRPKPAVPAWQYRIERRIDGARVLIGKLYCFREGNTRPRVMRFVRQAFSGTGISPREYISNVTERIDFLKQKVCAWASRIRRYKRRVDRYTQNRMFQSDERWVYRAWERPEQNVTDVCRPDDANTNAFWRSIWSVPVYHAEGGWMQDIERVCETIPEMDPVLITPLDVARAVRPLPNWKSPGPDGLHNFWLKWLISSHSRLASQFQSSLESGSLPQFLTTGVTHLLHKSGSPAEPKNYRPITCLSTVYKLLTSILRAKINTHIDNNSIMSASQNGCRNGSRGTKELLLIDMAISQQVRRSRKDLSTCWIDYKKAYDSVPHAWLMRVLELYKIDATLRTFLESCMGQWRTVLRYPGCRQIQGNDEPVWIKRGIFQGDSLSPLWFCLALNPLSTLLEDSGLGYRLKRDGQVISHLLYMDDLKLFAPNKLRLLELLKVTETFSSAIRMEFGVDKCAVMHVKRGEIMESEGIQLSDSIHLRSLSSSESYKYLGMSEALGINVADMKQTLRERFFGRLKKVLVSLLSGGNKVRAFNSWVMPVLMYSFGILKWTQTELDALDRRVRTLLTANRMHHPRSSVMRLYIPRKCGGRGFLNAKTLHNREVCNLREYFIKAEVGMHRDVVAVDKGLTPLSMAKENWRKPVILTTDDRKEVWQSKELHGRFYRALHEPGVDFLASVSWLRFGDLFGETEGFVCAIMDEVVLTNNYRRYIMKDGTVDVCRACHRPGESIRHIISGCSRLANGEYLHRHNQVARIIHQQLALKYKLVDSEVPYYKYVPDPVLENDHVTLYWDRSIITDRTIVANKPDIVVIDRLARRTMIVDVTIPHDGNLVKAEKEKQIKYLDLAHEVVNMWNVSSAIIVPIVVSANGLMAESLDQHLSRLSLGGWIKGLIQKAVLLDTARIVRRFLSLEP

SEQ ID NO: 28864 - protein, 1199 aa, Noctua janthe
MITRAAYRRARLTTPDSSLSSASPPPDPGSPVSPAAAVASSSSDEYFSPPTSPTPVRRQGRGRPPKSLGLRGHPAPSRVPAAGGCVQRMRWTQTINENVMRAYYGSTEGGTNLTAYRVRMLSLFQVLEPIVNVSAQRLSDQVRVIQRNHMLDDAALDRLRSEVLSNRIVLTPAQTAVQASTIDATPPRSNPAVVEEDDRVAMVSSQCNDRLRSALEDALREYRSTPTKLRPRLPRLPMHNKNRALVCALDSQLKNIFESSENLVDTHSILYCGAVAACRLANVKFPNYDVAIRPKPAVPTWQRRIECRIDEARVLIGKLHCFREGNTRPRVMRFVRRAFSGTGISPQEYMSRVTERIDFLKQKVYAWANRIRRYKRRVDRYSQNRIFQSDERWVYRAWERPEQNMTDVCRPDDAATSSFWRSIWSVPVCHTEADWMRDVERACEPIPEMEPILITSIDIARAVRPLPNWKSPGPDGLHNFWLKWLSSSHTCLASQFQSSLKSGSLPQFLTTGVTHLLHKSGSPAEPKNYRPITCLSTVYKLLTSILRVKINTHIDKNFIMSASQNGCRNRSRGTKELLLIDMAISQQVRRSRKDLSTCWIDYKKAYDSVPHTWLMRVLELYKIDATLRAFLESCMGQWRTVLRYPGCRQIQGNDEPVWIKRGIFQGDSLSPLWFCLALNPLSTLLEDSGLGYRLRRGGQVISHLLYMDDLKLFAPNKLRLMELLKVTETFSNAIRMEFGVDKCAVMYVKRGEIMESEGIQLSDSIHLRSLSSSESYKYLGMSESLGINVTDMKQSLRERFFGRLNKVLNSLLSGGNKVRAFNGWVMPVLMYSFGVLKWTQTELDALDRRVRTLLTANRMHHPRSSVMRLYIPRKCGGRGFLNAKTLHNREICSLREYFLKTEVGMHRDVVAVDKGLTPLSMAKENWRKPVVLTTDDRKEVWQGKELHGRFYRGLHGPDVDFLASVSWLRFGDLFGETEGFVCAIMDEVMLTNNYRKYIMKDGTVDVCRACHRPGESIRHIISGCSRLANGEYLHRHNQVARIIHQQLALKYKLVESEVPYYKYVPDPVLEKDHVTLYWDRSIITDRTIVANKPDIVVIDRLARRVMIVDVTIPHDENLVKAEKEKQIKYLDLAHEVVDMWNVNSAIIVPIVVTANGLIAKSLDDHLSRLSLGGWIKGLIQKAVLLDTARIVRRFLSLEP

SEQ ID NO: 28865 - protein, 1199 aa, Noctua janthe
MITRAAYRRARLTTPDSSLSSASPPPDPGSPVSPAAAVASSSSDEYFSPPTSPTPVRRQGRGRPPKSLGLRGHPAPSRVPAAGGCVQRMRWTQTINENVMRAYYGSTEGGTNLTAYRVRMLSLFQVLEPIVNVSAQRLSDQVRVIQRNHMLDDAALDRLRSEVLSNRIVLTPAKNAVQASTIDATPPRSNPAVVEEDDRVAMVSSQCNDRLRSALEDALREYRSTPTKLRPRLPRLPMHNKNRALVCALDSQLKNIFESSENLVDAHSILYCGAVAACRLANVKFPNYDVAIRPKPAVPTWQRRIECRIDEARVLIGKLHCFREGNTRPRVMRFVRRAFSGTGISPQEYMSRVTERIDFLKQKVYAWANRIRRYKRRVDRYSQNRIFQSDERWVYRAWERPEQNMTDVCRPDDAATSSFWRSIWSVPVCHTEADWMRDVERACEPIPEMEPILITSIDITRAVRPLPNWKSPGPDGLHNFWLKWLSSSHACLASQFQSSLESGSLPQFLTTGVTHLLHKSGSPAEPKNYRPITCLSTVYKLLTSILRVKINTHIDKNFIMSASQNGCRNRSRGTKELLLIDMAISQQVRRSRKDLSTCWIDYKKAYDSVPHTWLMRVLELYKIDATLRAFLESCMGQWRTVLRYPGCRQIQGNDEPVWIKRGIFQGDSLSPLWFCLALNPLSTLLEDSGLGYRLRRGGQVISHLLYMDDLKLFAPNKLRLMELLKVTETFSNAIRMEFGVDKCAVMYVKRGEIMESEGIQLSDSIHLRSLSSSESYKYLGMSESLGINVTDMKQSLRERFFGRLNKVLNSLLSGGNKVRAFNGWVMPVLMYSFGVLKWTQTELDALDRRVRTLLAANRMHHPRSSVMRLYIPRKCGGRGFLNAKTLHNREICSLREYFLKTEVGMHRDVVAVDKGLTPLSMAKENWRKPVVLTTDDRKEVWQGKELHGRFYRALHGPDVDFLASVSWLRFGDLFGETEGFVCAIMDEVMLTNNYRKYIMKDGTVDVCRACHRPGESIRHIISGCSRLANGEYLHRHNQVARIIHQQLALKYKLVESEVPYYKYVPDPVLEKDHVTLYWDRSIITDRTIVANKPDIVVIDRLARRVMIVDVTIPHDENLVKAEKEKQIKYLDLAHEVVDMWNVNSAIIVPIVVTANGLIAKSLDDHLSRLSLGGWIKGLIQKAVLLDTARIVRRFLSLEP

SEQ ID NO: 28866 - protein, 1204 aa, Noctua janthe
MLTRRRAKLHETHPPSPGSSLSSASHSPGRATSVSAASPVAAVASSSSDEFFSPPSTPPPPRRRGRGRPPASLGPRGQQATNRVPAAGGNVSRIRWTQSMNENVMRAYYGSTEGGTNLTAYRVRMLSLFQVLEPIVNVSAQRLSDQVRVIQRNHMLDDAALDRLRSEVLSNRIVLTPAQTAVQASAIDATPPRSNPAVVEEDDRVAMVSSQCNDRLRSALEDALREYRSTPTKLRPRLPRLPMHNKNRALVCALDSQLKNIFESSENLVDTHSILYCGTVAACRLANVKFPNYDVAIRPKPAVPTWQRRIECRIDEARVLIGKLYCFREGNTRPRVMRFVRRAFSGTGISPQEYMSRVTERIDFLKQKVYAWANRIRRYKRRVDRYSQNRIFQSDERWVYRAWERPEQNMTDVCRPDDAATSSFWRSIWSVPVCHTEADWIRDVERTCEPIPEMEPILITPIDIARAVRPLPNWKSPGPDGLHNFWLKWLSSSHTCLASQFQSSLESGSLPQFLTTGVTHLLHKSGSPTEPKNYRPITCLSTIYKLLTSILRVKINTLIDKNFIMSASQNGCRNRSRGTKELLLIDMAISQQVRRSRKDLSTCWIDYKKAYDSVPHTWLMRVLELYKIDATLRAFLESCMGQWRTVLRYPGCRQIQGNDEPVWIKRGIFQGDSLSPLWFCLALNPLSTLLEDSGLGYRLRRGGQVISHLLYMDDLKLFAPNKLRLMELLKVTETFSNAIRMEFGVDKCAVMYVKRGEIMESEGIQLSDSIHLRSLSSSESYKYLGMSESLGINVTDMKQSLRERFFGRLNKVLNSLLSGGNKVRAFNGWVMPVLMYSFGVLKWTQTELDALDRRVRTLLTANRMHHPRSSVMRLYIPRKCGGRGFLNAKTLHNHEICSLREYFLKTEVGMHRDVVAVDKGLTPLSMAKENWRKPVVLTTDDRKEVWQGKELHGRFYRALHRPDVDFLASVSWLRFGDLFGETEGFVCAIMDEVMLTNNYRKYIMKDGTVDVCRACHRPGESIRHIISGCSRLANGEYLHRHNQVARIIHQQLALKYKLVESEVPYYKYVPDPVLEKDHVTLYWDRSIITDRTIVANKPDIVVIDRLARRVMIVDVTIPHDENLVKAEKEKQIKYLDLAHEVVDMWNVNSAIIVPIVVTANGLIAKSLDDHLSRLSLGGWIKGLIQKAVLLDTARIVRRFLSLEP

SEQ ID NO: 28867 - protein, 1204 aa, Noctua janthe
MLTRRWAKLHETHPPSPGSSLSSASHSPGRATSVSAASPVAAVASSSSDEFFSPPSTPPPPRRRGRGRPPASLGPRGQQATNRVPATGGNVSRIRWTQSMNENVMRAYYGSTEGGTNLTAYRVRMLSLFQVLEPIVNVSAQRLSDQVRVIQRNHMLDDAALDRLRSEVLSNRIVLTPAQTAVQASAIDATPPRSNPAVVEEDDRVAMVSSQCNDRLRSALEDALREYRSTPTKLRPRLPRLPMHNKNRALVCALDSQLKNIFESSENLVDTHSILYCGAVAACFLANVKFPNYDVAIRPKPAVPTWQRRIECRIDEARVLIGKLYCFREGNTRPRVMRFVRRAFSGTGFSPQEYMSRVTERIDFLKQKVYAWANRIRRYKRRVDRYSQNRIFQSDERWVYRAWERPEQNMTDVCRPDDAATSSFWRSIWSVPVCHTEADWIRDVERTCEPIPEMEPILITPIDIARAVRPLPNWKSPGPDGLHNFWLKWLSSSHTCLASQFQSSLESGSLPQFLTTGVTHLLHKSGSPTEPKNYRPITCLSTVYKLLTSILRVKINTHIDKNFIMSASQNGCRNRSRGTKELLLIDMAISQQVRRSRKDLSTCWIDYKKAYDSVPHTWLMRVLELYKIDATLRAFLESCMGQWRTVLRYPGCRQIQGNDEPVWIKRGIFHGDSLSPLWFCLALNPLSTLLEDSGLGYRLRRGGQVISHLLYMDDLKLFAPNKLRLMELLKVTETFSNAIRMEFGVDKCAVMYVKRGEIMESEGIQLSDSIHLRSLSSSESYKYLGMSESLGINVTDMKQSLRERFFGRLNKVLNSLLSGGNKVRAFNGWVMPVLMYSFGVLKWTQTELDALDRRVRTLLTANRMHHPRSSVMRLYIPRKCGGRGFLNAKTLHNHEICSLREYFLKTGVGMHRDVVAVDKGLTPLSMAKENWRKPVVLTTDDRKEVWQGKELHGRFYRALHGPDVDFLASVSWLRFGDLFGETEGFVCAIMDEVMLTNNYRKYIMKDGTVDVCRACHRPGESIRHIISGCSRLANGEYLHRHNQVARIIHQQLALKYKLVESEVPYYKYVPDPVLEKDHVTLYWDRSIITDRTIVANKPDIVVIDRLARRVMIVDVTIPHDENLVKAEKEKQIKYLDLAHEIVDMWNVNSAIIVPIVVTANGLIAKSLDDHLSRLSLGGWIKGLIQKAVLLDTARIVRRFLSLEP

SEQ ID NO: 28868 - protein, 983 aa, Mythimna ferrago
MRCASTCRLRLSLGLVYHGYPCIKKNRALVCALDSLLKNIFESSENLVDTHSILYCGAVAACRLAKIKFPNIDGTIRPKTAVPAWQCRIERRIDEARVLIGKLHCFREGNTRPRVMRFVRRAFLGTGISPQGYMSRVTERIDFLKQKVCAWASRIRRYKRRVDRYSQNRMFQSDERWVYRAWERPEHGVTDGCRPDDLATITFWRNIWSVPVSHTEGGWMRDVERVCEAIPEMEKVTITPEDVARAVRPLPNWKSPGPDGLQNFWLKWYSSSHAPLASQFQSILESGSLPEYLTTGVTHLLHKTGNPVDPKNYRPITCLSTVYKLLTSILRAKINIHIENNQIISPSQNGCRNGSRGTKELLLIDMAIRQQTRRSRKDLSTCWIDYKKAYDSVPHTWLMRVLELYKIDITLRTFLESCMRQWKTVLLYPGCRPIQGNDEPIWIKRGIFQGDSLSPLWFCLALNPLSTLLEDSGLGYRLRRGGQVISHLLYMDDLKLFAPSNLQLMELLKVTETFSSAIRMEFGVDKCAGMHVKRGEIMESEGIQLPDSIHLRSLSSTETYRYLGMSEALGINNADMKQSLKERFFSRLKKVLNSLLSGGNKVRAFNGWVMPVLMYSFGILKWTQTELDALDRRVRTLLTANRMHHPRSSVMRLYIPRKCGGRGFLNAKTLHNREVCSLREYFLKTDVGMHRDVVAVDKGLTPLSMAKEDWHKPVIMTTDNRKEIWKSKELHGRFFRALHEPDVDFLASVAWLRFSDLFGETEGFVCAIMDEVILTNNYWRYIMKDGTVDVCRACHRPGESIRHIISGCSRLANGEYLHRHNQVARIIHQQLALKYNLVDLEVPYYRYVPDPVLENDHVTLYWDRSIITDRTIVANKPDIVVIDRLARRAMIVDITIPHDENLVKAEKEKQMKYLDLAHEVVDMWSVDSAIIVPIVVTANGLIAKSFDDHLSKLSLRGWIKGQIQKAVLLDTARIVRKFLSLEP

SEQ ID NO: 28869 - protein, 1200 aa, Mythimna ferrago
MLTRAAAQRARLPPPDSLLSSASPPPDPGSTVSPAAAVASSSSDEYFSPPTSPTPVRRPGRGRPPNGLGFRGQPAPSRVPAAGGCVQRMKWTQSMNENVMRAYYGSTEGGTNLTAYRVRMLSLFQDLEPTVNVSAQRLSDQVRVIQRNHRLDDAALDRLRSQVLSNPIVSTPQQIQTAGPSTSVTTTPRYVHVEDEADDRVDRVSSQCNDRLRSALEDALREYRSTPTELRPRLPRLPMHKKNRALLCALDSLLKNIFESSDNLLDTHSILYCGAVAACRLANVKFPCYGVATRPTPAAPAWQCRIERRIDEARALIGKLYCFREGNTRPRVMRFVRRAFSGTEISPREYMSRVTERIDFLKQKVCAWANRIRRYKRRVDRYSQNRMFQSDERWVYRAWERPGQNVTDGFRPDSVATNTFWRSIWSEPVCHNEGGWMRDVERVCEAIPEMDKVFITPLDVARAVRPLPNWKSPGPDGLQNFWLKWYSSSHAILASQFQSSLESGSLPQILTTGTTHLLHKTGSTADPKNYRPITCLSTVYKLLTSILRVKITLHIEKNSIMFASQNGCRNGSRGTKELLLIDMAISQQVRRSRKDLSTCWIDYKKAYDSVPHTWLMKVLELYKIDATLRTFLESCMRQWKTVLRYPGCRPIQGNDEPIWIKRGIFQGDSLSPLWFCLALNPLSTLLEDSGLGYRLRRGGQVLSHLLYMDDLKLFAHNNSQLMELLKVTETFSSAIRMEFGVDKCAVMHVRRGEIVESEGIQLSDSIHLRSLSSTETYKYLGMSEALGINVVDMKQTLKERFFGRLKKVLNSLLSGGNKVRAFNGWVMPVLMYSFGILKWTQTELDALDRRVRTLLTANRMHHPRSSVMRLYIPRKCGGRGFLNAKTLHNREVCSLREYFLKTDVGMHRDVVAVDKGLTPLSMAKENWRKPVVLTTDDRKEVWKGKELHGRFFRALHEPDVDFSASVAWLRFSNLFGETEGFVCAIMDEVILTNNYRRHIMKDGTVDVCRACHRPGESIRHIISGCSRLANGEYLHRHNQVARILHQQLALKYNLVDSEVPYYRYVPDPVLENDHVTLYWDRSIITDRTIVANKPDIVVIDRLARRAMIVDVTIPHDENLVKAEKEKQIKYLDLAHEVVDMWNVDSAIIVPIVVTANGLIAKSFDDHLSKLSLHGWIKGLIQKAVLLDTARIVRRFLSLEP

SEQ ID NO: 28870 - protein, 1200 aa, Mythimna ferrago
MLTRTAARRARHPPPDSSISSALPPPDPGSSVSPVAAAASSSSDEYFSPPTSPTPVRRPGRGRPPNGLGPRGQPAPSRVPAAGGCVQRMKWTQSINENVMRAYYGATEGGTNLTAYRVRMLSLFQELEPSVNVTTQRLSDQVRVIQRNHRLDDAALDRLRSEVLSNRIIPTPTQTQTAAPRATDAIMPRSNHGDDEADDRVVTVSSQCNDRLRSALEDALHEYRSTPIARRPRLPRLPMHKKNRALVCALDSLLENVFESSVNLVDTHSILYCGAIAACRLANVKLLSCDEATRPKPAVPAWQYRIERRIDGARALIGKLYCFREGNTRPRVMRFVRRAFSGTGISPREYSSHVTERIDFLKQKVCAWASRIRRYKRRVDRYSQNRMFQSDERWVYRAWERPEQNATDVLRPDDAATNAFWRSIWSVPVCHTEGGWMRDVERVCEAIPEMEKVIISSTDVARAVRPLPNWKSPGPDGLQNFWLKWYSSSHVLLASQFQSSLESGSLPQFLTTGVTHLLHKTGSTAEPKNYRPITCLSTVYKLLTSILRTKINKHIENNSIMSASQNGCRNGSRGTKELLLIDMAISQQVRRSRKDLSTCWIDYKKAYDSVPHTWLMRVMELYKIDATLRTFLESCMGGWNTVLRYPGCRTIRGDDEPIWIKRGIFQGDSLSPLWFCLALNPLSTLLEDSGLGYRLRRGGQVLSHLLYMDDLKLIAPNKLRLMELLKVTENFSSAIRMEFGVDKCAVMHVKRGEIMESEGVQLSDSIHLRSLSSTETYKYLGMSEALGINVTDMKQSLKERFVGRLKKVLNSLLSGGNKVRAFNGWVMPVLMYSFGILKWTQTELDALDRRVRTLLTANRMHHPRSSVIRLYIPRKCGGRGFLNAKTLHNREVCSLREYFLKTDVGMHRDVVAVDKGLTPLSMAKENWRKPVVLTTDDRKEVWKGKELHGRFFRALHEPDVYFSASVAWLRFSNLFGETEGFICAIMDEVTLTNNYRRHIMKDGTIDVCRACHRPGESIRHIISGCSRLANGEYLHRHNQVARILHQQLALKYNLVDSEVPYYRYVPDPVLENDHVTLYWDRSIITDRTIVAYKPDIVVIDRLARRAMIVDVTIPHDENLVKAEKEKLIKYLDLAHEVVDMWNVDSAIIVPIVVTANGLIAKSFDDHLSKLSLHGWIKGLIQKAVLLDTARIVRRFLSLEP

SEQ ID NO: 28871 - protein, 1202 aa, Noctua pronuba
MLTRAAARRARLSPPDSSLSSASPLPESSPIVSAVTPAVAVASSSSDEYFSPPTSPTPVRRQGRGRPPTSLGLRGQPAPSRVPATGGCVQRMRWTHSINENVMRAYYGSTEGGTNLTAYRVRMLSLFQVLEPTVNVSAQRLSDQVRVIQRNHMLDDAVLDRLRSELLSNRIVLTPSQTVVQTTAIDVSPPRSNPAVVEEDDRVATVSSQCNDRLRSALEDALREYRYTSTELRPRLPRLPMHKKNRALVCALDSQLKNLFESSEDLVDTHSILYCGAVAACRLANVKFTNSDAATRPKPAVPAWQCRIERRIDGARVLIGKLHCFREGNTRPRVMRFVRRAFSGTGISPQEYMSRVTERIDFLKQKVYAWANRIRRYKRRVDRYSQNRMFQSDERWVYRAWERPEQNMTDVCRPDDATTSSFWSSIWSVPVCHTEGDWMRAVERVCEPIPEMEPILITSLDVARSVRPLPNWKSPGPDGLHNFWLKWLSSSHTCLASQFQSSLESGALPQFLTTGVTHLLHKSGNPAEPKNYRPITCLSTVYKLLTSILRAKINTHIDKNSIMSASQNGCRNGSRGTKELLLIDMAISQQVRRSRKDLSTCWIDYKKAYDSVPHTWLMRVLELYKIDATLRTFLESCMGQWRTVLRYPGCRQIQGNDEPVWIKRGIFQGDSLSPLWFCLALNPLSTLLEDSGLGYRLRRGGQVISHLLYMDDLKLFAPNKLRLMELLKVTETFSSAIRMEFGVDKCAVMYVKRGEIMESEGIQLSDSIHLRSLSSSESYKYLGMSEALGINVTDMKQSLRERFFGRLKKVLNSLLSGGNKVRAFNGWVMPVLMYSFGILKWTQTELDALDRRVRTLLTANRMHHPRSSVTRLYIPRKCGGRGFLNAKTLHNRELCSLREYFLKAEVGMHRDVVAVDKGLTPLSMAKENWRKPVVLTTDDRKEVWQGKELHGRFYRALHGPDVDFLASVSWLRFGDLFGETEGFVCAIMDEVMLTNNYRKYIMKDGTVDVCRACHRPGESIRHIISGCSRLANGEYLHRHNQVARIIHQQLALKYKLVESEVPYYKYVPDPVLEKDHVTLYWDRSIITDRTIVANKPDIVVIDRSARRVMIVDVTIPHDENLVKAEKEKQIKYLDLAHEVVDMWNVNSAIIVPIVVTANGLIAKSLDDHLSRLSLGGWIKGLIQKAVLLDTARIVRRFLSLEP

SEQ ID NO: 28872 - protein, 1206 aa, Ochropleura plecta
MLTRRRAQEQQTLPPSPGSSLSSASQPPGRATRVSAVSPVAAVASSSSDEFFSPPSSPPPPTRQRRGRGRPPAGLGSRGQQVPIRVPAAGGNVSRMRWTSFINENVMRAYYGSTEGGTNLTAYRVRMLSLFQDLEPTINVSAQRLSDQVRVIQRNHLLDDAALDRLRSEVLGNRAILTTPQTAVQASAIDVTQPRSNPAVVEEDDRVATVSSQCNERLRSALEDALRDYRSTPTELRPRLPRLPMHKKNRALVCALDSQLKNLFESSENLVDTHSILYCGAVAVCRVANVKFQNSDVATRPKPSVPVWQCRIERRIDEARVLIGKLYCFREGNTRPRVMRFVRRAFSGTGISPQEYLSCTTERIDLLKQKVYAWTNRIRRYKRRVDRYSQNRMFRSDERWVYRAWERPEQSVTDVCRPDDVATSSFWHSIWSVPVCHTEADWMRDVERVCETIPEMEPILITSIDIASAVRPLPNWKSPGPDGLHNFWLKWLSSSHTHLASQFQSCLESGSLPQFLTTGITHLLYKSGSPAEPKNYRPITCLSTVYKLLTSILRAKINSHIDKNSIMSASQNGCRNGSRGTKELLLIDMAISQQVRRSRKDLSTCWIDYKKAYDSVPHTWLKRVLELYKIDATLRAFLESCMGQWRTVLRYPGCRQIQGNDEPVWIKRGIFQGDSLSPLWFCLALNPLSTLLEDSGLGYRLRRGGQVISHLLYMDDLKLFAPNKLRLMELLKVTETFSNAIRMEFGVDKCAVMYVKRGEIMESEGIQLSDSIHLRSLSSSESYKYLGMSEALGINVADMKQLLRERFFGRLKKVLKSLLSGGNKVRAFNSWVMPVLMYSFGILKWTQTELDALDRRVRALLTGNRMHHPRSSVMRLYIPRKCGGRGFLNAKTLHNREVCSLREYFLKTDVGMHRDVVAVDKGLTPLSMAKENWRKPVVLTTDDRKVVWQGKELHGRFYKALHGPDVDFLASVSWLRFGDLFGETEGFVCAIMDEVMLTNNYRKYIMKDGTVDVCRACHRPGESIRHIISGCSRLANSEYLHRHNQVARVIHQQLALKYNLVESEVPYYKYVPDPVLEKDHVTLYWDRSIITDRTIVANKPDIVVIDRSARRVMIIDVTIPHDENLVKAEKEKQLKYLDLAHEVVDMWNVNSAIIVPIVVTANGLIAKSLDEHLSKLSLGGWIKGLIQKAVLLDTARIVRRFLSLEP

SEQ ID NO: 28873 - protein, 1207 aa, Ochropleura plecta
MLTRRRAQEQQALPSSPGSSLSSASQPPGRATRVSAVSPVAAVASSSSDEFFSPPSSPPPPPTRQRRGRGRPPAGLGSRGQQAPIRVPAAGGNVSRMRWTSFINANVMRAYYGSTEGGTNLTAYRVRMLSLFQDLEPTINVSAQRLSDQVRVIQRNHLLDDAALDRLRSEVLSNRVILTTPQTAVQASAIDVTQPRSNPAVVEEDDRVATVSSQCNDRLRSALEDALRDYRSTPAELRPRLPRLPMHKKNRALVCALDSQLKNLFESSEDLVDTHSILYCGAVAVCRLANVKFPNCDVATRPKPSVPAWQCRIERRIDEARALIGKLYCFREGNTRPRVMRFVRRAFSGTGISPQEYMSRTTERIDFLKQKVYAWANRIQRYKRRVDRYSQNRMFRSDERWVYRAWERPEQSVTDVCRPDDVATSSFWHSIWSVRVCHTEAGWMRDVERVCETIPEMEPILITSLDIASAVRPLPNWKSPGPDGLHNFWLKWLSSSHTRLASQFQSCLESGSLPQFLTTGVTHLLYKSGSPAEPKNYRPITCLSTVYKLLTSILRAKINSHIVKNSIISASQNGCRNGSRGTKELLLIDMAISQQVRRSRKDLSTCWIDYKKAYDSVPHTWLKRVLELYKIDTTLRTFLESCMGQWRTVLRYPGCRQIQGNDEPVWIKRGIFQGDSLSPLWFCLALNPLSTLLEDSGLGYRLRRGGQVISHLFYMDDLKLFAPNKLRLMELLKVTETFSNAIRMEFGVDKCAVMYVKRGEIMESEGIHLSDSIHLRSLSSSESYKYLGMSEALGINVADMKQLLRERFFGRLKKVLKSLLSGGNKVRAFNSWVMPVLMYSFGILKWTQTELDALDRRVRTLLTANRMHHPRSSVMRLYIPRKCGGRGFLNAKTLHNREVCSLREYFLKTDVGMHRDVVAVDKGLTPLSMAKENWRKPVVLTTDYRKEVWQGKELHGRFYKALHGPDVDFLASVSWLRFGDLFGETEGFVCAIMDEVMLTNNYRKYIMKDGTVDVCRACHRPGESIRHIISGCSRLANGEYLHRHNQVARIIHQQLALKYNLVESEVPYYKYVPDPVLEKDHVTLYWDRSIITDRTIVANKPGIVVIDRSARRVMIIDVTIPHDENLVKAEKEKQLKYLDLAHEVVDMWNVNSAIIVPIVITANGLIAKSLDEHLSKLSLGGWIKGLIQKAVLLNTARIVRRFLSLEP

SEQ ID NO: 28874 - protein, 1206 aa, Ochropleura plecta
MLTRRRAQEQKALPPSPGSPLSSALQPPGRATRVSAVSPVAAVASSSSDEFFSPPSSPPPPTRQRRGRGRPPAGLGSRSQQAPIRVPAVGGNVSRMRWTSSINANVMRAYYGSTEGGTNLTAYRVRMLSLFQDLEPTINVSAQRLSDQVRVIQRNHMLDDAALDRLRSEVLSNRIILTTPQTAMQASVIDGMQPRSDPAVVEEDDRVATVSSQCNERLRSALEDALRDYRSTPAELRPRLPRLPMHKKNRALVCALDSQLKNLFESSEDLVDTHSILYCGAVAVCRLTNVKFPSCDVATRPKPSVPAWQCRIERRIDEARVLIGKLYCFREGNTRPRVMRFVRRAFLGTGISPQEYMSRTTERIDFLKQKVYAWANRIRRYKRRVDRYSQNRMFRSDERWVYRAWERPEQSVTDVCRPDDVATSSFWHSIWSVPVCHTEADWMRDVERVCETIPEMEPILITSLDIASAVRPLPNWKSPGPDGLHNFWLKWLSSSHTRLASQFQSCLESGSLPQFLTTGVTHLLYKSGSPAEPKNYRPITCLSTVYKVLTSILRAKINSHIDNNSIMSASQNGCRNGSRGTKELLLIDMAISQQVRRSRKDLSTCWIDYKKAYDSVPHTWLKRVLELYKIDATLRAFLESCMGQWRTVLRYPGCRQIQGNDEPVWIKRGIFQGDSLSPLWFCLALNPLSTLLEDSGLGYRLRRGGQVISHLLYMDDLKLFAPNKLRLMELLKVTETFSNAIRMEFGVDKCAVMYVKRGEIMESEGIQLSDSIHLRSLSSSESYKYLGMSEALGINVADMKQLLRERFFGRLKKVLKSLLSGGNKVRAFNSWVMPVIMYSFGILKWTQTELDALDRRVRTLLTGNRMHHPRSSVMRLYIPRKCGGRGFLNAKTLHNREVCSLREYFLKTDVGMHRDVVAVDKGLTPLSMAKENWRKPVVLTTDDRKVVWQSKELHGRFYKALHGPDVDFLASVSWLRFGDLFGETEGFVCAIMDEVMLTNNYRKYIMKDGTVDVCRACHRPGESIRHIISGCSRLANSEYLHRHNQVARIIHQQLALKYNLVESEVPYYKYVPDPVLEKDHVTLYWDRSIITDRTIVANKPDIVVIDRSARRVMIIDVTIPHDENLVKAEKEKQLKYLDLAHEVVDMWNVNSAIIVPIVVTANGLIAKSLDEHLSKLSLGGWIKGLIQKAVLLDTARIVRRFLSLEP

SEQ ID NO: 28875 - protein, 1111 aa, Ochropleura plecta
MRWTSSINANVMRAYYGSIEGGTNLTAYRVRMLSLFQDLEPTINVSAQRLSDQVRVIQRNHMLDDAALDRLRSEVLSNRIILTTPQTAVQASVIDGMQPRSDPAVVEEDDRVATVSSQCNERLRSALEDALRDYRSTPAELRPRLPRLPMHKKNRALVCALDSQLKNLFESSEDLVDTHSILYCGAVAVCRLANVKFPSCDVATRPKPSVPAWQCRIERRIDEARVLIGKLYCFREGNTRPRVMRFVRRAFSGTGISPQEYMSRTTERIDFLKQKVYAWANRIRRYKRRVDRYSQNRIFRSDERWVYRAWERPEQSVTDVCRPDDVATSSFWHSIWSVPVCHTEAGWMRDVERVCETIPDMEPILITSLDITSAVRPLPNWKSPGSDGLHNFWLKWLTSSHTRLASQFQSCLESGSLPQFLTTGVTHLLYKSGSPAEPKNYRPITCLSTVYKLLTSILRVKINSHIDKNSIMSASQNGCRNGSRGTKELLLIDMAISQQVRRSRKDLSTCWIDYKKAYDSVPHTWLKRVLELYKIDAALRAFLESCMGQWRTVLRYPGCRQIQGNDEPVWIKRGIFQGDSLSPLWFCLALNPLSTLLEDSGLGYRLRRGGQVISHLLYMDDLKLFASNKLRLMELLKVTETFSNAIRMEFGVDKCADMYVKRGEIMESEGIQLSDSIHLRSLSSSESYKYLGMSEALGINVADMKQLLRERFFGRLKKVLKSLLSGGNKVRAFNSWVMPVIMYSFGILKWTQTELDALDRRVRTLLTGNRMHHPRSSVMRLYIPRKCGGRGFLNAKTLHNREVCSLREYFLKTDVGMHRDVVAVDKGLTPLSMAKENWRKPVVLTTDDRKVVWQGKELHGRFYKALHGPDVDFLASVSWLRFGDLFGETEGFVCAIMDEVMLTNNYRKYIMKDGTVDVCRACHRPGESIRHIISGCSRLANSEYLHRHNQVARIIHQQLALKYNLVESEVPYYKYVPDPVLEKDHVTLYWDRSIITDRTIVANKPDIVVIDRSARRVMIIDVTIPHDENLVKAEKEKQLKYLDLAHEVVDMWNVNSAIIVPIVVTANGLIAKSLDEHLSKLSLGGWIKGLIQKAVLLDTARIVRRFLSLEP

SEQ ID NO: 28876 - protein, 1199 aa, Hecatera dysodea
MLTRAATLRARHPPPGSPLSSASPPSDIESQVSPAAAVASSSSDEYFSPPTSPPPVRRQGRGRPPRGLGPRGQPAPSRVPATGGCVQRMRWTQSMNENVMRAYYGSTEGGINLTAYRVRMLSLFQDLEPTVNVSAQRLSDQVRVIQRSHRLDEAALDRLRSEVLNNLIISTPTQTAVQAPGSGAIIPRPIHVCDEVVDRVVTVSSQCNDRLRSALEDALREYRSTPTELRPRLPRLPMHKKNRALVCALDSLLKNIFESSENLVDTHSILYCGAVAACRVANVKFSNSDGATRPKNAAPAWQCRIERRIDEARVLIGKLYCFREGNTRPRVMRFVRRAFLGTEISPQEYMSRVTERIDFLKQKVCAWANRSRRYKRRVDRYSQNRMFQSDERWVYRAWERPEQSVTDVCRPDDVTTNTFWRSIWSVPVCHAEGGWMRDVERVCEAIPQMEKITITTVDIATAVRPLPNWKSPGPDGLHNFWLKWYSSSHALLASQFQSSLDSGSLPQFLTTGITHLLHKTGSPAEPKNYRPITCLSTVYKLLTSILRVKINEHIESNSIMSYSQNGCRKGSRGTKELLLIDMAISQQVRRSRKDLSTCWIDYKKAYDSVPHTWLLKVLELYKVDATLRTFLESCMRQWKTVLRYPGCRPIQGNEEPVWIKRGIFQGDSLSPLWFCLALNPLSTLLEDSGLGYRLRRGGQTISHLLYMDDLKLFAPNNLRLMELLKVTETFSSAIRMEFGVDKCAVMHVKKGEIMESEGIQLSDSIQVRSLSSTETYKYLGMSEALGINGADMKQSLKERFFGRLKKVLNSLLSGGNKVRAFNGWVMPVLMYSFGILKWTQTELDALDRRVRTLLTANRMHHPRSSVMRLYIPRKCGGRGFLNAKTLHNREMCSLREYFLKADVGMHRDVVAVDKGFTPLSMAKENWRKPVIPTTDDRREVWRGKELHGRFYRALHGSDVDFSASVAWLRFGDLFGETEGFVCAIMDEVILTNNYRRHIMKDGTVDVCRACHRPGESIRHIISGCSRLANGEYLHRHNQVARIIHQQLALKYKLVDSEVPYYKYVPDPVLENDHATLYWDRSIITDRTIIANKPDIVVIDRLARRTMIIDVTIPHDENLVKAEKEKQIKYLDLAHEVVDMWNVDSAVIVPIVVTANGLMAKSFDEHLSKLALHGWLKGLIQKAVLLDTARIVRRFLSLEP

SEQ ID NO: 28877 - protein, 1199 aa, Hecatera dysodea
MLTRAATLRARHLPPDSPLSSASPPPDIESQVSPAAAVASSSSDEYFSPPTSPPPVRRQGRGRPPRGLGPRGQPAPSRVPATGGCVQRMRWTQSMNENVMRAYYGSTEGGTNLTAYRLRMLSLFQDLEPTVNVSAQRLSDQVRVIQRSHRLDDAALERLRSEVLNNLIISTQTQTAVQAPVSGANTPQANNDSDEVDDRVVTVSSQYNNRLRSALEDALREYRSTPTELRPRLPRLPMHKKNRALVCALDSLLQNTFVSSENLVDTHSILYCGAVAACRLANVKFPSGDEAIRPKPAAPAWQCRIERRIDEARALIGKLYCFREGNTRPRVMRFVRRAFAGTGISPHEYTSRITERIDFLKQKVCAWANRIRRYKRRADRYSQNRMFQSDERWVYRTWERPEQSVTDECRPDDIATTTFWRSIWSVPVRHTEGDWMRDVERVCEAIPQMEKITITPTDIATAVRPLPNWKSPGPDGLHNFWLKWYSSSHAVLASQFQSSLESGSLPQFLTTGITHLLHKTGSPAEPKNYRPITCLSTVYKLLTSILRVKINEHIESNSIMSSSQNGCRKGSRGTKELLLIDMAISQQVRRSRKDLSTCWIDYKKAYDSVPHTWLMKVLELYKIDATLRTFLESCMRQWKTVLRYPGCRPIQGSDEPIWIKRGIFQGDSLSPLWFCLALNPLSTLLEDSGLGYRLRRGGQAISHLLYMDDLKLFAPNNLRLMELLKVTETFSSAIRMEFGVDKCAVMHVKKGEIMESEGIQLSDSIQVRSLSSTETYKYLGMSEALGINGADMKQSLKERFFGRLKKVLNSLLSGGNKVRAFNGWVMPVLMYSFGILKWTQTELDALDRRVRTLLTANRMHHPRSSVMRLYIPRKCGGRGFLNAKTLHNREMCSLREYFLETDVGMHRDVVAVDKGLTPLSMAKENWRKPVIHTTDDRKEVWKGKELHGRFYRALYGSDVDFSASVAWLRFGDLFGETEGFVCAIMDEVILTNNYRRHIMKDGTVDVCRACHRPGESIRHIISGCSRLANSEYLHRHNQVARIIHQQLALKYKLVNSEVPYYKYVPDPVLENDHVTLYWDRSIITDRTIVANKPDIVVIDRLARRTMIIDVSIPHDENLVKAEKEKQIKYLDLAHEVVDMWDVDSAVIVPIIVTANGLMAKSFDDHLSKLALRSWVKGLIQKAVLLDTARIVRRFLSLQP

SEQ ID NO: 28878 - protein, 1105 aa, Hecatera dysodea
MYLIIIIIINGSTEGGTNLTAYRLRMLSLFQDLEPTVNVSAQRLSDQVRVIQRSHRLDDAALDRLRSEVLNNLIIPTPTQTMEQVPASSTLTPRSINVCDEVDDRVVTVSSQCNDRLRSALEDALREYRSTPTELRPRLPRLPMHKKNRALVCALDSLLKNIFESSENLIDTHSILYCGAVAACRIANVKFINSDEAIRPKSVAPAWQCRIERRIDEARVLIGKLYCFREGNTRPRVMRFVRRAFLGTQISPQEYMSRVTERIDFLKQKVCAWANRIRRYKRRVDRYSQNRMFQSDERWVYRAWERPEQSVTDACRPDDVATNTFWRSIWSVPVCHTEGGWMRDVERVCEAIPQMEKINITSLDVAKAVRPLPNWKSPGPDGLHNFWLKWYSSSHALLASQFQSSLESGSLPQFLTTGVTHLLHKTGSLAEPKNYRPITCLSTVYKLLTSILRVKINEHIETNSIMSYSQNGCRKGSRGTKELLLIDMAISQQVRRSRKDLSTCWIDYKKAYDSVPHTWLLKVLELYKLDATLRTFLESCMRQWKTVLRYPGCRPIQGSDEPVWIKRGIFQGDSLSPLWFCLALNPLSTLLEDSDLGYRLRRGGQAISHLLYMDDLKLFAPNKLRLMELLKVTETFSSDIRMEFGVDKCAVMHVKKGKIMESEGIQLSDSIQVRSLSSTETYKYLGMSEALGINVADMKQSLKERFFGRLKKVLNSLLSGGNKVRAFNGWVMPVLMYSFGILKWTQTELDALDRRVRTLLTANRMHHPRSSVMRLYIPRKCGGRGFLNAKTLHNREMCSLREYFLETDVGMHRDVVAVDKGLTPLSMANENWRKPVIQTTDDRKEVWKGKELHGRFYRALYGSDVDFSASVAWLRFGDLFGETEGFVCAIMDEVILTNNYRRHIMKDGTVDVCRACHRPGESIRHIISGCSRLANGEYLHRHNQVARIIHQQLALKYKLVDSEVPYYKYVPDPVLENGHVTLYWDRSIITDRTIVANKPDIVVIDRLARRTMIIDVTIPHDENLVKAEKEKQIKYLDLAHEVVDMWNVDSAVIVPIVITANGLMAKSFDDHLSKLALHGWLKGLIQKAVLLDTARIVRRFLSLEP

SEQ ID NO: 28879 - protein, 1200 aa, Mythimna impura
MLTRAAARRARHPPPGSPLSSASPPPDLESPVSPAAAVASSSSDEYFSPPTSPTPVRRPGRGRSPRSLGSRGQPAPSRVPAAGGCVQRMRWTQSMNENVMRAYYGSTEGGTNLTAYRVRMLSLFQVLEPTVNVTTQRLSDQVRVIQRNHRLDNAALDRLRSEVLSNRIISTPIQTQTAAPRATDGILPQSNHVDDEADDRVVTVSSQCNDRLRSALEDALREYRSTPIDLRPRLPRLPMHKKNRALVCALDSLLENVFESSVNLADTHSILYCGAIAACRLANVKLPSCDGATRPKSVAPAWQCRIEKRIDGARALIGKLYCFREGNTRPRVMRYVRRAFSGTGISPPEYLSRVTERIDFLKQKVCAWANRIRRYKRRVDRYSQNRMFQSDERWVYRAWERPEQNVTDVTRPDAVATNAFWRNIWSVPVCHTEDGWMREVERVCEAIPEMEKVIISPTDVARAVRPLPNWKSPGPDGLQNFWLKWYSSSHALLASQFQSSLESGSLPQFLTTSVTHLLHKTGSTAEPKNYRPITCLSTVYKLLTSILRTKINQHIDNNSIMSASQNGCRNGSRGTKELLLIDMTISQQVRRSRKDLSTCWIDYKKAYDSVPHTWLMRVLELYKIDATLRTFLESCMGQWNTVLRYPGCRSIRRDDEPIWIKRGIFQGDSLSPLWFCLALNPLSTLLEESGLGYRLRRDGQVLSHLLYMDDLKLIAPNKLRLMELLKVTETFSSAIRMEFGVDKCAVMHVKRGEIMESEGIQLSDSIHLRSLSSTETYKYLGMSEALGINVADMKQSLKERFFGRLKKVLNSLLSGGNKVRAFNGWVMPVLMYSFGILKWTQTELDALDRRVRTLLTANRMHHPRSSVMGLYIPRKCGGRGFLNTKTLHNREVCSLREYFHKTDVGMHRDVVAVDKGLTPLSMAKENWRKPVVLTTDDRKEVWKSKELHGRFYRALHESDVDFAASVAWLRFSNLFGETEGFICAIMDEVILTNNYRRYIMKDGTVDVCRACHRPGESIRHIISGCSRLANGEYLHRHNQVARIIHQQLALKYNLVYSEVPYYRYVPDPVLENDHVTLYWDRSIITDRTIVANKPDIVVIDRLARRAMIVDVTIPHDENLVKAEKEKQIKYLDLAHEVVDMWNVDSAVIVPIVVTANGLIAKSFDDHLSKLSLRGWIKGLIQKAVLLDTARIVRRFLSLEP

SEQ ID NO: 28880 - protein, 1200 aa, Mythimna impura
MLTRAAARRARHPPPGSPLSSASPPPDLESPVSPAAAVASSSSDEYFSPPTSPTPVRRPGRGRPPRSLGSRGQPAPSRVPAAGGCVQRMRWTQSMNENVMRAYYGSTEGGTNLTAYRVRMLSLFQVLEPTVNVTTQRLSDQVRVIQRNHRLDNAALDRLRSEVLSNRIISTPIQTQTAAPRATDGILPQSNHVDDEADDRVVTVSSQCNDRLRSALEDALREYRSTPIDLRPRLPRLPMHKKNRALVCALDSLLENVFESSVNLADTHSILYCGAIAACRLANVKLPSCDGATRPKSVAPAWQCRIEKRIDGARALIGKLYCFREGNTRPRVMRYVRRAFSGTGISPPEYLSRVTERIDFLKQKVCAWANRIRRYKRRVDRYSQNRMLQSDERWVYRAWERPEQNVTDVTRPDAVATNAFWRNIWSVPVCHTEDGWMREVERVCEAIPEMEKVIISPTDVARAVRPLPNWKSPGPDGLQNFWLKWYSSSHALLASQFQSSLESGSLPQFLTTGVTHLLHKTGSTAEPKNYRPITCLSTVYKLLTSILRTKINQHIDNNSIMSASQNGCRNGSRGTKELLLIDMTISQQVRRSRKDLSTCWIDYKKAYDSVPYTWLMRVLELYKIDATLRTFLESCMGQWNTVLRYPGCRSIRRDDEPIWIKRGIFQGDSLSPLWFCLALNPLSTLLEESGLGYRLRRDGQVLSHLLYMDDLKLIAPNKLRLMELLKVTETFSSAIRMEFGVDKCAVMHVKRGEIMESEGIQLSDSIHLRSLSSTETYKYLGMSEALGINVADMKQSLKERFFGRLKKVLNSLLSGGNKVRAFNGWVMPVLMYSFGILKWTQTELDALDRRVRTLLTANRMHHPRSSVMRLYIPRKCGGRGFLNTKTLHNREVCSLREYFHKTDVGMHRDVVAVDKGLTPLSMAKENWRKPVVLTTDDRKEVWKSKELHGRFYRALHESDVDFAASVAWLRFSNLFGETEGFICAIMDEVILTNNYRRYIMKDGTVDVCRACHRPGESIRHIISGCSRLANGEYLHRHNQVARIIHQQLALKYNLVYSEVPYYRYVPDPVLENDHVTLYWDRSIITDRTIVANKPDIVVIDRLARRAMIVDVTIPHDENLVKAEKEKQIKYLDLAHEVVDMWNVDSAVIVPIVVTANGLIAKSFDDHLSKLSLRGWIKGLIQKAVLLDTARIVRRFLSLEP

SEQ ID NO: 28881 - protein, 1080 aa, Phlogophora meticulosa
MLSLFQGFEPTVNVSAQRLSDQVRVIQRNHRLDDAALDRLRSEMLSNHIVLTSTQTAVQAPAFNVILPRSNHVSNEADDRVDTVCSQYNDRLRSALEDALREYRSTPTELRPRLPRLPMHRKNRALVCALDSLLKNFFESSEDLVDTHSILYCAAVAACRLANVKFPKNDLAIRPKPAVPAWQSRIERRIDGARVLIGKLYCFREGNTRPRVMRFVRRAFSGTGISPREYMSRIVERIDFLKQKVCAWANRIRRYKRRVDRYSQNRMFQSDERWVYRAWERPEQDVAGEHRPDDVATNAFWRSIWSVPAHHVEAHWMSDYESVCETIPEMEKIIITPEDVATAVRPVPNWKSPGPDGLHNFWLKWLSSSHTRLASQFQSCLESGSLPQFLTTGITHLLYKSGSTTEPKNYRPITCLSTVYKLLTSILRAKITEHIVGNSIMSASQNGCRNGSRGTKELLLIDMAISQQVRRSRKDLSTCWIDYKKAYDSVPHAWLTRVLELYKIDATLRTFLASCMGQWKTVLRYPGCRQIQGNDEPIWIKRGIFQGDSLSPLWFCLALNPLSTLLEDSGLGYRLKRGGQVISHLLYMDDLKLFAPNNLRLMELLKITESFSSAIRMEFGVDKCAVMHVKRGEIVESEGIQLSDSIHLRSLSSSENYKYLGMSEALGINATDMKQSLKERFFGRLKKVLNCLLSGGNKVRAFNGWVMPVLMYSFGILKWTQTELDALDRRVRTLLTANRMHHPRSSVMRLYIPRKCGGRGLLNAKTLHNREVCNLRDYFLKTEVGMHRDVVAVDKGLTPLSMAKENWRKPVVLTTDDRKQVWQSKELHGRFYRALHGPDVDFLASVSWLRFGDLFGETEGFVCAIMDEVILTNNYRKHIMKDGTVDMCRACHRPGESIRHIISGCSRLANGEYLHRHNQVARIIHQQLALRYKLVESEVPYYKYVPDPVLQDDHVTLYWDRSIITDRTIVANKPDIVVIDRLARRAMIVDVTIPHDENLVKAEKEKQIKYLDLAHEVVDMWNVDSAVIVPIVVTANGLLAKSLDDHLSRLSLHGWIKGLIQKAVLLDTARIVRRFLSLQP

SEQ ID NO: 28882 - protein, 1199 aa, Phlogophora meticulosa
MITRAATRRARPPSPDSPLSSASPPPDLGSPVTPAVAAASSSSDEYFSPPTSPTPVRRQGRGRPPKSLGSRGQPAPSQVPATGGCVQRMRWTQSMNENVMRAYYGSTEGGTNLTAYRVRMLSLFQGFEPTVNVSAQRLSDQVRVIQRNHRLDDAALDRLRSEMLSNHIVLTSTQTAVQAPAFNAILPRSNHVSNEADDRVDTVCSQYNDRLRSALEDALREYRSTPTELRPRLPRLPMHRKNRALVCALDSLLKNFFESSEDLVDTHSILYCAAVAACRLANVKFPKNDLAIRPKPAVPAWQSRIERRIDGARVLIGKLYCFREGNTRPRVMRFVRRAFSGTGISPREYMSRIVERIDFLKQKVCAWANRIRRYKRRVDRYSQNRMFQSDERWVYRAWERPEQDVAGEHRPDDVATNAFWRSIWSVPAHHVEAHWMSDYESVCETIPEMEKIIITPEDVATAVRPVPNWKSPGPDGLHNFWLKWLSSSHTRLASQFQSCLESGSLPQFLTTGITHLLYKSGSTTEPKNYRPITCLSTVYKLLTSILRAKITEHIVGNSIMSASQNGCRNGSRGTKELLLIDMAISQQVRRSRKDLSTCWIDYKKAYDSVPHAWLTRVLELYKIDATLRTFLASCMGQWKTVLRYPGCRQIQENDEPIWIKRGIFQGDSLSPLWFCLALNPLSTLLEDSGLGYRLKRGGQVISHLLYMDDLKLFAPNNLRLMELLKITESFSSAIRMEFGVDKCAVMHVKRGEIVESEGIQLSDSIHLRSLSSSENYKYLGMSEALGINATDMKQSLKERFFGRLKKVLNCLLSGGNKVRAFNGWVMPVLMYSFGILKWTQTELDALDRRVRTLLTANRMHHPRSSVMRLYIPRKCGGRGFLNAKTLHNREVCNLRDYFLKTEVGMHRDVVAVDKGLTPLSMAKENWRKPVVLTTDDRKQVWQSKELHGRFYRALHGPDVDFLASVSWLRFGDLFGETEGFVCAIMDEVILTNNYRKHIMKDGTVDMCRACHRPGESIRHIISGCSRLANSEYLHRHNQVARIIHQQLALRYKLVESEVPYYKYVPDPVLEDDRVTLYWDRSIITDRTIVANKPDIVVIDRLARRAMIVDVTIPHDENLVKAEKEKQIKYLDLAHEVVDMWNVDSAVIVPIVVTANGLLAKSLDDHLSRLSLHGWIKGLIQKAVLLDTARIVRRFLSLQP

SEQ ID NO: 28883 - protein, 1199 aa, Phlogophora meticulosa
MLTRAAKRRARPPSPDSPLSSASPPPDLGSPVTPTVAAASSSSDEYFSPPTSPTPVRRQGRGRPPKSLGSRGQPAPSQVPATGGCVQRMRWTQSMNENVMRAYYGSTEGGTNLTAYRARMLSLFQVLEPTVNVSAQRLSDQVRVIQRNHRLDDTALDRLRSEVLNNHIVLTSTQTAVQAPIINATPSPSNHVSEEADDRVVTVSSQCNEKLRSALEDALREYRSTPTELRPRLPRLPMHKKNRALVCNLDSLLKDLFESSGDLVDTHSILYCAAVAACRLANVKFPNNDVAIRPKPAVPAWQSRIERRIDGARVLIGKLYCFREGNTRPRVMRFVRRAFAGTGISPREYMSRIVERIDFLKQKVYAWANRIRRYKRRVDRYSQNRMFQSDERWVYRAWERPEQDVADVHRPDDTTTNTFWRNIWSVPVCHTEAHWIRDVERVCETITEMEKIIITPLDVATAVRPLPNWKAPGPDGLHNFWLKWLGSSHTRLASQFQSCLESGSLPQFLTTGITHLLYKSGSTTEPKNYRPITCLSTVYKLLTSILRAKIAEHIVGNSIMSASQNGCRNGSRGTKELLLIDMAISQQVRRSHKDLSTCWIDYKKAYDSVPHAWLMRVLELYKIDATLRTFLESCMGQWRTVLRYPGCRQIQGNDEPIWIKRGIFQGDSLSPLWFCLALNPLSTLLEDSGLGYRLRRGGQVISHLLYMDDLKLFASNNLQLMELLKITESFSSTIRMEFGVDKCAVMHVKRGEIVESEGIQLPDSIQLRSLSSSDNYKYLGMSEALGINVTDMKQSLKERFFGRLKKVLNSLLSGGNKVRAFNGWVMPVLMYSFGILKWTQTELDALDRRVRTLLTANRMHHPRSSVMRLYIPRKCGGRGFLNAKTLYNREVCNLRDYFLKTEVGMHRDVVAVDKGLTPLSMAKENWRKPVVLTTDDRKQVWQSKELHGRFYRALHGPDVDFIASVSWLRFGDLFGETEGFVCAIMDEVILTNNYRKHIMKDGTVDMCRACHRPGESIRHIISGCSRLANGEYLHRHNQVARIIHQQLALRYKLVKSEVPYYKYVPDPVLEDDHVTLYWDRSIITDRTIVANKPDIVVIDRLARRAMIVDVTIPHDENLVKAEKEKQIKYLDLAHEVVDMWNVDSAVIVPIVVTANGLLAKSLDDHLSRLSLHGWIKGLIQKAVLLDTARIVRRFLSLQP

SEQ ID NO: 28884 - protein, 1199 aa, Phlogophora meticulosa
MLTRAAKRRARPPSPDSPLSSASPPPDLGSPVTPTVAAASSSSDEYFSPPTSPTPVRRQGRGRPPKSLGSRGQPAPSQVPATGGCVQRMRWTQSMNENVMRAYYGSTEGGTNLTAYRARMLSLFQVLEPTVNVSAQRLSDQVRVIQRNHRLDDTALDRLRSEVLNNHIVLTSTQTAVQAPIINATPSPSNHVSEEADDRVVTVSSQCNEKLRSALEDALREYRSTPTELRPRLPRLPMHKKNRALVCALDSLLKDLFESSGDLVDTHSILYCAAVAACRLANVKFPNNDVAIRPKPAVPAWQSRIERRIDGARVLIGKLYCFREGNTRPRVMRFVRRAFAGTGISPREYMSRIVERIDFLKQKVCAWANRIRRYKRRVDRYSQNRMFQSDERWVYRAWERPEQDVADVHRPDDTTTNAFWRNIWSVPVCHTEAHWMRDVERVCETITEMEKNIITPLDVATAVRPLPNWKAPGPDGLHNFWLKWLGSSHTRLASQFQSCLESGSLPQFLTTGITHLLYKSGSTTEPKNYRPITCLSTVYKLLTSILRAKIAQHIVGNSIMSASQNGCRNGSRGTKELLLIDMAISQQVRRSHKDLSTCWIDYKKAYDSVPHAWLMRVLELYKIDATLRTFLESCMGQWRTVLRYPGCRQIQGNDEPIWIKRGIFQGDSLSPLWFCLALNPLSTLLEDSGLGYRLRRGGQVISHLLYMDDLKLFAPNNLQLMELLKITESFSSTIRMEFGVDKCAVTHVKRGEIVESEGIQLSDSIQLRSLSSSDNYKYLGMSEALGINVTDMKQSLKERFFGRLKKVLNSLLSGGNKVRAFNGWVMPVLMYSFGILKWTQTELDALDRRVRTLLTANRMHHPRSSVMRLYIPRKCGGRGFLNAKTLYNREVCNLRDYFLKTEVGMHRDVVAVDKGLTPLSMAKENWRKPVVLTTDDRKQVWQSKELHGRFYRALHGPDVDFIASVSWLRFGDLFGETEGFVCAIMDEVILTNNYRKHIMKDGTVDMCRACHRPGESIRHIISGCSRLANGEYLHRHNQVARIIHQQLALRYKLVESEVPYYKYVPDPVLEDDHVTLYWDRSIITDRTIVANKPDIVVIDRLARRAMIVDVTIPHDENLVKAEKEKQIKYLDLAHEVVDMWNVDSAVIVPIVVTANGLLAKSLDDHLSRLSFHGWIKGLIQKAVLLDTARIVRRFLSLQP

SEQ ID NO: 28885 - protein, 1111 aa, Xestia xanthographa
MKWTQSMNENVMRAYYGSTEGGTNLTAYRVRMLSLFQDLEPTVIVSAQRLSDQVRVIQRSHRLDDAALDRLRSEVLSNLIVLTPTQTAVQVSAIDATPPRLNPAVVEEDDGVATVSSQCNDRLRSALENALHEYRSTPTELRPRLPRLPMHKNNRALVCALDSQLKNIFESSENLVDTHSILFCGAVAACRIANVKFPNCDVATRPKPAVPAWQRRIERRIDGARVLIGKLYCFREGNTRPRVMRFVRRAFSGTEISPQEYMSRATERIDFLKQKVYAWANRIRRYKRRVDRYSQNRMFQSDERWIYRAWERPEQNMTDVCRPNDAATSSFWRSIWSVPVCHTEADWMRDVERVCEPIPEMEPIFITPVDVARAVRPLPNWKSPGPDGLHNFWLKWFSSSHTCLASQFQSSLESGSLPQVLTTGVTHLLHKSGSPAEPKNYRPITCLSTIYKLLTSILRVKINTHIDKNSIMSASQNGCRNGSRGTKELLLIDMAISQQVRRSRKDLSTCWIDYKKAYDSVPHTWLMRVLELYKVDTTLRTFLESCMGQWKTVLRYPGCRQIQGSDEPVWIKRGIFQGDSLSPLWFCLALNPLSTLLENSGLGCRLRKDGQVISHLLYMDDLKLFAPNKLRLMELLKVTETFSSAIRMEFGVDKCAVMYVKRGEIMESEGLQLSDSIHLKSLSSSETYKYLGMSEALGINVTDMKQSLRERFFGRLRKVLNSLLSGGNKVRAFNGWVMPVLMYSFGILKWTQTELDALDRRVRTLLTESRMHHPRSSVMRLYIPRKCGGRGFLNAKTLHNREVCSLREYFLKAEVGMHRDVVAVDKGLTPLSMAKENWHRPEVLTTDDRKEVWQGKVLHGRFYRALHGPDVDFIASVSWLRFGDLFGETEGFVCAIMDEVMLTNNYRKYIMKDGTVDVCRACHLPGESIRHIISGCSRLANGEYLHRHNQVARIIHQQLALKYKLVESEVPYYKYVPDPVLENDHVTLYWDRSIITDRTIVANKPDIVMMDRSARRVMIIDVTIPHDENLVKAEKEKQIKYLDLAHEVRGMWNMNSVIIVPIVVSANGLIAKSFDDHLSKLSLGGWIKGLIQKAVLLDTARIVRRFLSLQP

SEQ ID NO: 28886 - protein, 1199 aa, Xestia xanthographa
MITRAAARRAHLPTPDSSLSSASPPPDPGSPVSPVAAVASSSSDEYFSPSTSPPPVRRAGRGRPPKSLGLRGQQTPNWVPATGGCVQRMKWTQSMNENVMRAYYGSTEGGTNLTAYRVRMLSLFQGLEPTVNVSAQRLSDQVRVIQRSHRLDDAALDRLRSEVLSNLIVLTPTQTAVQVSAIDATPPRLNPVVVEEDDGVATVSSQCNDRLRSALENALHEYRSTPTELRPRLPRLPMHKKNRALVCALDSQLKNIFESSENLVDTHSILFCGAVAACRLANVKFPNCDVANRPKPAVPAWQRRIERRIDGARVLIGKLYCFREGNTRPRVMRFVRPAFSGTEISPQEYMSRVTERIDFLKQKVYAWANRIRRYKRRVDRYSQNRMFQSDERWVYRAWERPEQNMTDVCRPDDAATSSFWRSIWSVPVCHTEADWMRDVERVCEPIPEMEPIFITPLDVARAVRPLPNWKSPGPDGLHNFWLKWFSSSHTCLASQFQSSLESGSLPQFLTTGVTHLLHKSGSPAEPKNYRPITCLSTIYKLLTSILRVKINTHIDKNSIMSASQNGCRNGSRGTKELLLIDMAISQQVRRSRKDLSTCWIDYKKAYDSVPHTWLMRVLELYKIDTTLRTFLESCMGQWRTVLRYPGCRQIQGSDDPVWIKRGIFQGDSLSPLWFCLALNPLSKLLENSGLGCRLRKDGQVISHLLYMDDLKLFASNKLRLMELLKVTETFSNAIRMEFGVDKCAVMYVKRGEIMESEGLQLSDSIQLRSLSSSETYKYLGMSEALGINITDMKQSLKERFFSRLRKVLNSLLSGGNKVRAFNGWVMPVLMYSFGILKWTQTELDALDRRVRTLLTESRMHHPRSSVMRLYIPRKCGGRGFLNAKTLHNREVCSLREYFLKAEVGMHRDVVAVDKGLTPLSMAKENWHKPEVLTTDDRKEVWQGKELHGRFYRALHGPDVDFLASVSWLRFGDLFGETEGFVCAIMDEVMLTNNYRKYIMKDGTVDMCRACHLPGESIRHIISGCSRLANGEYLHRHNQVARIIHQQLALKYKLVESEVPYYKYVPDPVLESDHVTLYWDRSIITDRTIVANKPDIVMIDRSARRVMIIDVTIPHDENLVKAEKEKQIKYLDLAHEVRDMWNMNSVIIVPIVVTANGLIAKSFDDHLSKLSLGGWIKGLIQKAVLLDTARIVRRFLSLQP

SEQ ID NO: 28887 - protein, 1199 aa, Xestia xanthographa
MITRAAARRAHLPTPDSSLSSASPPPDPGSPVSPVAAVASSSSDEYFSPPTSPPPVRRAGRGRPPKTLGLRGQQTPSRVPATGGCVQRMKWTQSMNENVMRAYYGSTEGGTNLTAYRVRMLSLFQGLEPTVNVSAQRLSDQVRVIQRSHRLDDAALDRLRSEVLSNLIVLTPTQTAVQVSAIDATPPRLNPVVVEEDDGVATVSSQCNDRLRSALENALHEYRSTPTELRPRLPRLPMHKKNRALVCALDSQLKNIFESSENLVDTHSILFCGAVAACRLANVKFPNCDVANRPKPAVPAWQRRIERRIDGARVLIGKLYCFREGNTRPRVMRFVRRAFSGTEISPQEYMSRVTERIDFLKQKVYAWANRIRRYKRRVDRYSQNRMFQSDERWVYRAWERPEQNMTDVCRPDDAATSSFWRSIWSVPVCHTEADWMRDVERVCEPIPEMEPIFITPLDVARAVRPLPNWKSPGPDGLHNFWLKWFSSSHTCLASQFQSSLESGSLPQFLTTGVTHLLHKSGSPAEPKNYRPITCLSTIYKLLTSILRVKINTHIDKNSIMSASQNGCRNGSRGTKELLLIDMAISQQVRRSRKDLSTCWIDYKKAYDSVPHTWLMRVLELYKIDTTLRTFLESCMGQWRTVLRYPGCRQIQGSDDPVWIKRGIFQGDSLSPLWFCLALNPLSTLLENSGLGCRLRKDGQVISHLLYMDDLKLFASNKLRLMELLKVTETFSNAIRMEFGVDKCAVMYVKRGEIMESEGLQLSDSIQLRSLSSSETYKYLGMSEALGINITDMKQSLRERFFSRLRKVLNSLLSGGNKVRAFNGWVMPVLMYSFGILKWTQTELDALDRRVRTLLTESRMHHPRSSVMRLYIPRKCGGRGFLNAKTLHNREVCSLREYFLKAEVGMHRDVVAVDKGLTPLSMAKENWHKPEVLTTDDRKEVWQGKELHGRFYRALHGPDVDFLASVSWLRFGDLFGETEGFVCAIMDEVMLTNNYRKYIMKDGTVDMCRACHLPGESIRHIISGCSRLANGEYLHRHNQVARIIHQQLALKYKLVESEVPYYKYVPDPVLESDHVTLYWDRSIITDRTIVANKPDIVMIDRSARRVMIIDVTIPHDENLVKAEKEKQIKYLDLAHEVRDMWNMNSVIIVPIVVTANGLIAKSFDNHLSKLSLGGWIKGLIQKAVLLDTARIVRRFLSLQP

SEQ ID NO: 28888 - protein, 1213 aa, Cosmia trapezina
MRKKQLRFIKKRDNQTNVIRRKGYLAYALHNTSILSRGDLGWYYHMKMCKMRAMRNSSRTFLLVINNNNNNNKGRGRPPKSLGLGGQPAPSRVPAAGGCVQRMRWTQSMNENVMRAYYGSTEGGTNLTAYRVRMLSLFQELEPTVNVSAQRLSDQVRVIQRNHRLDDAALDRLRSEILSDRIVSTQAQTAVQDSIIDALPPRSNHVVEEEDDRVATVSSQSNDRLRSALEDAFREYRSTPTELRPRLPRLPMHKKNRALVCALDSHLKDFFESSDDLVDTHSILYCAAVAACRLANVKFPNCDGANRSKPAVPAWQCRIERRIDGARVLIGKLYCFREGNTRPRVMRFVRRAFSGTGISPPEYMSRVTERIDFLKQKVCAWASRIRRYKRRVDRYTQNRMFQSDERWVYRAWERPEQNVTDVCRPDDAATSAFWRSIWSVPVCHAEAGWMQDVERVCETIPEMETVLITPLDVARAVRPFPNWKSPGPDGLHNFWLKWLISSHTCLASQFQSSLESGSLPQFLTTGVTHLLHKSGSPVEPKNYRPITCLSTVYKLLTSILRAKINTHIASNSIISASQNGCRTGSRGTKELLLIDMAISQQVRRSRKDLSTCWIDYKKAYDSVPHTWLLKVLELYKIDATLRTFLESCMGQWRTVLRYPGCQQIRGSDEPVWIKRGIFQGDSLSPLWFCLALNPLSTLLEDSGLGYRLRRGGQVISHLLYMDDLKLFAPNELRLMELLKVTETFSGAIRMEFGVDKCAVMHVKRGEIMESEGIQLTDSIYLRSLSSSETYKYLGMSEALGINVADVKQSLKERFFGRLKKVLISLLSGGNKVRAFNGWVMPVLMYSFGILKWTQTELDALDRRVRTLLTANRMHHPRSSVMRLYIPRKCGGRGFLNAKTLHNREVCSLREYFLKADVGMHRDVVAVDKGLTPLSMAKENWRKPVLLTTDDRRKVWQSKELHGRFYRALHEPGVDFLASVSWLRFSDLFGETEGFVCAIMDEVILTNNYRRYIMKDGTVDVCRACHRPGESIRHIISGCSRLANGEYLHRHNQVARIIHQQLALKYKLVDSEVPYYKYVPDPVLENDHVTLYWDRSIITDRTIVANKPDIVVIDRLARRAMIVDVTIPHDGNLVKAEKEKQIKYLDLAHEVVDMWNVDSAVIVPIVVTANGLIADSLDQHLSRLSLGGWIKGQIQKAVLLDTARIVRRFLSLQP

SEQ ID NO: 28889 - protein, 1202 aa, Cosmia trapezina
MLTRSAARARPPPPDSSLSSASPPPVPSPTVGAVMTPAAAVASSSSDEYFSPPTSPTPVRRQGRGRPPRSLGLRGQPAPSRVPAAGGCVQRMRWTQSMNENVMRAYYGSTEGGTNLTAYRVRMLSLFQELEPTVNVSAQRISDQVRVIQRNHRLDDAALDRLRSEVLSNHIISNPTQTAVQPSIIDALPPRSNHVVEEEDDMVATVSSQCNDRLRSALEDAFREYRSTPTELRPRLPRLPMHKKNRALMCALDSLLKDFFESSENLVDTHSILYCAAVAACRLANVKFPNCDGATRPKPAVPAWQCRIERRIDGARVLIGKLYCFRQGNTRPRVMRFVKRAFLGTGISPPEYMSRVTERIDFLKQKVCAWASRIRRYKRRVDRYAQNRMFQSDERWVYRAWERPEQNVTDLCRPDDAATSTFWRSIWSVPVCHVEAGWMRDVERVCEAIPEMEPVLITPLDVARAVRPLPNWKSPGPDGLHNFWLKWLISSHTRLASQFQSSLESGSLPQFLTTGVTHLLHKSGSPAEPKNYRPITCLSTIYKLLTSILRAKINMHIDSNSIMSTSQNGCRNGSRGTKELLLIDMAISQQVRRSRKDLSTCWIDYKKAYDSVSHAWLMRVLELYKIDATLRTFLESCMGQWRTVLRYPGCRRIQGNDEPVRIKRGIFQGDSLSPLWFCLALNPLSTLLEDSGLGYRLRRGGQVISHLLYMDDLKLFAPNKLRLMELLKVTETFSSAIRMEFGVDKCAVMHVKRGEIMESEGIQLSDSIHLRSLSSSETYKYLGMSEALGINVADMKQSLRERFFGRLKKVLISLLSGGNKVRAFNGWVMPVLMYSFGILKWTQTELDALDRRVRTLLTANRMHHPRSSVMRLYIPRKCGGRGFLNAKTLHNREVCSLREYFLKSDVGMHRDVVAVDKGLTPLSMAKENWRKPVVLTTDDRKNVWQSKELHGRFYRALHEPGVDFLASVSWLRFGDLFGETEGFVCAIMDEVILTNNYRRYIMKDGTVDVCRACHRPGESIRHIISGCSRLANGEYLHRHNQVARIIHQQLALKYKLVDSEVPYYKYVPDPVLENDHVTLYWDRSIITDRTIVANKPDIVVIDRLTRRAMIVDVTIPHDGNLVKAEKEKQIKYLDLAHEVVDMWNVNSAVIVPIVVTANGLMADSLDQHLSRLSLGGWIKGQIQKAVLLDTARIVRRFLSLQP

SEQ ID NO: 28890 - protein, 1111 aa, Mamestra brassicae
MRWTQSMNENVMRAYYGSTEGGTNLTAYRVRMLSLFQDLEPTVNVSAQRLSDQVRVIQHNCRLDDAALERLRSEVLSNLIISTPTQTVVQAPASGAITPRPNNGSDEVDDRVVTVSSQCNDRLRSALEDALREYRLTPTELRPRLPRLPMHKKNRALVCALDSLLQNIFESSESLVDTHSILFCGAVAACRIANVKFPSCDEAIRPKPAAPAWQCRIERRIDEARALIGKLYCFREGNTRPRVMRFVRRAFSGTGISPREYTFRVTERIDFLKQKVCAWANRIRRYKRRVDRYSQNRMFQSDERWVYRAWERPEQSVTDVYRPDDVATSTFWRSIWSVPICHAEGGWMRDVERVCEAIPQMEKITITTLDIAKAVRPLPNWKSPGPDGLHNFWLKWYSSSHALLASQFQSSLESGSLPQFLTTGITHLLHKTGSPAEPKNYRPITCLSTVYKLLTSILRAKINEHIESNSIMSASQNGCRKGSRGTKELLLIDMAISQQVRRSRKDLSTCWIDYKKAYDSVPHTWLMKVLELYKIDATLRTFLESCMRQWKTVLRYPGCQPIQGSDEPVWIKRGIFQGDSLSPLWFCLALNPLSTLLEDSGLGYRLRRGGQAISHLLYMDDLKLFAPNNLRLMELLKVTETFSSAIRMEFGVDKCAVMHVKKGEITESEGIQLSDSIQVRSLSSTESYKYLGMSEALGINGTDMKQSLRERFFGRLKKVLNSLLSGGNKVRAFNGWVMPVLMYTFGILKWTQTELDALDRRVRTLLTANRMHHPRSSVMRLYIPRKCGGRGFLNAKTLHNREMCSLREYFLKADVGMHRDVVAVDKGLTPLSTAKENWRKPVILTTDDRKEVWKGKELHGRFYRALYGSDVDFSASVAWLRFGDLFGETEGFVCAIMDEVILTNNYRKHIMKDGTVDVCRACHRPGESIRHIISGCSRLANGEYLHRHNQVARIIHQQLALKYKLVDSEVPYYKYVPDPVLENDHVTLYWDRSIITDRTIVANKPDIVVIDRLARRTMIIDVTIPHDENLVKAEKEKQIKYLDLAHEVVDMWNVDSAVIVPIVITANGLMAKSFDDHLSKLALRGWIKGLIQKAVLLDTARIVRRFLSLEP

SEQ ID NO: 28891 - protein, 1199 aa, Mamestra brassicae
MLTRAALQRARPPPPDPSLSSASPPPDIGSPLSPAVAVASSSSDEYFSPPTSPTPVRRQGRGRPPRGLGPRGQPAPSRVPTTGGCVQRMRWTQSMNENVMRAYYGSTEGGTNLTAYRVRMLSLFQDLEPTVNVSAQRLSDQVRVIQRNHRLDDAALDRLRSEVLNNLIISTPTQTAVQAPVNGSITPRPNNVSDEVDDRVVTVSSQCNDRLRSALEDALREYRSTPTELRPRLPRLPMHKKNRALVCALDSLLQNIFESSESLVDTHSILYCGAVAACRIANVKFPGCDEAIRPKPAAPAWQRRIERRIDETRALIGKLYCFREGNTRPRVMRFVRRAFSGTEISPRDFTSRVTERIDFLKQKVCAWASRIRRYKRRVDRYSQNRMFQSDERWVYRAWERPEQSVTDVCRPDDVATSIFWRSIWSVPICHAEGGWMRDVERVCEAIPQMEKITITTLDVAKAVRPLPNWKSPGPDGLHNFWLKWYSSSHALLASQFQSSLDSGSLPQFLTTGVTHLLHKTGSPTEPKNYRPITCLSTVYKLLTSILRAKINEHIESNSIMSASQNGCRKGSRGTKELLLIDMTISQQVRRSRKDLSTCWIDYKKAYDSVPHTWLMKVLELYKIDATLRTFLESCMRQWKTVLRYPGCRPIQGSDEPVWIKRGIFQGDSLSPLWFCLALNPLSTLLEDSGLGYRLRRGGQAISHLLYMDDLKLFAPNNLRLMELLKVTETFSSAIRMEFGVDKCAVMHVKKGEIMESEGIHLSDSIQVRSLSSTETYKYLGMLEALGINGTDMKQSLRERFFGRLKKVLNSLLSGGNKVRAFNGWVMPVLMYTFGILKWTQTELDALDRRVRTLLTANRMHHPRSSVMRLYIPRKCGGRGFLNAKTLHNREMCSLREYFLKADVGMHRDVVAVDKGLTPLSMAKENRRTPVILTTDDRKEVWKGKELHGRFYRALHGSDVDFSASVAWLRFGDLFGETEGFVCAIMDEVILTNNYRRHIMKDGTVDMCRACHRPGESIRHIISGCSRLANGEYLHRHNQVARIIHQQLALKYNLVDSEVPYYKYVPDPVLENDHVTLYWDRSIITDRTIVANKPDIVVIDRLARRTMIIDVTIPHDENLVKAEKEKQIKYLDLAHEVVDMWNVDSAVIVPIVVTANGLMAKSFDDHLSKLALRSWVKGLIQKAVLLDTARIVRRFLSLEP

SEQ ID NO: 28892 - protein, 1199 aa, Mamestra brassicae
MLTRAALQRARPPPPDPSLSSASPPPDIGSPLSPAVAVASSSSDEYFSPPTSPTPVRRQGRGRPPRGLGPRGQPAPSRVPATGGCVQRMRWTHSMNENVMRAYYGSTEGGTNLTAYRVRMLSLFQDLEPTVNVSAQRLSDQVRVIQRNHRLDDAALDRLRSEVLNNLIISTPTQTAVQAPVNGSITPRPNNVSDEVDDRVVTVSSQCNDRLRSALEDALREYRSTPTELRPRLPRLPMHKKNRALVCALDSLLQNIFESSESLVDTHSILYCGAVAACRIANVKFPGCDEAIRPKPAAPAWQRRIERRIDETRALIGKLYCFREGNTRPRVMRFVRRAFSGTEISPRDFTSRVTERIDFLKQKVCAWASRIRRYKRRVDRYSQNRMFQSDERWVYRAWERPEQSVTDVCRPDDVATSIFWRSIWSVPICHAEGGWMRDVERVCEAIPQMEKITITTLDVAKAVRPLPNWKSPGPDGLHNFWLKWYSSSHALLASQFQSSLDSGSLPQFLTTGVTHLLHKTGSPTEPKNYRPITCLSTVYKLLTSILRAKINEHIESNSIMSASQNGCRKGSRGTKELLLIDMTISQQVRRSRKDLSTCWIDYKKAYDSVPHTWLMKVLELYKIDATLRTFLESCMRQWKTVLRYPGCRPIQGSDEPVWIKRGIFQGDSLSPLWFCLALNPLSTLLEDSGLGYRLRRGGQAISHLLYMDDLKLFAPNNLRLMELLKVTETFSSAIRMEFGVDKCAVMHVKKGEIMESEGIHLSDSIQVKSLSSTETYKYLGMLEALGINGTDMKQSLRERFFGRLKKVLNSLLSGGNKVRAFNGWVMPVLMYTFGILKWTQTELDALDRRVRTLLTANRMHHPRSSVMRLYIPRKCGGRGFLNAKTLHNREMCSLREYFLKADVGMHRDVVAVDKGLTPLSMAKENWRTPVILTTDDRKEVWKGKELHGRFYRALHGSDVDFSASVAWLRFGDLFGETEGFVCAIMDEVILTNNYRRHIMKDGTVEMCRACHRPGESIRHIISGCSRLANGEYLHRHNQVARIIHQQLALKYNLVDSEVPYYKYVPDPVLENDHVTLYWDRSIITDRTIVANKPDIVVIDRLARRTMIIDVTIPHDENLVKAEKEKQIKYLDLAHEVVDMWNVESAVIVPIVVTANGLMAKSFDDHLSKLALRSWVKGLIQKAVLLDTARIVRRFLSLEP

SEQ ID NO: 28893 - protein, 1206 aa, Noctua fimbriata
MITRSRAKQLQEAHTPSPGSSLSSASQPPRRATSVSTVSPVAAVASSSSDEFFSPPSTPPPSPRRRGRGRPPAGLGPRGQPAPNRVPAAGGNVSRMRWTQSINEQVMRAYYGATEGGTNLTAYRVGMLSLFQVLEPTVNVSAQRLSDQVRVIQRNHMLDDAVLDRLRSEVLSNRIVLTPAQTAVQASVIDATPPRFNPAVVEEDDRVAVVSSQCNDRLRSALEDALREYRSTPTELRPRLPRLPMHNKNRALVCALDSQLENIFESSENLVDTHSILYCGAVAACRLANVKFPNCDVATRPKPAVPAWQRRIERRIDGARVLIGKLHCFREGNTRPRVMRFVRRAFSGTGISPQEYMSRVTERIDFLKQKVYAWANRIRRYKRRVDRYSQNRMFQSDERWVYRAWERPELNMTDVCRPDDAATSSFWRSIWSVPVCHTEADWMRDVERVCEPIPEMEPILITPLDIARAVRPLPNWKSPGPDGLHNFWLKWLSSSHTCLASQFQSSLESGSLPQFLTTGVTHLLHKSGSPAEPKNYRPITCLSTVYKLLTSILRAKINTHIDKNYIMSASQNGCRNGSRGTKELLLIDMAISQQVRRSRKDLSTCWIDYKKAYDSVPHTWLMRVLELYKIDATLRAFLESCMGQWRTVLRYPGCRQIQGNDEPVWIKRGIFQGDSLSPLWFCLALNPLSTLLEDSGLGYRLRRGGQVISHLLYMDDLKLFAPNKLRLMELLKVTETFSSAIRMEFGVDKCAVMYVKQGEIMESEGIQLSDSIHLRTLSSTESYKYLGMSEALGINVTDMKQSLKERFFGRLNKVLHSLLSGGNKVRAFNGWVMPVLMYSFGVLKWTQTELDALDRRVRTLLTANRMHHPRSSVMRLYIPRKCGGRGFLNAKSLHNREMCSLREYFLKVEVGMHRDVVAVDKGLTPLSMAKENWRKPEVLTTDDRKEVWQGKELHGRFYRALHGPDVDFLASVSWLRFGDLFGETEGFVCAIMDEVMLTNNYRKYIMKDGTVDVCRACHRPGESIRHIISGCSRLANGEYLHRHNQVARIIHQQLALKYKLVESEVPYYKYVPDPVLEKDHVTLYWDQSIITDRTIVANKPDIVVIDRSARRVMIVDVTIPHDENLVKAEKEKQIKYLDLAHEVVDMWNVNSAIIVPIVVTANGLIAKSLDDHLSKLSLGGWIKGLIQKAVLLDTARIVRRFLSLEP

SEQ ID NO: 28894 - protein, 1206 aa, Noctua fimbriata
MITRSRAKQLQEAHTPSPGSSLSSASQPPRRATSVSTVSPVAAVASSSSDEFFSPPSTPPPSPRRRGRGRPPAGLGPRGQPAPNRVPAAGGNVSRMRWTQSINEQVMRAYYGATEGGTNLTAYRVGMLSLFQVLEPTVNVSAQRLSDQVRVIQRNHMLDDAVLDRLRSEVLSNRIVLTPAQTAVQASVIDATPPRFNPAVVEEDDRVAVVSSQFNDRLRSALEDALREYRSNPTELRPRLPRLPMHNKNRALVCALDSQLENIFESSENLVDTHSILYCGAVAACRLANVKFPNCDVATRPKPAVPAWQRRVERRIDGARVLIGKLHCFREGNTRPRVMRFVRRAFSGTGISPQEYMSRVTERIDFLKQKVYAWANRIRRYKRRVDRYSQNRMFQSDERWVYRAWERPELNMTDVCRPDDAATSSFWRSIWSVPVCHTEADWMRDVERVCEPIPEMEPILITPLDIARAVRPLPNWKSPGPDGLHNFWLKWLSSSHTCLASQFQSSLESGSLPQFLTTGVTHLLHKSGSPAEPKNYRPITCLSTVYKLLTSILRAKINTHIDKNSIMSASQNGCRNGSRGTKELLLVDMAISQQVRRSRKDLSTCWIDYKKAYDSVPHTWLMRVLELYKIDATLRAFLESCMGQWRTVLRYPGCRQIQGNDEPVWIKRGIFQGDSLSPLWFCLALNPLSTLLEDSGLGYRLRRGGQVISHLLYMDDLKLFAPNKLRLMELLKVTETFSSAIRMEFGVDKCAVMYVKQGEIMESEGIQLSDSIHLRTLSSTESYKYLGMSEALGINVTDMKQSLKERFFGRLNKVLHSLLSGGNKVRAFNGWVMPVLMYSFGVLKWTQTELDALDRRVRTLLTANRMHHPRSSVMRLYIPRKCGGRGFLNAKSLHNREMCSLREYFLKVEVGMHRDVVAVDKGLTPLSMAKENWRKPEVLTTDDRKEVWQGKELHGRFYRALHGPDVDFLASVSWLRFGDLFGETEGFVCAIMDEVMLTNNYRKYIMKDGTVDVCRACHRPGESIRHIISGCSRLANGEYLHRHNQVARIIHQQLALKYKLVESEVPYYKYVPDPVLEKDHVTLYWDQSIITDRTIVANKPDIVVIDRSARRVMIVDVTIPHDENLVKAEKEKQIKYLDLAHEVVDMWNVNSAIIVPIVVTANGLIAKSLDDHLSRLSLGSWIKGLIQKAVLLDTARIVRRFLSLEP

SEQ ID NO: 28895 - protein, 1202 aa, Noctua fimbriata
MITRAASRRARLPPPDQSLSSASPPPESSPIVSAVTPAVAVASSSSDEYFSPPTSPTPVRRQGRGRPPRSLGLRGHPAPSRVPAAGGCVQRMRWTHSINENVMRAYYGSTEGGTNLTAYRVGMLSLFQVLEPTINVSAQRLSDQVRVIQRNHMLDDAVLDRLRSEVLSNRIVLTPAQTAVQASVIDATPPRFNPAVVEEDDRVAVVSSQCNDRLRSALEDALREYRSTPTELRPRLPRLPMHNKNRALVCALDSQLKNLFESSENLVDTHSILYCGAVAACRLANVKFPNCDVATRPKPAVPAWQRRIECRIDGARVLIGKLHCFREGNTRPRVMRFVRRAFSGTGISPQEYMSRVTERIDFLKQKVYAWANRIRRYKRRVDRYSQNRMFQSDERWVYRAWERPDQNMTDMCRPDDAATSSFWRSIWSVPVCHTEADWMRDVEQVCEPIPEMEPILITPLDVARAVRPLPNWKSPGPDGLHNFWLKWLSSSHTCLASQFQSSLESGSLPQFLTTGVTHLLHKSGSPAEPKNYRPITCLSTVYKLLTSILRAKINTHIDKNSIMSASQNGCRNGSRGTKELLLIDMAISQQVRRSRRDLSTCWIDYKKAYDSVPHTWLMRVLELYKIDATLRAFLESCMGQWRTVLRYPGCRQIQGNDEPVWIKRGIFQGDSLSPLWFCLALNPLSTLLEDSGLGYRLRRGGQVISHLLYMDDLKLFAPNKLQLMELLKVTETFSSAIRMEFGVDKCAVMYVKQGEIMESEGIQLSDSIHLRTLSSTESYKYLGMSEALGINVTDMKQSLKERFFGRLNKVLHSLLSGGNKVRAFNGWVMPVLMYSFGVLKWTQTELDALDRRVRTLLTANRMHHPRSSVMRLYIPRKCGGRGFLNAKSLHNREMCSLREYFLKVEVGMHRDVVAVDKGLTPLSMAKENWRKPEVLTTDDRKEVWQGKELHGRFYRALHGPDVDFLASVSWLRFGDLFGETEGFVCAIMDEVMLTNNYRKYIMKDGTVDVCRACHRPGESIRHIISGCSRLANGEYLHRHNQVARIIHQQLALKYKLVESEVPYYKYVPDPVLEKDHVTLYWDQSIITDRTIVANKPDIVVIDRSARRVMIVDVTIPHDENLVKAEKEKQIKYLDLAHEVVDMWNVNSAIIVPIVVTANGLIAKSLDDHLSKLSLGGWIKGLIQKAVLLDTARIVRRFLSLEP

SEQ ID NO: 28896 - protein, 868 aa, Noctua fimbriata
MRFVRRAFSGTGISPQEYMSRVTERIDFLKQKVYAWANRIRRYKRRVDRYSQNRMFQSDERWVYRAWERPDQNMTDMCRPDDAATSYFWRSIWSVPVCHTEADWMRDVEQVCEPIPEMEPILITPLDVARAVRPLPNWKSPGPDGLHNFWLKWLSSSHTCLASQFQSSLESGSLPQFLTTGVTHLLHKSGSPAEPKNYRPITCLSTVYKLLTSILRAKINTHIDKNSIMSASQNGCRNGSRATKELLLIDMAISQQVRRSRKDLSTCWIDYKKAYDSVPHTWLMRVLELYKIDATLRAFLESCMGQWRTVLRYPGCRQIQGNDEPVWIKRGIFQGDSLSPLWFCLALNPLSTLLEDSGLGYRLRRGGQVISHLLYMDDLKLFAPNKLQLMELLKVTETFSSAIRMEFGVDKCAVMYVKQGEIMESEGIQLSDSIHLRTLSSTESYKYLGMSEALGINVTDMKQSLKERFFGRLNKVLHSLLSGGNKVRAFNGWVMPVLMYSFGVLKWTQTELDALDRRVRTLLTANRMHHPRSSVMRLYIPRKCGGRGFLNAKSLHNREMCSLREYFLKVEVGMHRDVVAVDKVLTPLSMAKENWRKPEVLTTDDRKEVWQGKELHGRFYRALHGPDVDFLASVSWLRFGDLFGETEGFVCAIMDEVMLTNNYRKYIMKDGTVDVCRACHRPGESIRHIISGCSRLANGEYLHRHNQVARIIHQQLVLKYKLVESEVPYYKYVPDPVLEKDHVTLYWDQSIITDRTIVANKPDIVVIDRSARRVMIVDVTIPHDENLVKAEKEKQIKYLDLAHEVVDMWNVNSAIIVPIVVTANGLIAKSLDDHLSKLSLGGWIKGLIQKAVLLDTARIVRRFLSLEP

SEQ ID NO: 28897 - protein, 1134 aa, Atethmia centrago
MLTRSATRTRPPPPDPSLSSASPPPVPSATVSAMTTPTAAVASSSSDEYFSPPSSPTPVRRQERSRPPKSLGLRGHPAPSRVTAAGGCVQRMKWTQSMNENVMRAYYRSTEGGTNLTAYRVKMLSLFQELEPAVNVSAQRLSDQVRVIQRNRRLDDATLDRLRSEVLSNYIISTPAQTAVHTPIIDVIPPRSNHGVEEEDDRAATVSSQCNVRLRSALEDAFREYRSTPTELRPRLPRLPMHKKNRALMCALDSQLKVFFESSEDLVDTHSILYCAAVAACRLANVKFPNSDGATRSKPAVPAWQCRIERRIDKARVLIGKLYCFREGNTRPRVMRLVRRAFSGTGISPPEYMSHITERIDFLKQKVCAWASRIRRYKRRVDRYTQNRMFQSDERWVYRAWERPKQNVTDVCRPDDATTTAFWRSIWSVPVCHVEADWMRDVERVCETIPEMEVVIITPSDIARTVRPLPNWKSPGPDGLHNFWLKWLTSSHTCLASQFQSSLESGSLPQFMTTGITHLLHKSGSPAEPKNYRPITCLSTVYKLLTSILRAKINTHIDSNSIMSASQNGCRNGSRGTKELLLIDMAISQQVRRSRKDLSTCWIDYKKAYDSVPHTWLMRVLELYKIDTTLRTFLESCMGQWRTVLRYPGCRQIQGNDEPVWIKRGIFQGDSLSPLWFCLALNPLSMQLEDSGLGYRLRRGGQVISHLLYMDDLKIFAPNKLQLMKLLKVTETFSSAIRMEFGVDKCAVMHVKRGEIMESERIQLSDSIHLRSLSSPESYKYLGMSEALGINVTDMKQSLKERFFGRLKKVLISLLSGGNKVRAFNGWVMPVLMYSFGILKWTQTELDALDRRVRTLLTANRMHHPRSSVMRLYIPRKCGGRGFLNAKTLHNREICSLREYFLKTEVGMHRDVVAVDKGLTPLSMAKENWCKPVVLTTDDRKEIWQSKELHGRFYRALHEPDVDFLASVSWLRFGDLFGETEGFVCAIMDEVILTNNYRRHIMKDGTVDVCRACHRPGESIRHIISGCSRLANGEYLHRHNQVARIIHQQLALKYKLVNSEVPYYKYVPDPVLENDHVTLYWDRSIITDRTIVANKPDIVVIDRLARRAMIVDVTIPHDDNLVKAEKEKQIKYLD

SEQ ID NO: 28898 - protein, 1202 aa, Atethmia centrago
MLTRSAARARPPPPDSSLSSASPPPVPSPTVSAVTTPAAVVASSSSDEYFSPPTSPTPVRRQGRGRPPKSLGLRGQLAPSRVPAAGGCVQRMRWTQSMNENVMRAYYGSTEGGTNLTAYRVRMLSLFQKLEPTVNVSAQRLSDQVRVIQRNHRLDDAALDRLRSEALSNHIVSTPAQTATHAPIINAIPPRSNHDVEEEDDRVATVSSQCNVRLRSALEDAFREYRSTLTELRPRLPRLPMHKKNRALVCTLDSLLKDFFESSEDLVDTHSILYCAAVAACRLANVKFPNCDGATRPKPAVPAWQCRIERRIDGARVLIGKLYCFREGNTRPRVMRFVRRAFSGTGISPREYMSRVTERIDFLKQKVCAWASRIRRYKRRVDRYTQNRMFQSDERWVYRAWERPEQNETDVCRPDDATTTAFWRSIWSVPVCHAEADWMRDVERVCETIPEMDVVIITPSDIARAVRPLPNWKSPGPDGLHNFWLKWLTSSHTCLASQFQSSLESGSLPQFLTTGITHLLHKSGSPAEPKNYRPITCLSTVYKLLTSILRAKINTHIDSNSIMSASQNGCRNGSRGTKELLLIDMAISQQVRRFRKDLSTCWIDYKKAYDSVPHTWLMRVLEFYKIDTTLRTFLESCMGQWRTVLRYPGCRQIQGNDEPVWIKRGIFQGDSLSPLWFCLALNPLSTLLEDSGLGYRLRRGGQVISHLLYMDDLKIFAPNKLQLMELLKVTETFSSAIRMEFGVDKCAVMHVKRGEIMESEGIQLSDSIHLRSLSSPESYKYLGMSEALGINVTDMKQSLKERFFGRLKKVLISPLSGGNKVRAFNGWVMPVLMYSFGILKWTQTELDALDRRVRTLLTANRMHHPRSSVMRLYIPRKCGGRGFLNAKTLHNREICSLREYFLKTEVGMHRDVVAVDKGLTPLSMAKENWCKPVILTTDDRKEIWQNKELHGRFYRALHEPDVDFLASVSWLRFGDLFGETEGFVCAIMDEVILTNNYRRHIMKDRTVDVCRACHRPGESIRHIISGCSRLANGEYLHRHNQVARIIHQQLALKYKLVNSEVPYYKYAPDPVLENDHVTLYWDRSIITDRTIVANKPDIVVIDRLARRAMIVDVTIPHDENLVKAEKEKQIKYLDLAHEVVDMWNVDSAVIVPIVVTANGLMAESLNHHLSRLSLGGWIKGLIQKAVLLDTARIVRRFLSLES

SEQ ID NO: 28899 - protein, 1182 aa, Atethmia centrago
MLTRSATRTRPPPPDPSLSSASPPPVPSATVSAMTTPTAAVASSSSDEYFFPPSSPTPVRRQERSRPPKSLGLRGHPAPSRVPAAGGCVQRMKWTQSMNENVMRAYYRSTEGGTNLTAYRVKMLSLFQELEPAVNVSAQRLSDQVRVIQRNRRLDDATLDRLRSEVLSNYIISTPAQTAVHTPIIDVIPPRSNHGVEEEDDRAATVSSQCNVRLRSALEDAFREYRSTPTELRPRLPRLPMHKKNRALMCALDSQLKIFFESSEDLVDTHSILYCAAVAACRLANVKFPNSDGATRPKPAVPAWQCRIERRIDKARVLIGKLYCFREGNTRPRVMRFVRRAFSGTGISPREYMSHITERIDFLKQKVCAWASRIRRYKRRVDRYTQNRMFQSDERWVYRAWERPKQNVTDVCRPDDATTTAFWRSIWSVPVCHVEGDWMRDVERVCETIPEMEVVIITPSDIARAVRPLPNWKSPGPDGLHNFWLKWLTSSHTCLASQFQSSLESGSLPQFMTTGITHLLHKSGSPAEPKNYRPITCLSTVYKLLTSILRAKINTHIDSNSIISASQNGCRNGSRGTKELLLIDMAISQQVRRSRKDLSTCWIDYKKAYDSVPHTWLMRVLELYKIDTTLRTFLESCMGQWRTVLRYPGCRQIQGNDEPVWIKRGIFQGDSLSPLWFCLALNSLSMQLEDSGLGYRLRRGGQVISHLLYMDDLKIFAPNKLQLMKLLKVTETFSSAIRMEFGVDKCAVMHVKRGEIMESEGIQLSDSIHLRSLSSPESYKYLGMSEALGINVTDMKQSLKERFFGRLKKVLISLLSGGNKVRAFNGWVMPVLMYSFGILKWTQTELDALDRRVRTLLTANRMHHPRSSVMRPYIPRKCGGRGFLNAKTLHNREICSLREYFLKTEVGMHRDVVAVDKGLTPLSMAKENWCKPVVLTTDDRKEIWQSKELHGRFYLALHEPDVDFLASVSWLRFGDLFGETEGFVCAIMDEVILTNNYRRHIMKDGTVDVCRACHRPGESIRHIISGCSRLANGEYLHRHNQVARIIHQQLAFKYKLVNSEVPYYKYVPDPVLENDHVTLYWDRSIITDRTIVANKPDIVVIDRLARRAMIVDVTIPHDDNLVKAEKEKQIKYLDLAHEVVDMWNVNSAVIVPIVVTANGLMARSLNHHLSSLASQFQSRGLR

SEQ ID NO: 28900 - protein, 962 aa, Atethmia centrago
MHKKNRALMCALDSQLKVFFESTEDLVDTHSILYCAAVAACRLAKVKFPNSDGATRPKPAVPAWQCRIERRIDKARVLIGKLYCFREGNTRPRVMRFVRRAFSGTGISPREYMSHITERIDFLKQKVCAWASRIRRYKRRVDRYTQNRMFQSDERWVYRAWERPKQNVTDVCRPDDATTTAFWRSIWSVPVCHVEADWMRDVERVCETIPEMEVVIITPSDIARAVRPLPNWKSPGPDGLHNFWLKWLTSSHTCLASQFQSSLESGSLPQFMTTGITHLLHKSGSPAEPKNYRPITCLSTVYKLLTSILRAKINTHIDSNSIMSASQNGCRNGSRGTKELLLIDMAISQQVRRSRKDLSTCWIDYKKAYDLVPHTWLMRVLELYKIDTTLRTFLESCMGQWRTVLRYPGCRQIQGNDEPVWIKRGIFQGDSLSPLWFCLALNPLSMQLEDSGLGYRLRRGGQIISHLLYMDDLKIFAPNKLQLMKLLKVTETFSSAIRMEFGVDKCAVMHVKRGEIMESEGIQLSDSIHLRSLSSPESYKYLGMSEALGINVTDMKQSLKERFFGRLKKVLISLLSGGNKVRAFNSWVMPVLTYSFGILKWTQTELDALDRRVRTLLTANRMHHPRSSVMRLYIPRKCGGRGFLNAKTLHNREICSLREYFLKTEVGMHRDVVAVDKGLTPLSMAKENLCKPVVLTTDDRKEIWQSKELHGRFYRALHEPDVDFLASVSWLRFGDLFGETEGFVCAIMDEVILTNNYRRHIMKDGTVDVCRACHRPGESIRHIISGCSRLANGEYLHRHNQVARIIHQQLALKYKLVNSEVPYYKYVPDPVLENDHVTLYWDRSIITDRTIVANKPDIVVIDRLARRAMIVDVTIPHDDNLVKAEKEKQIKYLDLAHEVVDMWNVNSAVIVPIVVTANGLMARSLNHHLSRLALDGWIKGLIQKAVLLDTARIVRRFLSLEP

SEQ ID NO: 28901 - protein, 1203 aa, Atethmia centrago
MLTRSATRTRPPPPDPSLSSASPPPVPSATVSAMTTPTAAAASSSSDEYFSPPSSPTPVRRQGRSRPPKSLGLRGHPAPSRVPAAGGCVQRMKWTQSMNENVMRAYYGSTEEGTNLTAYRVRMLSLFQELEPAVNVSAQRLSDQVRVIQRNRRLDDAALDRLRSEVLSNHIISTPAQTAVHTPIIDVIPPRSNHGVEEEDDRAATVSSQCNVRLRSALEDAFREYRSTSTELRPQLPRLPMHKKNRALMCALDSQLKVFFESSEDLVDTHSILYCAAVAACRLANVKFPNSDGATRPKPAVPAWQCRIERRIDGARVLIGKLYCFREGNTRPRVMRFVRRAFSGTGISPREYMSHITERIDFLKQKVCAWASRIRRYKRRVDRYTQNRMFQSDERWVYRTWERPKQNETNVCRPDDATTTAFWRSIWSVPVCHVEADWMRDVERVCETIPEMEVVIITPSDIARAVRPLPNWKSPGPDGLHNFWLKWLTSSHTCLASQFQSSLKSGSLPQFMTTGITHLLHKSGSPAEPKNYRPITCLSTVYKLLTSILRAKINTHIDSNSIMSASQNGCRNGSHGTKELLLIDMAISQQVRRSRKDLSTCWIDYKKAYDSVPHTWLMRVLELYKIDMTLRTFLESCMGQWRTVLRYPGCRQIQGNDESVWIKRGIFQGDSLSPLWFCLALNPLSIQLEDSGLGYRLRRGGQVISHLLYMDDLKIFAPNKLQLMKLLKITETFSSAIRMEFGVDKCAVMHVKRGEIMESEGIRLSDSIHLRSLSSPESYKYLGMSEALGINVTDMKQSLKERFFGRLKKVLISLLSGGNKVRAFNGWVMPVLMYSFGILKWTQTELDAMDRRVRTLLTANRMHHPRSSVMRLYIPRKCGGRGFLNAKTLHNREICSLREYFLKTEVGMHRDVVAVDKGLTPLSMAKENWCKPVVLTTDDRKEIWQNMELHGRFYRALHEPDVDFLASVSWLRFGDLFGETEGFVCAIMDEVILTNNYRRHIMKDGTVDVCRACHRPGESIRHIISGCSRLANGEYLHRHNQVARIIHQQLALKYKLVNSEVPYYKYVPDPVLENDHVTLYWDRSIITDRTIVANKPDIVVIDRLARRAMIVDVTIPHDDNLVKAEKEKQIKYLDLAHEVVDMWNVNSAVIVPIVVTTNGLMARRLNNHLSRLTLDGWIKGLNQKTVIPLDTARIVRRFLSLEP

SEQ ID NO: 28902 - protein, 1111 aa, Atethmia centrago
MRWTQSMNENVMRAYYGSTEGGTNLTAYRVTMLSLFQKLEPTVNVSAQRLSDQVRVIQRNHRLDDAALDRLRSEVLSNHIVSTPAQTATHAPIINAIPPRSNHDVEEEDDRVATVSSQCNVRLRSALEDAFREYRSTPTELRPRLPRLPMHKKNRALVCTLDSLLKDFFESSEDLVDTHSILYCAAVAACRLANVKFPNCDGATRPKPAVPAWQCRIERRIDGARVLIGKLYCFREGNTRPRVMRFVRRAFSGTGISPREYMSRVTERIDFLKQKVCAWASRIRRYKRRVDRYTQNRMFQSDERWVYRAWERPEQNETDVCRPDDATTTAFWRSIWSVPVCHAEADWMRDVERVCETIPEMDVVIITPSDIARAVRPLPNWKSPGPDGLHNFWLKWLTSSHTCLASQFQSSLESGSLPQFLTTGITHLLHKSGSPAEPKNYRPITCLSTVYKLLTSILRAKINTHIDSNSIMSASQNGCRNGSRGTKELLLIDMAISQQVRRFRKDLSTCWIDYKKAYDSVPHTWLMRVLEFYKIDTTLRTFLESCMGQWRTVLRYPGCRQIQGNDEPVWIKRGIFQGDSLSPLWFCLALNPLSTLLEDSGLGYRLRRGGQVISHLLYMDDLKIFAPNKLQLMELLKVTETFSSAIRMEFGVDKCAVMHVKRGEIMESEGIQLSDSIHLRSLSSPESYKYLGMSEALGINVTDMKQSLKERFFGRLKKVLISPLSGGNKVRAFNGWVMPVLMYSFGILKWTQTELDALDRRVRTLLTANRMHHPRSSVMRLYIPRKCGGRGFLNAKTLHNREICSLREYFLKTEVGMHRDVVAVDKGLTPLSMAKENWCKPVILTTDDRKEIWQNKELHGRFYRALHEPDVDFLASVSWLRFGDLFGETEGFVCAIMDEVILTNNYRRHIMKDGTVDVCRACHRPGESIRHIISGCSRLANGEYLHRHNQVARIIHQQLALKYKLVNSEVPYYKYAPDPVLENDHVTLYWDRSIITDRTIVANKPDIVVIDRLARRAMIVDVTIPHDENLVKAEKEKQIKYLDLAHEVVDMWNVDSAVIVPIVVTANGLMAESLNHHLSRLSLGGWIKGLIQKAVLLDTARIVRRFLSLES

SEQ ID NO: 28903 - protein, 1202 aa, Atethmia centrago
MLTRSAARARPPPPDSSLSSASPPPVPSPTVSAVTTPAAVVASSSSDEYFSPPTSPTPVRRQGRGRPPKSLGLRGQLAPSRVPAAGGCVQRMRWTQSMNENVMRAYYGSTEGGTNLTAYRVRMLSLFQKLEPTVNVSAQRLSDQVRVIQRNHRLDDAALDRLRSEVLSNHIVSTPAQTATHAPIINAIPPRSNHDVEEEDDRVATVSSQCNVRLRSALEDAFREYRSTPTELRPRLPRLPMHKKNRALVCTLDSLLKDFFESSEDLVDTHSILYCAAVAACRLANVKFPNCDGATRPKPAVPAWQCRIERRIDGARVLIGKLYCFREGNTRPRVMRFVRRAFSGTGISPREYMSRVTERIDFLKQKVCAWASRIRRYKRRVDRYTQNRMFQSDERWVYRAWERPEQNETDVCRPDDATTTAFWRSIWSVPVCHAEADWMRDVERVCETIPEMDVVIITPSDIARAVRPLPNWKSPGPDGLHNFWLKWLTSSHTCLASQFQSSLESGSLPQFLTTGITHLLHKSGSPAEPKNYRPITCLSTVYKLLTSILRAKINTHIDSNSIMSASQNGCRNGSRGTKELLLIDMAISQQVRRFRKDLSTCWIDYKKAYDSVPHTWLMRVLEFYKIDTTLRTFLESCMGQWRTVLRYPGCRQIQGNDEPVWIKRGIFQGDSLSPLWFCLALNPLSTLLEDSGLGYRLRRGGQVISHLLYMDDLKIFAPNKLQLMELLKVTETFSSAIRMEFGVDKCAVMHVKRGEIMESEGIQLSDSIHLRSLSSPESYKYLGMSEALGINVTDMKQSLKERFFGRLKKVLISPLSGGNKVRAFNGWVMPVLMYSFGILKWTQTELDALDRKVRTLLTANRMHHPRSSVMRLYIPRKCGGRGFLNAKTLHNREICSLREYFLKTEVGMHRDVVAVDKGLTPLSMAKENWCKPVILTTDDRKEIWQNKELHGRFYRALHEPDVDFLASVSWLRFGDLFGETEGFVCAIMDEVILTNNYRRHIMKDGTVDVCRACHRPGESTRHIISGCSRLANGEYLHRHNQVARIIHQQLALKYKLVNSEVPYYKYAPDPVLENDHVTLYWDRSIITDRTIVANKPDIVVIDRLARRAMIVDVTIPHDENLVKAEKEKQIKYLDLAHEVVDMWNVDSAVIVPIVVTANGLMAESLNHHLSRLSLGGWIKGLIQKAVLLDTARIVRRFLSLES

SEQ ID NO: 28904 - protein, 1201 aa, Mesoligia furuncula
MLTRSAARRAHLPPPDSSLSPAPPPPEPSPIESAVTPAVAVASSSSDEYFSPPTSPTPVRRQGRGRPPNSLGLRGHPAPSRVPATGGCVQRMRWTQSMNENVMRAYYGSTEGGINLTAYRDRMLSLFQELEPTVNVSAQRLSDQVRVIQRNHRLDDIALDRLRSEVLSNHIVSTSAQTAAQVSTVDAIPPRFNRVEEEDDRVDTVSSQCNVRLRSALEDALREYRSTPTELRPRLPRLPMHKKNRALVCALDSQLKNFFESSEDLVDTHSILYCAAVAACRLANVKFSSCDGATRPKPAVPAWQRRIERRIDGARVLIGKLYCFREGNTRPRVMRFVRRAFSGTGISPREYMSRVTERIDFLKQKVCAWASRIRRYKRRVDRYTQNRMFQSDERWVYRAWERPEQNVTDVCRPDDAATSAFWCSIWSVPVCHTEAGWMQDVERVCESVPEMEKVLITPSDVARAVRPLSNWKSPGPDGLHNFWLKWLISSHTCLASQFQSSLESGSLPQFLTTGVTHLLHKSGSPAEPKNYRPITCLSTVYKLLTSILRAKINKHIESNSIMSASQNGCRNGSRGTKELLLIDMAISQQVRRSRKDLSTCWIDYKKAYDSVPHTWLMRVLELYKIDATLRTFLESCMGQWKTVLRYPGCRQIQGNDEPVWIKRGIFQGDSLSPLWFCLALNPLSTLLEDSGLGYRLRRGGQVISHLLYMDDLKLFAPNKLRLMELLKVTKTFSSAIKMEFGVDKCAVMHVKRGEIMESEGIQLSDSISLRSLSSSESYKYLGMSEALGINDADMKQSLKERFFCRLKKVLISLLSGGNKVRAFNGWVMPVLMYSFGILKWTQTELDALDRRVRTLLTANRMHHPRSSVMRLYIPRKCGGRGFLNAKTLHNREVCSLREYFLKAEVGMHRDVVAVDKGLTPLSMAKENWRKPVVLSTDDRKRVWQSKELHGRFYRALHEPGVDFIASVSWLRFSDLFGETEGFVCAIMDEVILTNNYRRHIMKDGTVDVCRACHRPGESIRHIISGCSRLANGEYLHRHNQVARIIHQQLALKYKLVDSEVPYYKYVPDPVLENGHVTLYWDRSIITDRTIVANKPDIVVIDRLARRTMIVDVTIPHDGNLVKAEKEKQIKYLDLAHEVVDMWNVSSAIIVPIVVSANGLMAESLDQHLSRLSLGGWIKGLIQKAVLLDTAHIVRRFLSLEP

SEQ ID NO: 28905 - protein, 1198 aa, Mesoligia furuncula
MLTRSAARRAHLPPPDSSLSPAPPPPEPSPIESAVTPAVAVASSSSDEYFSPPTSPTPVRRQGRGRPPNSLGLRGHPAPSRVPATGGCVQRMRWTQSMNENVMRAYYGSTEGGINLTAYRDRMLSLFQELEPTVNVSAQRLSDQVRVIQRNHRLDDIALDRLRSEVLSNHIVSTSAQTAAQVSTVDAIPPRFNRVEEEDDRVDTVSSQCNVRLRSALEDALREYRSTPTELRPRLPRLPMHKKNRALVCALDSQLKNFFESSEDLVDTHSILYCAAVAACRLANVKFSSCDGATRPKPAVPAWQRRIERRIDGARVLIGKLYCFKEGNTRPRVMRFVRRAFSGTGISPREYMSRVTERIDFLKQKVCAWASRIRRYKRRVDRYTQNRMFQSDERWVYRAWERPEQNVTDVCRPDDAATSAFWCSIWSVPVCHTEAGWMQDVERVCESVPEMEKVLITPSDVARAVRPLSNWKSPGPDGLHNFWLKWLISSHTCLASQFQSSLESGSLPQFLTTGVTHLLHKSGSPAEPKNYRPITCLSTVYKLLTSILRAKINKHIESNSIMSASQNGCRNGSRGTKELLLIDMAISQQVRRSRKDLSTCWIDYKKAYDSVPHTWLMRVLELYKIDATLRTFLESCMGQWKTVLRYPGCRQIQGNDEPVWIKRGIFQGDSLSPLWFCLALNPLSTLLEDSGLGYRLRRGGQVISHLLYMDDLKLFAPNKLRLMELLKVTKTFSSAIKMEFGVDKCAVMHVKRGEIMESEEIQLSDSISLRSLSSSESYKYLGMSEALGINDADMKQSLKERFFCRLKKVLISLLSGGNKVRAFNGWVMPVLMYSFGILKWTQTELDALDRRVRTLLTANRMHHPRSSVMRLYIPRKCGGRGFLNAKTLHNREVCSLREYFLKAEVGMHRDVVAVDKGLTPLSMAKENWRKPVVLSTDDRKRVWQSKELHGRFYRALHEPGVDFIASVSWLRFGDLFGETEGFVCAIMDEVILTNNYRRHIMKDGTVDVCRACHRPGESIRHIISGCSRLANGEYLHRHNQVARIIHQQLALKYKLVDSEVPYYKYVPDPVLENDHVTLYWDRSIVTDRTIVANKPDIVVIDRLARRTMIVDVTIPHDGNLVKAEREKQIKYLDLAHEVVDMWNVSSAIIVPIVVSANGLMAESLDQHLSRLSLGGWIKGLAVLLDTARIVRRFLSLEP

SEQ ID NO: 28906 - protein, 1201 aa, Mesoligia furuncula
MLTRSAARRAHLPPPDSSLSPAPPPPEPSPIESAVTPAVAVASSSSDEYFSPPTSPTPVRRQGRGRPPNSLGLRGHPAPSRVPATGGCVQRMRWTQSMNENVMRAYYGSTEGGINLTAYRDRMLSLFQELEPTVNVSAQRLSDQVRVIQRNHRLDDIALDRLRSEVLSNHIVSTSAQTAAQVSTVDAIPPRFNRVEEEDDRVDTVSSQCNVRLRSALEDALREYRSTPTELRPRLPRLPMHKKNRALVCALDSQLKNFFESSEDLVDTHSILYCAAVAACRLANVKFSSCDGATRPKPAVPAWQRRIERRIDGARVLIGKLYCFREGNTRPRVMRFVRRAFSGTGISPREYMFRVTERIDFLKQKVCAWASRIRRYKRRVDRYTQNRMFQSDERWVYRAWERPEQNAADVCRPDDAATSAFWCSIWSVPVCHTEAGWMQDVERVCESIPEMEKVLITPSDVARAVRPLSNWKSPGPDGLHNFWLKWLISSHTCLASQFQSSLESGSLPQFLTTGVTHLLHKSGSPAEPKNYRPITCLSTVYKLLTSILRAKINKHIESNSIMSASQNGCRNGSRGTKELLVIDMAISQQVRRSRKDLSTCWIDYKKAYDSVPHTWLMRVLELYKIDATLRTFLESCMGQWKTVLRYPGCRQIQGNDEPVWIKRGIFQGDSLSPLWFCLALNPLSTLLEDSGLGYWLRRGGQVISHLLYMDDLKLFAPNKLRLMELLKVTKTFSSAIKMEFGVDKCAVMHVKRGEIMESEGIQLSDSISLRSLSSSESYKYLGMSEALGINDADMKQSLKERFFCRLKKVLISLLSGGNKVRAFNGWVMPVLMYSFGILKWTQTELDALDRRVRTLLTANRMHHPRSSVMRLYIPRKCGGRGFLNAKTLHNREVCSLREYFLKAEVGMHRDVVAVDKGLTPLSMAKENWRKPVVLSTDDRKRVWQSKELHGRFYRALHEPGVDFIASVSWLRFGDLFGETEGFVCAIMDEVILTNNYRRHIMKDGTVDVCRACHRPGESIRHIISGCSRLANGEYLHRHNQVARIIHQQLALKYKLVDSEVPYYKYVPDPVLENDHVTLYWDRSIITDRTIVANKPDIVVIDRLARRTMIVDVTIPHDGNLVKAEREKQIKYLDLAHEVVDMWNVSSAIIVPIVVSANGLMAESLDQHLSRLSLGGWIKGLIQKAVLLDTARIVRRFLSLEP

SEQ ID NO: 28907 - protein, 1200 aa, Xestia c-nigrum
MITRAASRRRARLPSPDSSLSSASPPPDPGSPVSTVAAVASSSSDEYFSPPTSPTPVRRAGRGRPPRSLGLRGQQAPSRVPATGGCVQRMRWTQSMNENAMRAYYGSTEGGTNLTAYRVRMLSLFQDLEPAVNVSAQRLSDQVRVIQRNHMLDDAALDRLRSEVLSNLIILTPAQTAVQASAIDATPPRSNPAVVEEDGRVATVSSQCNDRLRSALEDALREYRSTPTELRPRLPRLPMHKKNRALVCALDSQLKNVFESSEDLVDTHSILFCGAVAACRLANVKFPNCDLATRPKPAVPVWQRRIERRIDGARVLIGKLYCFREGNTRPRVMRFVRRAFSGTEISPQEYMSRVTERIDFLKQKVYAWASRIRRYKRRVDRYSQNRMFQCDERWVYRAWERPDQNVTDVCHPGDTATSSFWRSIWSVPVCHSEADWMRDVERVCEPIPEMAPVVITSLDIARAVRPLPNWKSPGPDGLHNFWLKWLSSSHTCLASQFQSSLESGSLPQFLTTGVTHLLHKSGSPTEPQNYRPITCLSTVYKLLTSILRTKINTHIDNNSIMSASQNGCRNGSRGTKELLLIDMAISQQVRRSRKDLSTCWIDYKKAYDSVPHSWLMRVLELYKIDATLCTFLKSCMGQWRTVLRYPGCRQIQGNDESVWIKRGIFQGDSLSPLWFCLALNPLSTLLENSGLGYQLRKDGQVISHLLYMDDLKLFAPNKLRLMELLKVTETFSNAIRMEFGVDKCAVMYVKRGEIMESEGLQLSDSIHLRSLSSSESYKYLGMSEALGINVTDMKQSLRERFFGRLKKVLNSLLSGGNKVRAFNGWVMPVLMYSFGILKWTQTELDALDRRVRTLLTENRMHHPRSSVMRLYIPRKCGGRGFLNVKTLHNREVCSLREYFLKAEVGMHRDVVAVDKGLTPLSMAKENWRKPVILTTDDRKKEWQGKVLHGRFYRALHGPDVDFLASVSWLRFGDLFGETEGFVCAIMDEVMLTNNYRKYIMKDGTVDVCRACHCPGESIRHIISGCSRLANGEYLHRHNQVARIIHQQLALKFKLVESEVPYYKYVPDPVLVKDHVTLYWDQSIITDRTIVANKPDIVVIDRSARRVMIIDVTIPHDENLVKAEKEKQIKYLDLAHEVRDMWNMNSVIIVPIVVTANGLIAKSLDEHLSKLSLGGWIKGLIQKAVLLDTARIVRRFLSLQP

SEQ ID NO: 28908 - protein, 962 aa, Xestia c-nigrum
MHKKNKALVCALDSQLKNIFESSEDLVDTHSILFCGAVAACRLANVKFPNCDIATRPKPAVPAWQRRIERRIDGARVLIGKLYCFREGNTRPRVMRFVRRAFSGTEISPQEYMSRVTERIDFLKQKVYAWASRIRRYKRRVDRYSQNRMFQSDERWVYRAWERPQQNMTDECRPDDAATSSFWRSIWSVPVCHSEADWMRDVERVCEPIPTMEPILITPLDIARAVRPLPNWKSPGPDGLPNFWLKWFSSSHTCLASHFQSSLESGSLPQFLTTGVTHLLHKSGSPAEPKNYRPITCLSTVYKLLTSILRTKINTHVDSNSIMSASQNGCRNGSRGTKELLLIDMAISQQVRRARKDLSTCWIDYKKAYDSVPHSWLKRVLELYKIDATLRAFLESCMGQWRTVLRYPGCRQIQGNDEPVWIKRGIFQGDSLSPLWFCLALNPVSTLLENSGLGYRLRKDGQVISHLLYMDDLKLFAPNKLQLMELLKVTETFSSAIGMEFGVDKCAVMYVKRGKIMGSEGLQLSDSIHLRFLSSSESYKYLGMSEALGINVTDMKQSLKERFFGRLKKVLNSLLSGGNKVRAFNGWVMPVLMYSFGILKWTQTELDALDRRVRTLLTENRMHHPRSSVMRLYIPRKCGGRGFLNAKTLHNREVCSLREYFLKADVGMHRDVVAVDKGLTPLSMAKENWRKPVVLTTDDRKNEWQGKELHGRFYRALHGPDVDFLASVSWLRFGDLFGETEGFVCAIMDEVMLTNNYRKYIMKDGTVDVCRACHCPGESIRHIISGCSRLANGEYLHRHNQVARIIHQQLALKFKLVESEVPYYKYVPDPVLVKDHVTLYWDQSIITDRTIVANKPDIVVIDRSARRVMIIDVTIPHDENLVKAEKEKQMKYLDLAHEVRDMWNMNSVIIVPIVVTANGLIAKSLDEHLSKLSLGGWIKGLIQKAVLLDTARIVRRFLSLQP

SEQ ID NO: 28909 - protein, 1200 aa, Xestia c-nigrum
MITRAASRRRARPPTPDSSLSSASPPPDPGSPVPPVAAVASSSSDEYFSPPTSPTPVRRAGRGRPPRSLGLRGQQAPSRVPATGGCVQRMRWTQSMNENVMRAYYGSTEGGINLTAYRDRMLSLFQDLEPAVNVSAQRLSDQVRVIQRSHRLDDTTLDRLRSEVLSNLITITPTQTAVHMSVVNATLPRSNPVVVEEDDRVALVSSQCNDRLRSALDNALREYRSISAELRPRLPRLPMHKKNRALVCALDSQLKNIFESSEDLVDTHSILFCGAVAACRLANVKFPNCDIAIRPKPAVPAWQRRIERRIDGARVLIGKLYCFREGNTRPRVMRFVRRAFSGTEISPQEYMSRVTERIDFLKQKVYAWASRIRRYKRRVDRYSQNRMFQSDERWVYRAWERPQQNMMDVCRPDDAATSSFWRSIWSVPVCHSEADWMRDVERVCEPIPTMEPILITPLDIARAVRPLPNWKSPGPDGLHNFWLKWFSSSHTCLASQFQSSLESGSLPQFLTTGVTHLLHKSGSPAEPKNYRPITCLSTVYKLLTSILRTKINTHVDSNSIMSASQNGCRNGSRGTKELLLIDMAISQQVRRARKDLSICWIDYKKAYDSVPHSWLKRVLELYKIDATLRAFLESCMGQWRTVLRYPGCRQIQGNDEPVWIKRGIFQGDSLSPLWFCLALNPVSTLLENSGLGYRLRKDGQIISHLLYMDDLKLFAPNKLQLMELLKVTETFSSAIGMEFGVDKCAVMYVKRGKIMGSEGLQLSDSIHLRSLSSSESYKYLGMSEALGINVTDMKQSLRERFFGRLKKVLNSLLSGGNKVRAFNGWVMPVLMYSFGILKWTQTELDALDRRVRTLLTENRMHHPRSSVMRLYIPRKCGGRGFLNAKTLHNREVCSLREYFLKADVGMHRDVAAVDKGLTPLSMANENWRKPVVLTTDDRMKEWQGKELHGRFYRALHGPDVDFLASVSWLRFGDLFGETEGFVCAIMDEVMLTNNYRKYIMKDGTVDVCRACHLPGESIRHIISGCSRLANGEYLHRHNQVARIIHQQLALKFNLVELEVPYYKYVPDPVLVKDHVTLYWDQSIITDRTIVANKPDIVVIDRSARRVMIIDVTIPHDENLVKAEKEKQIKYLDLAHEVRDMWNMDSVIIVPIVVSANGLIAKSLDEHLSKLSLGGWIKGLIQKAVLLDTARIVRRFLSLQP

SEQ ID NO: 28910 - protein, 1203 aa, Omphaloscelis lunosa
MLTRSAARSARLPPPDSPLSSASPPPVPSPIVNAVSTPAAVVASSSSDEYFSPPTSPTPVRRQGRGRPPKSLGLRGQPAPSRVPAAGGCVQRMRWTQSMNENVMRAYYGSTEGGTNLTAYRVRMLSLFQELEPTVNVSAQRLSDQVRVIQRNHRLDDTALDRLRSEVLSNHIVSAREQTAAEASNIDPTPPRFNHGVEEEDDRVATVSSQCNNRLRSALEDAFREYRYTPTELRPRLPRLPMHKKNRALMCALDSQLTNFFESSEDLIDTHSILYCAAVAACRLANVKFPNCDGATRPKPAVPAWQCRIERRIDGARVLIGKLYCFKEGNTRPRVMRFVRRAFSGTEISPQDYMSRVTERIDFLKQKVCAWASRIRRYKRRVDRYTQNRMFQSDERWVYRAWERPEQNVTDVCRPDDAATSAFWRSIWSVPVCHTEAGWMQDVERVCETIPEMDAVFITPLDVARAVRPLPNWKSPGPDGLHNFWLKWLSSSHTCLASQFQSSLESGSLPQFLTTGVTHLLHKSGNPAEPKNYRPITCLSTVYKLLTSILRTKINTHIDSNSIMSVSQNGCRNGSRGTKELLLIDMAISQQVRRSRKDLSTCWIDYKKAYDSVPHTWLMRVLELYKVDTTLRTFLMSCMGQWRTVLRYPGCRRTEGNDEPVWIKRGIFQGDSLSPLWFCLALNPLSTLLEDSGLGYRLRRGGQVISHLLYMDDLKLFAPNKLRLMELLKVTETFSGAIRMEFGVDKCAVMHVKRGEIMESEGIQLSDSIHLRPLSSAENYRYLGMSESLGINVADMKQSLKERFFGRLKKVLISFLSGGNKVRAFNGWVMPVLMYSFGILKWTQTELDALDRRVRTLLTANRMHHPRSSVMRLYIPRKCGGRGFLNAKTLHNREVCSLREYFFKADVGMHRDVVAVDNGLTPLSMAKENWRKPVVLTTDDRKEIWQSKALHGRFYRALHEPSVDFLASVSWLRFGDLFGETEGFICAIMDEVILTNNYRRHIMKDGTVDMCRACHRPGESIRHIISGCSRLANGEYLHRHNQVARIIHQQLALKYKLVDSEVPYYKYVPDPVLENDHATLYWDRSIITDRTIVANKPDIVVIDRLARHAMIVDVTIPHDENLVKAEKEKQIKYLDLAQEVVGMWNVSSAIIVLIVVTANGLMAKSLDHHLSRLSLGGWIKRLIQKAVLLDTACIVRRFLSLQP

SEQ ID NO: 28911 - protein, 1202 aa, Omphaloscelis lunosa
MLTRSAARSARLPPPDSPLSSASPPPVPSPIVNAVSTPAAVVASSSSDEYFSPPTSPTPVRRKGRGRPPRSLGLRGQPAPSRVPAAGGCVQRMRWTQLMNENVMRAYYGSTEGGTNLTAYRVRMLSLFQELEPTVNVSAQRLSDQVRVIQRNHRLDDIALDRLRSEVLNNHIVSTRAQTAAQESNIDPTPPRFNHGVEEDDRVATVSSQYNDRLRSALEDAFREYRYTPTELRPRLPRLPMHKKNRALVCALDSQLTNFFESSEDLIDTHSILYCAAVAACRLANVKFPNYDGATRPKPVVPAWQCRIERRIDGARVLIGKLYCFREGNTRPRVMRFVRRAFLGTGISPQEYMSRVTERIDFLKQKVCAWASRIRRYKRRVDRYTQNRMFQSDERWVYRAWERPEQNVTDVCRPDDAATSAFWRSIWSVPVCHTEAGWMQDVERVCETIPEMDAVFITPLDVARAVRPLPNWKSPGPDGLHNFWLKWLSSSHTRLASQFQSSLESGSLPQFLTTGVTHLLHKSGNPAEPKNYRPITCLSTVYKLLTSILRTKINTHIDSNSIMSVSQNGCRNGSRGTKELLLIDMAISQQVRRSRKDLSTCWIDYKKAYDSVPHTWLMRVLELYKVHTTLRTFLMSCMGQWRTVLRYPGCRQTQGNDEPVWIKRGIFQGDSLSPLWFCLALNPLSTLLEGSGLGYRLRRGGQVISHLLYMDDLKLFAPNKLRLMELLKVTETFSGAIRMEFGVDKCAVMHVKRGEIMESEGTQLSDSIHLRSLSSAENYRYLGMSESLGINVADMKQSLKERFFGRLKKVLISFLSGGNKVRAFNGWVMPVLIYSFGILKWTQTELDALDRRVRTLLTANRMHHPRSSVMRLYIPRKYGGRGFLNAKTLHNREVCSLREYFFKADVGMHRDVVAVDNGLTPLSMAKENWRKPVVLTTDDRKEVWQSKALHGRFYRALHEPGVDFLASVSWLRFGDLFGETEGFICAIMDEVILTNNYRRHIMKDGTVDVCRACHRPGESIRHIISGCSRLANGEYLHRHNQVARIIHQQLALKYKLVDSEVPYYKYVPDPVLENDHVTLYWDRSIITDRTIIANKPDIVVIDRLARRAMIVDVTIPHDENLVKAEKEKQIKYLDLAHEVVDMWNVSSAIIVPIVVTANGLMAESLDQHLSRLSLGGWIKRLIQKAVLLDTARIVRRFLSLQP

SEQ ID NO: 28912 - protein, 1202 aa, Sesamia nonagrioides
MLTRQAARRARSPPPDSSPSSASPPPVPSANVSAVTTPAAVVASSSSDEYFSPPTSPRPVRRQGRGRPPKSLGLRGHPAPSRVPAAGGCVQRMRWTQTMNENVMRAYYRATEGGTNLTAYRERMLSLFQALEPTVNVSAQRLSDQVRVIQRNHRLDDIALDRLGSEVLSNQITPTLTQTAAQASIIDAAPPRSNRVEEEDDRVETVSSQYNDRLRNALEDAFRDYRSTPTDLRPRLPRLPMHKKNRALVCALDSLLKNFFESSEDLIDTHSILYCAAVAACRLAKVKFPNCEEAARPKPAVPAWQRRIERRIDGTRVLIGKLYCFRDGNTRPRVMRFVRQAFSGTGISPREYINHLTERIDFLKQKVCAWASRIRRYKRRVDRYTQNRMFQSDERWVYRAWERPEQNEADVCRPDDATTSAFWRGIWSVSVCHTEVNWIQNVEQVCETIPEMDTILITPSDVAAAVRSLPNWKSPGPDGLHNFWLKWLSSSHTCLASQFQSSLESGSLPQFLTTGITHLLHKSGSTAEPKNYRPITCLPTVYKVLTSILKAKINKHLNSNSIMSVSQNGCKNGSRGTKELLLIDMAISQQVRRSRKDLSTCWIDYKKAYDSVPHTWLMRVLELYKVNATLRTFLRSCMGQWKTVLRYPGSRRIQGNDEPVWIKRGIFQGDSLSPLWFCLALNPLSTLLEDSGLGYRLQRGGQVISHLLYMDDLKLFAPNKLHLMKLLNVTETFSSGIKMEFGVDKCAVMHVKRGQIMEFEGITLPDSIHLRSLSSFESYKYLGMSEALGINDADMKQSLKERFFGRLKKVLKSLLSGGNKVRAFNGWVMPVLMYSFGILKWTQTELDALDRRVRTLLTANRMHHPRSSVMRLYIPRKCGGRGFLNAKTLHNREVCSLREHFFKTVVGMHHDVVTVDKGLTPLSMAKENWHKPIILTTDDRKMIWQSKELHGRFYRALHEPDVDFLASVSWLRFSDLFGETEGFVCAIMDEVILTNNYRRYIMKDGTIDVCRACHHPGESIRHIISGCSRLANSEYLHRHNQVARIIHQQLALKYKLVDSEVPYYKYVPDPVLENDHVTLYWDRSIITDRTIVANKPDIVVIDRLARLAMIVDVTIPHDGNLVKAEKEKQVKYLDLAHEIVDMWNVNSAVIVPIVVSANGLIAKSLDQHLLRLSLGSWIKGLIQKAVLLDTARIVRRFLSLEP

SEQ ID NO: 28913 - protein, 1202 aa, Sesamia nonagrioides
MLTRQAARRARSPPPDSSPSSASPPPVPSANVSAVTTPAAVVASSSSDEYFSPPTSPRPVRRQGRGRPPKSLGLRGHPAPSRVPAAGGCVQRMRWTQTMNENVMRAYYRATEGGTNLTAYRERMLSMFQALEPTVNVSAQRLSDQVRVIQRNRRLDDIALDRLRSEVLSNQITPTLTQTAAQASIIDAAPPRSNRVEEEDDRVETVSSQYNDRLRNALEDAFRDYRSTPTDLRPRLPRLPMHKKNRALVCALDSLLKNFFESSEDLIDTHSILYCAAVAACRLAKVKFPNCEEAARPKPAVPAWQRRIERRIDGTRVLIGKLYCFRDGNTRPRVMRFVRQAFSGTGISPREYINHLTERIDFLKQKVCAWASRIRRYKRRVDRYTQNRMFQSDERWVYRAWERPEQNEADVCRPDDATTSAFWRGIWSVSVCHTEVNWIQNVEQVCETIPEMDTILITPSDVAAAVRSLPNWKSPGPDGLHNFWLKWLSSSHTCLASQFQSSLESGSLPQFLTTGITHLLHKSGSTAEPKNYRPITCLPTVYKVLTSILKAKINKHLNSNSIMSVSQNGCKNGSRGTKELLLIDMAISQQVRRSRKDLSTCWIDYKKAYDSVPHTWLMRVLELYKVNATLRTFLRSCMGQWKTVLRYPGSRRIQGNDEPVWIKRGIFQGDSLSPLWFCLALNPLSTLLEDSGLGYRLKRGGQVISHLLYMDDLKLFAPNKLHLMKLLNVTETFSSGIKMEFGVDKCAVMHVKRGQIMESEGITLPDSIHLRSLSSFESYKYLGMSEALGINDADMKQSLKERFFGRLKKVLKSLLSGGNKVRAFNGWVMPVLMYSFGILKWTQTELDALDRRVRTLLTANRMHHPRSSVMRLYIPRKCGGRGFLNAKTLHNREVCSLREHFFKTVVGMHHDVVTVDRGLTPLSMAKENWHKPIILTTDDRKMIWQSKELHGRFYRALHEPDVDFLASVSWLRFSDLFGETEGFVCAIMDEVILTNNYRRYIMKDGTIDVCRACHHPGESIRHIISGCSRLANSEYLHRHNQVARIIHQQLALKYKLVDSEVPYYKYVPDPVLENDHVTLYWDRPIITDRTIVANKPDIVVIDRLARLAMIVDVTIPHDGNLVKAEKEKQIKYLDLAHEIVDMWNVNSAVIVPIVVSANGLIAKSLDQHLLRLSLGSWIKGLIQKTVLLDTARIVRRFLSLEL

SEQ ID NO: 28914 - protein, 868 aa, Sesamia nonagrioides
MRFVRQAFSGTGISPREYINNVTERIDFLKQKVCAWASRIRRYKKRVDRYTQNRMFQSDERWVYRAWERPEQNEADECRPDDATTSAFWRGIWSVSVCHTEGDWTQDVEQVCEAIPEMDNILITPLDVATAVRSLPNWKSPGPDGLHNFWLKWLSSSHTCLASQFQSSLESGSLPQFLTTGITHLLHKSGSTAEPKNYRPITCLPTVYKVLTSILKAKINNHLDSNSIMSVSQNGCRSGSRGTKELLLIDMAISQQVRRSRKDLSTCWIDYKKAYDSVPHTWLMRVLELYKINATLRTFLRSCMGQWKTVLRYPGSRQIQGNDEPVWIKRGIFQGDSLSPLWFCLALNPLSTLLEDSGLGYRLKRGGQVISHLLYMDDLKLFAPNKLHLMKLLNVTETFSSGIKMEFGVDKCAVMHVKRGQIMESEGITLPDSIHLRSLSSIESYKYLGMSEALGINDADMKQSLKERFFGRLKKVLNSLLSGGNKVRAFNGWVMPVLMYSFGILKWTQTELDALDRRVRTLLTANRMHHPRSSVMRLYIPRKCGGRGFLNAKTLHNREVFSLREYFFKTVVGMHHDVVTVDKGLTPLSMAKENWHKPIILTTDDRKMVWQSKELHGRFYRALHGPDIDFLASVSWLRFGDLFGETEGFVCAIMDEVILTNNYRRYIMKDGTIDVCRACHHPGESIRHIISGCSRLANSEYLHRHNQVARIIHQQLALKYKLVDSEVPYYKYVPDPVLENDHVTLYWDRSIITDRTIVANKPDIVVIDRLARLAMIVDVTIPHDGNLVKAEKEKQMKYLDLAHEVVDMWNVNSAVIVPIVVSANGLIAKSLDQHLLRLSLGSWIKGLIQKAVLLDTARIVRRFLSLEP

SEQ ID NO: 28915 - protein, 1111 aa, Apodemia chisosensis
MRWTTSINENVMRAYLGATEGGTNMTAYRARMHALFQVLEPALNVSAQRLSDQVRVIQRNHMLDNAVLDRLRSELQCNRATPPSPQAPAQSQTAPAISLQSTQADEGEDSGAAHVSTQCSEQLRSALESAIREYRSSPPEFRPRLPRLPMKNKNKALMGALDSLLPSYFDSSEDLSDTHSILYCAAVAACRVANVKFINNDTATRPKPAAPAWQCRIERRIDGARALIGKLLCFREGNTRPRVMRFVRRAFLGTDISPQDYMARVTERIDFLKQKVSAWASRIRRYKCRVERYTLNRTFQSDQRRVYRGWEHPDQGVTDARLPDDEAMTSFWRNIWSAPVAHTEGGWTWDVERACDQIPEMDLVTITPEDVTTAARPLPNWKSPGPDGLHNFWIKWLRSSHARLASQFQSSLESESLPQFLTTGITLLLHKSGSTTEPKNYRPITCLPTLYKLLTSILRTKINDHIDTKSIMSISQNGCRNGSRGTKELLLIDMAICQQVRRSRRDLSTCWIDYKKAYDSVPHTWLMKVLELYKVNSVLRAFLQTCMGQWRTVLHYPGCRRTLGSAEPIRIERGIFQGDSLSPLWFCLALNPLSTLLENSGLGYRLRRGGQVISHLLYMDDLKLIAPNKSHLLELLKVTKAFSDSIRMEFGVDKCAVMHVKRGRIVESEGVELSDSIYLRSLSPTETYKYLGMAEALGIREADMRQSVRERFLGRLKKVLKSLLSGGNKVRAFNGWVMPVLMYSFGILRWTQTELDALDRQVRALLTTYRMHHPRSSVMRLYIPRKCGGRGLLNAKTLHNREVCSLREYFLHAETEMHRDVVAVDRGLTPLSLAKENWRIPVVLSTNDRRVVWQGKELHGRFYRALHGPDVDFEASVAWLRFGDLFGETEGFVCAIMDEVMMTNNYRKYIVKDGTVDICRACRRPGETIRHIVSGCSHLANGEYLHRHNQVARIIHQQLALKYNLVESEVPYYKYVPDPVLENGHITLYWDRSIITDRTIVANKPDIVVIDRSERRAMIVDVAVPHDENLVKAEKEKLTKYLDLAHEVVAMWNVDSAIIVPIVITANGLIAKSLDQHLSRLSLGSWVKGQIQKAVLLDTARIVRRFLSLGP

SEQ ID NO: 28916 - protein, 1088 aa, Noctua janthe
MTPGTNGLTCFPRHGGNSVCNGWSPIIIKIMRVIQRNHMLDDAALDRLRSEGLSNRIVLTPAQTAVQASAIDATPPRSNPAVVEEDDRVAMVSSQCNDRLRSALEDALREYRSTPTKLRPRLPRLPMHNKNRALVCALDSQLKNIFESSENLVDTHSILYCGAVAACRLANVKFPNYDVAIRPKPAVPTWQRRIECRIDEARVLIGKLYCFREGNTRPRVMRFVRRAFSGTGISPQEYMSRVTERIDFLKQKVYAWANRIRRYKRRVDRYSQNRIFQSDERWVYRARERPEQNMTDVCRPDDAATSSFWRSIWSVPVCHTEADWIRDVERTCEPIPEMEPILITPIDIARAVRPLPNWKSPGPDGLHNFWLKWLSSSHTCLASQFQSSLKSGSLPQFLTTGVTHLLHKSGSPTEPKNYRPITCLSTVYKLLTSILRVKINTHIDKNFIMSASQNGCRNRSRGTKELLLIDMAISQQVRRSRKDLSTCWIDYKKAYDSVPHTWLMRVLELYKIDATLRAFLESCMGQWRTVLRYPGCRQIQGNDEPVWIKRGIFQGDSLSPLWFCLALNPLSTLLEDSGLGYRLRRGGQVISHLLYMDDLKLFAPNKLRLMELLKVTETFSNAIRMEFGVDKCAVMYVKRGEIMESEGIQLSDSIHLRPLSSSESYKYLGMSESLGINVTDMKQSLRERFFGRLNKVLNSLLSGGNKVRAFNGWVMPVLMYSFGVLKWTQTELDALDRRVRTLLTANRMHHPRSSVMRLYIPRKCGGRGFLNAKTLHNHEICSLREYFLKTEVGMHRDVVAVDKGLTPLSMAKENWRKPVVLTTDDRKEVWQGKELHGRFYRALHGPDLDFLASVSWLRFGDLFAETEGFVCAIMDEVMLTNNYRKYIMKDGTVDVCRACHRPGESIRHIISGCSRLANGEYLHRHNQVARIIHQQLALKYKLVESEVPYYKYVPDPVLEKDHVTLYWDRSIIADRTIVANKPDIVVIDRLARRVMIVDVTIPHDENLVKAEKEKQIKYLDLAHEVVDMWNVNSAIIVPIVVTANGLIAKSLDDHLSRLSLGGWIKGLIQKAVLLDTARIVRRFLSLEP

SEQ ID NO: 28917 - protein, 1099 aa, Noctua janthe
MITRAAYRRARLTTPDSSLSSASPPPDPGSPVSPAAAVASSSSDEYFSPPTSPTPVRRQGRGRPPKSLGLRGHPAPSRVPAAGGCVQRMRWTQTINENVMRAYYGSTEGGTNLTAYRVRMLSLFQVLEPIVNVSAQRLSDQVRVIQRNHMLDDAALDRLRSEVLSNRIVLTPAQTAVQVSTIDATPPRSNPAVVEEDDRVAMVSSQCNDRLRSALEDALREYRSTPTKLRPRLPRLPMHNKNRALVCALDSQLKNIFESSENLVDTHSILYCGAVAACRLANVKFPNYDVAIRPKPAVPTWQRRIECRIDEARVLIGKLHCFREGNTRPRVMRFVRRAFSGTGISPQEYMSRVTERIDFLKQKVYAWANRIRRYKRRVDRYSQNRIFQSDERWVYRAWERPEQNMTDMCRPDDAATSSFWRSIWSVPVCHTEADWMRDVERACEPIPEMEPILITSIDITRAVRPLPNWKSPGPDGLHNFWLKWLSSSHTCLASQFQSSLESGSLPQFLTTGVTHLLYKSGSPAEPKNYRPITCLSTVYKLLTSILRVKINTHIDKNFIMSASQNGCRNRSRGTKELLLIDMAISQQVRRSRKDLSTCWIDYKKAYDSVPHTWLMRVLELYKIDATLRAFLESCMGQWRTVLRYPGCRQIQGNDEPVWIKRGIFQGDSLSPLWFCLALNPLSTLLEDSGLGYRLRRGGQVISHLLYMDDLKLFASNKLRLMELLKVTETFSNAIRMEFGVDKCAVMYVKRGEIMESEGIQLSDSIHLRSLSSSESYKYLGMSESLGINVTDMKQSLRERFFGRLNKVLNSLLSGGNKVRAFNGWVMPVLMYSFGVLKWTQTELDALDRRVRTLLTANRMHHPRSSVMRLYIPRKCGGRGFLNAKTLHNREICSLREYFLKTEVGMHRDVVAVDKGLTPLSMAKENWRKPVVLTTDDRKEVWQGKELHGRFYRALHGPDVDFLASVSWLRFGDLFGETEGFVCAIMDEVMLTNNYRKYIMKDGTVDVCRACHRPGESIRHIISGCSRLANGEYLHRHNQVARIIHQQLALKYKLVESEVPYYKYVPDPVLEKDHVTLYWDRSIITDRTIVANKPDIVVID

SEQ ID NO: 28918 - protein, 1200 aa, Mythimna ferrago
MLTRAAARRARHPPPGSSLSSASPPPDPGSPVSPAAAVASSSSDEYFSPPTSPTPVRRPGRGRPPKSMGPRGQAAPSRVPAAGGCVQRMRWTQSMNENVMRAYYGSTEGGTNLTAYRERMLSLFQVLEPTVNVSAQRLSDQVRVIQRNHRLDDAALDRLCSEILSNQIVSTSMQTQTAATPTTNAISPRSDHNNDDADDRVVTVSSQCNERLRSALEDALCEYMSTPTELRPRLPRLPMHKKNRALVCALDSLLKNIFESSENLIDTHSILYCGAVAACRLANIKFPNIDGTIRPKSAVPAWQCRIERRIGEARVLIGKLHCFREGNTRPRVMRFVRRAFLGTGISPQGYMSRVTERIDFLKQKVCAWASRIRRYKRRVDRYSQNRMFQSDERWVYRAWERPEHSVIDGCRPDDFATITFWRNIWSVPVSHAEGGWMRDVERVCEAIPEMEKVTITPEDVAKAVRPLPNWKSPGPDGLQNFWLKWYSSSHALLASQFQSILESGSLPEYLTTGITHLLHKTGNPVDPKNYRPITCLSTVYKLLTSILRAKINIHIENHQIISPSQNGCRNGSRGTKELLLIDMAISQQTRRSRKDLSTCWIDYKKAYDSVPHTWLMRVLELYKIDITLRTFLESCMRQWKTVLRYPGCRPIQGNDEPIWIKRGIFQGDSLSPLWFCLALNPLSTLLEDSGLGYRLRRGGQVISHLLYMDDLKLFAPSTLQLMELLKVTETFSSAIRMEFGVDKCAGMHVKRGEIMESEGIQLPDSIHLRSLSSTETYKYLGMSEALGINNADMKQSLKERFFGRLKKVLNSLLSGGNKVRAFNGWVMPVLMYSFGILKWTQTELDALDRRVRTLLTANRMHHPRSSVMRLYIPRKCGGRGFLNAKTLHNREVCSLREYFLKTDVGMHRDVVAVDKGLTPLSMAKEDWHKPVIMTTDNRKEIWKGKELHGRFFRALHEPDVDFLASVAWLRFSDLFGETEGFVCAIMDEVILTNNYRRYIMKDGTVDVCRACHRPGESIRHIISGCSRLANGEYLHRHNQVARIIHQQLALKYNLVDLEVPYYKYVPDPVLENDHVTLYWDRSIITDRTIVANKPDIVVIDRSARRAMIVDITIPHDENLVKAEKEKQMKYLDLAHEVVDMWSVDSAVIVPIVVTANGLIAKSFDDHLSKLSLRGWIKGQIQKAVLLDTARIVRKFLSLEP

SEQ ID NO: 28919 - protein, 868 aa, Mythimna ferrago
MRYVRRAFSGTGVSPREYLAHVMERIDFLKQKVCAWANRIRRYKRRVDRYSQNRMFQSDERWVYRDWERPEQSVTDVLRPDVAATNEFWRSIWSVPVCHTEGGWMRDIERVCKAIPEMEKVFISPIDVAKAVRPLPNWKSPGPDGLQNFWLKWYSSSHALLASQFQSSLESGSLPQFLTTGVTHLLHKTGSTAEPKNYRPITCLSTVYKLLTSILRTKINNHIENNSIMSASQNGCRNGSRGTKELLLIDMAISQQVRRSRKDLSTCWIDYKKAYDSVPHTWLMRVLELYKIDATLRTFLESCMGEWNTVLRYPGCRSIRGDDEPIWIKRGIFQGDSLSPLWFCLALNPLSTLLEDSGLGYRLRRGGQVLSHLLYMDDLKLIAPHKLQLMELLKVTETFSSAIRMEFGVDKCAVMHVKRGEIMESEGIQLSDSIHLRSLSSTETYKYLGMSEALGINVTDMKQSLKERFFGRLKKVLNSLLSGGNKVRAFNGWVMPVLMYSFGILKWTQTELDALDRRVRTLLTANRMHHPRSSVMRLYIPRKCGGRGFLNAKTLHNREVCSLREYFQKTDVGMHRDVVAVDKGLTPLSMAKENWRKPVVLTTDDRREVWKNKELHGRFYRALHEPDVDFGASVAWLRFSNLFGETEGFICAIMDEVILTNNYRRYIMKDGTVDVCRACHRPGESIRHIISGCSRLANGEYLHRHNQVARIIHQQLALKYKLMESEVPYYRYVPDPVLENDHVTLYWDRSIITDRTIIANKPDIVVIDRLARRAMIVDVTIPHDENLVKAEKEKKIKYLDLAHEVVDLWNVDSAVIVPIVVSVNGLIAKSFDDHLSKLALRGWIKGLIQKAVLLDTARIVRRFLSLEP

SEQ ID NO: 28920 - protein, 1200 aa, Mythimna ferrago
MLTRAAAQRARLPPPDSLLSSASPPPDPGSTVSPAAAVASSSSDEYFSPPTSPTPVRRPGRGRPPNGLGFRGQPAPSRVPAAGGCVQRMKWTQSMNENVMRAYYGSTEGGTNLTAYRVRMLSLFQDLEPTVNVSAQRLSDQVRVIQHNHRLDDAALDRLRSQVLSNPIVSTPQQIQTAGPSTSVTTTPRYVHVEDEADDRVDRVSSQCNDRLRSALEDALREYRSTPTELRPRLPRLPMHKKNRALVCALDSLLKNIFESSDNLLDTHSILYCGAVAACRLANVKFPCYGVATRPTPAAPAWQCRIERRIDEARALIGKLYCFREGNTRPRVMRFVRRAFSGTEISPREYMSRVTERIDFLKQKVCAWANRIRRYKRRVDRYSQNRMFQSDERWVYRAWERPGQNVTDGFRPDSVATNTFWRSIWSEPVCHNEGGWMRDVERVCEAIPEMDKVFITPLDVARAVRPLPNWKSPGPDGLQNFWLKWYSSSHAILASQFQSSLESGSLPQILTTGTTHLLHKTGSTADPKNYRPITCLSTVYKLLTSILRVKITLHIEKNSIMFASQNGCRNGSRGTKELLLIDMAISQQVRRSRKDLSTCWIDYKKAYDSVPHTWLMKVLELYKIDATLRTFLESCMRQWKTVLRYPGCRPIQGNDEPIWIKRGIFQGDSLSPLWFCLALNPLSTLLEDSGLGYRLRRGGQVLSHLLYMDDLKLFAHNNSQLMELLKVTETFSSAIRMEFGVDKCAVMHVRRGEIVESEGIQLSDSIHLRSLSSTETYKYLGMSEALGINVVDMKQTLKERFFGRLKKVLNSLLSGGNKVRAFNGWVMPVLMYSFGILKWTQTELDALDRRVRTLLTANRMHHPRSSVMRLYIPRKCGGRGFLNAKTLHNREVCSLREYFLKTDVGMHRDVVAVDKGLTPLSMAKENWRKPVVLTTDDRKEVWKGKELHGRFFRALHEPDVDFSASVAWLRFSNLFGETEGFVCAIMDEVILTNNYRRHIMKDGTVDVCRACHRPGESIRHIISGCSRLANGEYLHRHNQVARILHQQLALKYNLVDSEVPYYRYVPDPVLENDHVTLYWDRSIITDRTIVANKPDIVVIDRLARRAMIVDVTIPHDENLVKAEKEKQIKYLDLAHEVVDMWNVDSAIIVPIVVTANGLIAKSFDDHLSKLSLHGWIKGLIQKAVLLDTARILRRFLSLEP

SEQ ID NO: 28921 - protein, 1200 aa, Mythimna ferrago
MLTRAAAQRARIPPPDSLLSSASPPPDPGSSVSPAAAVASSSSDEYFSPPTSPTPVRRPGRGRPPNGLGFRGQPAPSRVPAAGGCVQRMKWTQSMNENVMRAYYGATEGGTNLTAYRVRMLSLFQDLEPTVNVSAQRLSDQVRVIQRNHRLDDAALDRLRSQVLSNPIVSTPQQIQTVRPSTSVTTTSRYDHVEDEADDRVDRVSSQCNDRLRSALEDALREYRSTPTELRPRLPRLPMHKKNRALVCALDSLLKNVFESSDSLLDTHSILYCGAVAACRLANVKFPCYGVATRPTPAAPAWQCRIERRIDEARALIGKLYCFREGNTRPRVMRFVRRAFSGTEISPREYMSRVTERIDFLKQKVCAWANRIRRYKRRVDRYSQNRMFQSDERWVYRAWERPGQNVTDGFRPDSVVTNTFWRSIWSEPVCHNEGGWMRDVERVCEAIPEMDKVFITPLDVARAVRPLPNWKSPGPDGLQNFWLKWYSSSHAILASQFQSSLESGSLPQILTTGTTHLLHKTGSTADPKNYRPITCLSTVYKLLTSILRVKITLHIEKNSIMFASQNGCRNGSRGTKELLLIDMAISQQVRRSRKDLSTCWIDYKKAYDSVPHTWLMKVLELYKIDATLRTFLESCMRQWKTVLRYPGCRPIQGNDEPIWIRRGIFQGDSLSPLWFCLALNPLSTLLEDSGLGYRLRRGGQVLSHLLYMDDLKLFAHNNSQLMELLKVTETFSSAIRMEFGVDKCAVMHVRRGEIVESEGIQLSDSIHLRSLSSTETYKYLGMSEALGINVADMKQTLKERFFGRLKKVLNSLLSGGNKVRAFNGWVMPVLMYSFGILKWTQTELDALDRRVRTLLTANRMHHPRSSVMRLYIPRKCGGRGFLNAKTLHNREVCSLREYFLKTDVGMHRDVVAVDKGLTPLSMAKENWRKPVVLTTDDRKEVWKGKELHGRFFRVLHEPDVDFSASVAWLRFSNLFGETEGFVCAIMDEVILTNNYRRHIMKDGTVDVCRACHRPGESIRHIISGCSRLANGEYLHRHNQVARILHQQLALKYNLVDSEVPYYRYVPDPVLENDHVTLYWDRSIITDRTIVANKPDIVVIDRLARRAMIVDVTIPHDENLVKAEKEKQIKYLDLAHEVVDMWNVDSAIIVPIVVTANGLIAKSFDDHLSKLSLHGWIKGLIQKAVLLDTARIVRRFLSLEP

SEQ ID NO: 28922 - protein, 868 aa, Noctua pronuba
MRFVRRAFSGTGISPQEYMSRVTERIDFLKQKVYAWANRIRRYKRRVDRYSQNRMFQSDERWVYRAWERPEQNMTDVCRPDDATTSSFWSSIWSVPVCHTEADWMRDVERMCEPIPEMEPILITPQDIARAVRPLPNWKSPGPDGLHNFWLKWLSSSHTCLASQFQSSLESGSLPQFLTTGVTHLLHKSGSPAEPKNYRPITCLSTVYKLLTSILRAKINTHIDKNSIMSASQNGCRNGSRGTKELLLIDMAISQQVRRSRKDLSTCWIDYKKAYDSVPHTWLMRVLELYKVDATLRAFLESCMGQWRTVLRYPGCRQIQGNNEPVWIKRGIFQGDSLSPLWFCLALNPLSTLLEDSGLGYRLRRGGQVISHLLYMDDLKLFAPNKLRLMELLKVTETFSSAIRMEFGVDKCAVMYVKRGEIMESEGIQLSDSIHLRSLSSSESYKYLGMSEALGINVTDMKQSLRERFFGRLKKVLNSLLSGGNKVRAFNGWVMPVLMYSFGILKWTQTELDALDRRVRTLLTANRMHHPRSSVMRLYIPRKCGGRGFLNAKTLHNREVCSLREYFLKAEVGMHRDVVAVDKGFTPLSMAKENWRKPVVLTTDDRKEVWQGKELHGRFYRALHGPDVDFLASVSWLRFGDLFGETEGFVCAIMDEVMLTNNYRKYIMKDGTVDVCRACHRPGESIRHIISGCSRLANGEYLHRHNQVARIIHQQLALKYKLVESEVPYYKYVPDPVLEKDHVTLYWDRSIITDRTIVANKPDIVVIDRSARRVMIVDVTIPHDENLVKAEKEKQIKYLDLAHEVVDMWNVNSAVIVPIVVTANGLMAKSFDDHLSKLSLGGWIKGLIQKAVLLDTARIVRRFLSLEP

SEQ ID NO: 28923 - protein, 1202 aa, Noctua pronuba
MLTRAAARRARLSPPDSSLSSASPLPESSPIVSAVTPAVAVASSSSDEYFSPPTSPTPVRRQGRGRPPTSLGLRGHPAPSRVPATGGCVQRMRWTHPINENVMRAYYGSTEGGTNLTAYRVRMLSLFQVLEPTVNVSAQRLSDQVRVIQRNHMLDDAVLDRLRSEVLSNRIVLTPSQTVVQTTAIDVSPPRSNPAVVEEDDRVATVSSQCNDRLRSALEDALREYRYTPTELRPRLPRLPMHKKNRALVCALDSQLKNLFESSEDLVDTHSILYCGAVAACRLAKLKFTNSDAATRPKPAVPAWQCRIERRIDGARVLIGKLHCFREGNTRPRVMRFVRRAFSGTGISPQEYMSRVTERIDLLKQKVYAWANRIRRYKRRVDRYSQNRMFQSDERWVYRAWERPEQNMTDVCRPDDATTSSFWSSIWSVPVCHTEGDWMRAVERVCEPIPEMEPILITSLDVARSVRPLPNWKSPGPDGLHNFWLKWLSSSHTCLASQFQSSLESGALPQFLTTGVTHLLHKSGNPAEPKNYRPITCLSTVYKLLTSILRAKINTHIDKNSIMSASQNGCRNGSRGTKELLLIDMAISQQVRRSRKDLSTCWIDYKKAYDSVPHTWLMRVLELYKIDATLRTFLESCMGQWRTVLRYPGCRQIQGNDEPVWIKRGIFQGDSLSPLWFCLALNPLSTLLEDSGLGYRLRRGGQVISHLLYIDDLKLFAPNKLRLMELLKVTETFSSAIRMEFGVDKCAVMYVKRGEIMESEGIQLSDSIHLRSLSSSESYKYLGMSEALGINVTDMKQSLRERFFGRLKKVLNSLLSGGNKVRAFNGWVMPVLMYSFGILKWTQTELDALDRRVRTLLTANRMHHPRSSVMRLYIPRKCGGRGFLNTKTLHNRELCSLREYFLKAEVGMHRDVVAVDKGLTPLSMAKENWRKPVVLTTDDRKEVWQGKELHGRFYRALHGPDVDFLASVSWLRFGDLFGETEGFVCAIMDEVMLTNNYRKYIMKDGTVDVCRACHRPGESIRHIISGCSRLANGEYLHRHNQVARIIHQQLALKYKLVESEVPYYKYVPDPVLEKDHVTLYWDRSIITDRTIVANKPDIVVIDRSARRVMIVDVTIPHDENLVKAEKEKQIKYLDLAHEVVDMWNVNSAIIVPIVVTANGLMAKSLDDHLSRLSLGGWIKGLIQKAVLLDTARIVRRFLSLEP

SEQ ID NO: 28924 - protein, 1207 aa, Ochropleura plecta
MLTRRRAQEQQALPSSPGSSLSSASQPPGRATRVSAVSPVAAVASSSSDEFFSPPSSPPPPPTRQRRGRGRPPAGLGSRGQQAPIRVPAAGGNVSRMRWTSFINANVMRAYYGSTEGGTNLTAYRVRMLSLFQDLEPTINVSAQRLSVQVRVIQRNHLLDDAALDRLRSEVLSNRVILTTPQTAVQASAIDVTQPRSNPAVVEEDDRVATVSSQCNDRLRSALEDALRDYRSTPAELRPRLPRLPMHKKNRALVCALDSQLKNLFESSEDLVDTHSILYCGAVAVCRLANVKFPNCDVATRPKPSVPAWQCRIERRIDEARALIGKLYCFREGNTRPRVMRFVRRAFSGTGISPQEYMSRTTERIDFLKQKVYAWANRIQRYKRRVDRYSQNRMFRSDERWVYRAWERPEQSVTDVCRPDDVATSSFWHSIWSVRVCHTEAGWMRDVERVCETIPEMEPILITSLDIASAVRPLPNWKSPGPDGLHNFWLKWLSSSHTRLASQFQSCLESGSLPQFLTTGVTHLLYKSGSPAEPKNYRPITCLSTVYKLLTSILRAKINSHIVKNSIISASQNGCRNGSRGTKELLLIDMAISKQVRRSRKDLSTCWIDYKKAYDSVPHTWLKRVLELYKIDTTLRTFLESCMGQWRTVLRYPGCRQIQGNDEPVWIKRGIFQGDSLSPLWFCLALNPLSTLLEDSGLGYRLRRGGQVISHLFYMDDLKLFAPNKLRLMELLKVTETFSNAIRMEFGVDKCAVMYVKRGEIMESEGIHLSDSIHLRSLSSSESYKYLGMSEALGINVADMKQLLRERFFGRLKKVLKSLLSGGNKVRAFNSWVMPVLMYSFGILKWTQTELDALDRRVRTLLTANRMHHPRSSVMRLYIPRKCGGRGFLNAKTLHNREVCSLREYFLKTDVGMHRDVVAVDKGLTPLSMAKENWRKPVVLTTDYRKEVWQGKELHGRFYKALHGPDVDFLASVSWLRFGDLFGETEGFVCAIMDEVMLTNNYRKYIMKDGTVDVCRACHRPGESIRHIISGCSRLANGEYLHRHNQVARIIHQQLALKYNLVESELPYYKYVPDPVLEKDHVTLYWDRSIITDRTIVANKPDIVVIDRSARRVMIIDVTIPHDENLVKAEKEKQLKYLDLAHEVVDMWNVNSAIIVPIVITANGLIAKSLDEHLSKLSLGGWIKGLIQKAVLLNTARIVRRFLSLEP

SEQ ID NO: 28925 - protein, 1170 aa, Ochropleura plecta
MSPVAAVASSSSDEFFSPPSSPPPPTRQRRGRGRPPAGLGSRSQQAPIRVPAVGGNVSRMRWTSSINANVMRAYYGSTEGGTNLTAYRVRMLSLFQDLEPTINVSAQRLSDQVRVIQRNHMLDDAALDRLRSEVLSNRIILTTPQTAMQASVIDGMQPRSDPAVVEEDDRVATVSSQCNERLRSALEDALRDYRSTPAELRPRLPRLPMHKKNRALVCALDSQLKNLFESSEDLVDTHSILYCGAVAVCRLANVKFPSCDVATRPKPSVPAWQCRIERRIDEARVLIGKLYCFREGNTRPRVMRFVRRAFSGTGISPQEYMSRTTERIDFLKQKVYAWANRIRRYKRRVDRYSQNRMFRSDERWVYRAWERPEQSVTDVCRPDDVATSSFWHSIWSVPVCHTEADWMRDVERVCETIPEMEPILITSLDIASAVRPLPNWKSPGPDGLHNFWLKWLSSSHTRLASQFQSCLESGSLPQFLTTGVTHLLYKSGSPAEPKNYRPITCLSTVYKVLTSILRAKINSHIDNNSIMSASQNGCRNGSRGTKELLLIDMAISQQVRRSRKDLSTCWIDYKKAYDSVPHTWLKRVLELYKIDATLRAFLESCMGQWRTVLRYPGCRQIQGNDEPVWIKRGIFQDDSLSPLWFCLALNPLSTLLEDSGLGYRLRRGGQVISHLLYMDDLKLFAPNKLRLMELLKVTETFSNAIRMEFGVDKCAVMYVKRGEIMESEGIQLSDSIHLRSLSSSESYKYLGMSEALGINVADMKQLLRERFFGRLKKVLKSLLSGGNKVRAFNSWVMPVIMYSFGILKWTQTELDALDRRVRTLLTGNRMHHPRSSVMRLYIPRKCGGRGFLNAKTLHNREVCSLREYFLKTDVGMHRDVVAVDKGLTPLSMAKENWRKPVVLTTDDRKVVWQGKELHGRFYKALHGPDVDFLASVSWLRFGDLFGETEGFVCAIMDEVMLTNNYRKYIMKDGTVDVCRACHRPGESIRHIISGCSRLANSEYLHRHNQVARIVHQQLALKYNLVESEVPYYKYVPDPVLEKDHVTLYWDRSIITDRTIVANKPDIVVIDRSARRVMIIDVTIPHDENLVKAEKEKQLKYLDLAHEVVDMWNVNSAIIVPIVVTANGLIAKSLDEHLSKLSLGGWIKGLIQKAVLLDTVRIVRRFLSLEP

SEQ ID NO: 28926 - protein, 983 aa, Ochropleura plecta
MRFATIDPLQPNLDPDYQGYPCIKKNRALVCALDSQLKNLFESSEDLVDTHSILYCGAVAVCRLANVKFPNCDVATRPKPSVPAWQCRIERRIDEARALIGKLYCFREGNTRPRVMRFVRRAFSGTGISPQEYMSRTTERIDFLKQKVYAWANRIQRYKRRVDRYSQNRMFRSDERWVYRAWERPEQSVTDVCRPDDVATSSFWHSIWSVRVCHTEAGWMRDVERVCETIPEMEPILITSLDIASAVRPLPNWKSPGPDGLHNFWLKWLSSSHTRLASQFQSCLESGSLPQFLTTGVTHLLYKSGSPAEPKNYRPITCLSTVYKLLTSILRAKINSHIVKNSIISASQNGCRNGSRGTKELLLIDMAISQQVRRSRKDLSTCWIDYKKAYDSVPHTWLKRVLELYKIDTTLRTFLESCMGQWRTVLRYPGCRQIQGNDEPVWIKRGIFQGDSLSPLWFCLALNPLSTLLEDSGLGYRLRRGGQVISHLFYMDDLKLFAPNKLRLMELLKVTETFSNAIRMEFGVDKCAVMYVKRGEIMESEGIHLSDSIHLRSLSSSESYKYLGMSEALGINVADMKQLLRERFFGRLKKVLKSLLSGGNKVRAFNSWVMPVLMYSFGILKWTQTELDALDRRVRTLLTANRMHHPRSSVMRLYIPRKCGGRGFLNAKTLHNREVCSLREYFLKTDVGMHRDVVAVDKGLTPLSMAKENWRKPVVLTTDYRKEVWQGKELHGRFYKALHGPDVDFLASVSWLRFGDLFGETEGFVCAIMDEVMLTNNYRKYIMKDGTVDVCRACHRPGESIRHIISGCSRLANGEYLHRHNQVARIIHQQLALKYNLVESEVPYYKYVPDPVLEKDHVTLYWDRSIITDRTIVANKPDIVVIDRSARRVMIIDVTIPHDENLVKAEKEKQLKYLDLAHEVVDMWNVNSAIIVPIVITANGLIAKSLDEHLSKLSLGGWIKGLIQKAVLLNTARIVRRFLSLEP

SEQ ID NO: 28927 - protein, 1206 aa, Ochropleura plecta
MLTRRRAQEQQTLPPSPGSSLSSASQPPGRATRVSAVSPVAAVASSSSDEFFSPPSSPPPPTRQRRGRGRPPAGLGSRGQQVPIRVPAAGGNVSRMRWTSFINENVMRAYYGSTEGGTNLTAYRVRMLSLFQDLEPTINVSAQRLSDQVRVIQRNHLLDDAALDRLRSEVLGNRAILTTPQTAVQASAIDVTQPRSNPAVVEEDDRVATVSSQCNERLRSALEDALRDYRSTPTELRPRLPRLPMHKKNRALVCALDSQLKNLFESSENLVDTHSILYCGAVAVCRVANVKFQNSDVATRPKPSVPVWQCRIERRIDEARVLIGKLYCFREGNTRPRVMRFVRRAFSGTGISPQEYLSCTTERIDLLKQKVYAWTNRIRRYKRRVDRYSQNRMFRSDERWVYRAWERPEQSVTDVCRPDDVATSSFWHSIWSVPVCHTEADWMRDVERVCETIPEMEPILITSIDIASAVRPLPNWKSPGPDGLHNFWLKWLSSSHTHLASQFQSCLESGSLPQFLTTGITHLLYKSGSPAEPKNYRPITCLSTVYKLLTSILRAKINSHIDKNSIMSASQNGCRNGSRGTKELLLIDMAISQQVRRSRKDLSTCWIDYKKAYDSVPHTWLKRVLELYKIDATLRAFLESCMGQWRTVLRYPGCRQIQGNDEPVWIKRGIFQGDSLSPLWFCLALNPLSTLLEDSGLGYRLRRGGQVISHLLYMDDLKLFAPNKLRLMELLKVTETFSNAIRMEFGVDKCAVMYVKRGEIMESEGIQLSDSIHLRSLSSSESYKYLGMSEALGINVADMKQLLRERFFGRLKKVLKSLLSGGNKVRAFNSWVMPVLMYSFGILKWTQTELDALDRRVRTLLTGNRMHHPRSSVMRLYIPRKCGGRGFLNAKTLHNREVCSLREYFLKTDVGMHRDVVAVDKGLTPLSMAKENWRKPVVLTTDDRKVVWQGKELHGRFYKALHGPDVDFLASVSWLRFGDLFGETEGFVCAIMDEVMLTNNYRKYIMKDGTVDVCRACHRPGESIRHIISGCSRLANSEYLHRHNQVARVIHQQLALKYNLVESEVPYYKYVPDPVLEKDHVTLYWDRSIITDRTIVANKPDIVVIDRSARRVMIIDVTIPHDENLVKAEKEKQLKYLDLAHEVVDMWNVNSAIIVPIVVTANGLIAKSLDEHLSKLSLGGWIKGLIQKAVLLDTARIVRRFLSLEP

SEQ ID NO: 28928 - protein, 1199 aa, Hecatera dysodea
MLTRAATLRARHPPPGSPLSSASPPPDIESQVSPAVAVASSSSDEYFSPPTSPPPVRRQGRGRPPRGLGPRGQPAPSRVPATGGCVQRMRWTQSMNENVMRAYYGSTEGGINLTAYRVRMLSLFQDLEPTVNVSAQRLSDQVRVIQRSHRLDEAALDRLRSEVLNNLIISTPTQTAVQAPGSGAIIPRPINVCDEVVDRVVTVSSQCNDRLRSALEDALREYRSTPTELRPRLPRLPMHKKNRALVCALDSLLKNIFESSENLVDTHSILYCGAVAACRVANVKFSNSDGATRPKNAAPAWQCRIERRIDEARVLIGKLYCFREGNTRPRVMRFVRRAFLGTEISPQEYMSRVTERIDFLKQKVCAWANRIRRYKRRVDRYSQNRMFQSDERWVYRAWERPEQSVTDVCRPDDVTTNTFWRSIWSVPVCHAEGGWMRDVERVCEAIPQMEKITITTVDIATAVRPLPNWKSPGPDGLHNFWLKWYSSSHALLASQFQSSLDSGSLPQFLTTGITHLLHKTGSPTEPKNYRPITCLATVYKLLTSILRVKINEHIESNSIMSYSQNGCRKGSRGTKELLLIDMAISQQVRRSRKDLSTCWIDYKKAYDSVPHTWLLKVLELYKVDATLRTFLESCMRQWKTVLRYPGCRSIQGNEEPVWIKRGIFQGDSLSPLWFCLALNPLSTLLEDSGLGYRLRRGGQTISHLLYMDDLKLFAPNNLRLMELLKVTETFSSAIRMEFGVDKCAVMHVKKGEIMESEGIQLSDSIQVRSLSSTETYKYLGMSEALGINGADMKQSLKERFFGRLKKVLNSLLSGGNKVRAFNGWVMPVLMYSFGILKWTQTELDALDRRVRTLLTANRMHHPRSSVMRLYIPRKCGGRGFLNAKTLHNREMCSLREYFLKADVGMHRDVVAVDKGFTPLSMAKENWRKPVIPTTDDRREVWRGKELHGRFYRALYGSDVDFSASVAWLRFGDLFGETEGFVCAIMDEVILTNNYRRHIMKDGTVDVCRACHRPGESIRHIISGCSRLANGEYLHRHNQVARIIHQQLALKYKLVDSEVPYYKYVPDPVLENDHATLYWDRSIITDRTIIANKPDIVVIDRLARRTMIIDVTIPHDENLVKAEKEKQIKYLDLAHEVVDMWNMDSAVIVPIVVTANGLMAKSFDKHLSKLALHGWLKGLIQKAVLLDTARIVRRFLSLEP

SEQ ID NO: 28929 - protein, 1200 aa, Mythimna impura
MLTRTAARRARHPPPGSPLSSASPPPVLGSPMSPAAAVASSSSDEYFSPPTSPTHVRRPGRGRPPKSLGPRGQPAPSRVPAAGGCVQRMRWTQSMNENVMRAYYGSTEGGTNLTAYRVRMLSLFQELEPTVNVTTQRLSDQVRVIQRNHRLDDAALDRLRSEVLSNRIISTPIQTQTAALRATDATLPQSNHVDDEADDRVVTVSSQCNDRLRSALEDALREYRSTPIALRPRLPRLPMHKKYRALVCALDSLLENVFESSVNLADTHSILYCGAIAACRLANVKLPSCDGATRPKPAAPAWQCRIERRIDGARALIGKLYCFREGNTRPRVMRYVRRAFSGTGISPREYLSRVTERIDFLKQKVCAWANRIRRYKRRVDRYSQNRMFQSDERWVYRAWERPEQNVTDVTRPDAVATNTFWRNIWSVPVCHTEDGWMREVERVCEAIPEMEKVVISPTDVATAVRPLPNWKSPGPDGLQNFWLKWYSSSHALLASQFQSSLESGSLPQFLTTGVTHLLHKTGSTTEPKNYRPITCLSTVCKLLTSILRTKINKHIETNSIMSASQNGCRNGSRGTKELLLIDMAISQQVRRSRKDLSTCWIDYKKAYDSVPHTWLMRVLELYKIDATLRTFLESCMGQWNTVLRYPGCRSIRRDDEPIWIKRGIFQGDSLSPLWFCLALNPLSTLLEESGLGYRLRRGGQVLSHLLYMDDLKLIAPNKLRLMELLKVTETFSSAIRMEFGVDKCAVMHVKRGEIMESEGIQLSDSIYLKSLSSTETYKYLGMSEALGINVADMKQSLKERFFDRLKKVLNSLLSGGNKVRAFNGWVMPVLMYSFGILKWTQTELDALDRRVRTLLTANRMHHPRSSVMRLYIPRKCGGRGFLNAKTLHNREVCSLREYFHKTDVGMHRDVVAVDKGLTPLSMAKENWRKPVVLTTDDRREVWKSKELHGCFYRALHESDVDFAASVAWLRFSNLFGETEGFICAIMDEVILTNNYRRYIMKDGTVDVCRACHRPGESIRHIISGCSRLANGEYLHRHNQVARIIHQQLALKYNLVYSEVPYYSYVPDPVLENDHVTLYWDRSIITDRTIVANKPDIVVIDRLARRAMIVDVTIPHDENLVKAEKEKQIKYLDLAHEVVDMWNVDSAIIVPIVVTANGLMAKSLDDHLSKLSLRGWIKGLIQKAVLLDTARIVRRFLSLQP

SEQ ID NO: 28930 - protein, 962 aa, Mythimna impura
MHKKNRALVCALDSLLENVFESSVNLADTHSILYCGAIAACRLANVKLPSCDGATRPKPAAHAWQCRIERRIDGARALIGKLYCFREGNTRPRVMRYVRRAFSGTGISPREYLSRVTERIDFLKQKVCAWANRIRRYKRRVDRYSQNRMFQSDERWVYRAWERPEQNVTDVTRPDAVATNTFWRNIWSVPVCHTEDGWMREVERVCEAIPEMEKVVISPTDVATAVRPLPNWKSPGPDGLQNFWLKCYSSSHALLASQFQSSLESGSLPQFLTTGVTHLLHKTGSTAEPKNYRPITCLSTVYKLLTSILRTKINKHIDTNSIMSASQNGCRNGSRGTKELLLIDMAINQQVRRSRKDLSTCWIDYKKAYDSVPHTWLMRVLELYKIDATLRTFLESCMGQWNTVLRYPGCRSIRRDDEPIWIKRGIFQGDSLSPLWFCLALNPLSTLLEESGLGYRLRRGGQVLSHLLYMDDLKLIAPNKLRLMELLKVTETFSSAIRMEFGVDKCAVMHVKRGEIMELEGIQLSDSIYLKSLSSTETYKYLDMSEALGINVADMKQSLKERFFDRLKKVLNSLLSGGNKVRAFNGWVMPVLMYSFGILKWTQTELDALDRRVRTLLTANRMHHPRSSVMRLYIPRKCGGRGFLNAKTLHNREVCSLREYFHKTDVGMHRDVVAVDKGLTPLSMAKENWRKPVVLTTDDRREVWKSKELHGRFYRALHESDVDFAASVAWLRFSNLFGETEGFICAIMDEVILTNNYRKYIMKDGTVDVCRACHRPGESIRHIISGCSRLANGEYLHRHNQVARIIHQQLALKYNLVYSEVPYYSYVPDPVLENDHVTLYWDRSIITDRTIVANKPDVVVIDRLARRAMTVDVTIPHDENLVKAEKEKQIKYLDLAHEVVDMWNVDSAIIVPIVVTANGLMAKSLDDHLSKLSLRGWIKGLIQKAVLLDTARNVRRFLSLQP

SEQ ID NO: 28931 - protein, 1199 aa, Xestia xanthographa
MITRAAARRARLPTPDSSLSSASPPPDPGSPVSPVAAVASSSSDEYFSPPTSPPPVRRAGRGRPPKGLGLRGQQAPSRVPATGGCVQRMKWTRSMNENVMRAYYGSTEGGTNLTAYRVRMLSLFQDLEPTVNVSAQRLSDQVRVIQRNHRLDDAALDRLRSEVLSNLIILTPTQTAVQVSDINVTLPRSIPAVVEEDDRVATVSSQCNDRLRSALEDALREYRSTPTELRPRLPRLPMHKKNRALVCALDSQLKHIFESSENLVDTHSILFCGAVAACRLANVKFPNCDVATRPKPAVPAWQRRIERRIDGARVLIGKLYCFREGNTRPRVMRFVRRAFSGTEISPQEYMSRATERIDFLKQKVYAWANRIRRYKQRVDRYSQNRMFQSDERWVYRAWERPEQNMTDVCRPDDATTSSFWRSIWSVPVCHTEADWMRDVERVCEPIPEMEPIFITPLDVARAVRPLPNWKSPGPDGLHNFWLKWFSSSHTCLASQFQSSLESGSLPQFLTTGVTHLLHKSGSPAEPKNYRPITCLSTIYKLLTSILRMKINTHIDKNSIMSASQNGCRNGSRGTKELLLIDMAISQQVRRSRKDLSTCWIDYKKAYDSVPHTWLMRVLELYKVDTTLRTFLESCMGQWKTVLRYPGCRQIQGSDEPVWIKRGIFQGDSLSPLWFCLALNPLSTLLENSGLGCRLRKDGQVISHLLYMDDLKLFAPNKLRLMELLKVTETFSSAIRMEFGVDKCAVMYVKRGEIMESEGLQLSDSINLKSLSSSETYKYLGMSEALGINVTDMKQSLRERFFGRLRKVLNSLLSGGNKVRAFNGWVMPVLMYSFGILKWTQTELDALDRRVRTLLTESRMHHPRSSVMRLYIPRKCGRRGFLNAKTLHNREVCSLREYFLKAEVGMHRDVVAVDKGLTPLSMAKENWHRPEVLTTDDRKEVWQGKELHGRFYRALHGPDVDFLASVSWLRFGDLFGETEGFVCAIMDEVMLTNNYRKYIMKDGTVDVCRACHLPGESIRHIISGCSRLANGEYLHRHNQVARIIHQQLALKYKLVEFEVPYYKYVPDPVLENDHVTLYWDRSIITDRTIVANKPDIVMMDRSARRVMIIDVTIPHDENLVKAEKEKQIKYLDLAHEVRGMWNMNSVIIVPIVVTANGLIAKSFDDHLSKLSLGGWIKGLIQRAVLLDTARIVRRFLSLQP

SEQ ID NO: 28932 - protein, 962 aa, Xestia xanthographa
MHKKNRALVCALDSQLKHIFESSENLVDTQSILFCGAVAACRLANVKFPNCDVATRPKPAVPAWQRRIERRIDGARVLIGKLYCFREGNTRPRVMRFVRRAFSGTEISPQEYMSRATERIDFLKQKVYAWANRIRRYKQRVDRYSQNRMFQSDERWVYRAWERPEQNMTDVCRPDDATTSSFWRSIWSVPVCHTEADWMRDVERVCEPIPEMEPIFITPLDVARAVRPLPNWKSPGPDGLHNFWLKWFSSSHTCLASQFQSSLESGSLPQFLTTGVTHLLHKSGSPAEPKNYRPITCLSTIYKLLTSILRMKINTHIDKNSIMSASQNGCRNGSRGTKELLLIDMAISQQVRRSRKDLSTCWIDYKKAYDSVPHTWLMRVLELYKVDTTLRTFLESCMGQWKTVLRYPGWRQIEGSDEPVWIKRGIFQGDSLSPLWFCLALNPLSTLLENSGLGCRLRKDGQVISHLLYMDDLKLFAPNKLRLMELLKVTETFSSAIRMEFGVDKCAVMYVKRGEIMESEGLQLSDSIHLKSISSSKTYKYLGMSEALGINVTDMKQSLRERFFGRLRKVLNSLLSGGNKVRAFNGWVMPVLMYSFGILKWTQTELDALDRRVRTLLTESRMHHPRSSVMRLYIPRKCGGRGFLNAKTLHNREVCSLREYFLKAEVGMHRDVVAVDKGLTPLSMAKENWHRPEVLTTDDRKEVWQVKELHGRFYRALHGPDVDFLASVSWLRFGDLFGETEGFVCAIMDEVMLTNNYRKYIMKDGTVDVCRACHLPGESIRHIISGCSRLANGEYLHRHNQVARIIHQQLALKYKLVESEVPYYKYVPDPVLENDHVTLYWDRSIITDRTIVANKPDIVMMDRSARRVMIIDVTIPHDENLVKAEKEKQIKYLDLAHEVRGMWNMNSVIIVPIVVTANGLIAKSFDDHLSKLSLGGWIKGLIQKTVLLDTARIVRRFLSLQP

SEQ ID NO: 28933 - protein, 962 aa, Cosmia trapezina
MHKKNRALMCALDSLLKDFFESSEDLVDTHSILYCAAVAACRLANVKFPNCDGATRPKPAVPAWQCRIERRIDGARVLIGKLYCFRQGNTRPRVMRFVRRAFSGTGISPPEYMSRVTERIDFLKQKVCAWASRIRRYKRRVDRYTQNRMFQSDERWVYRAWERPEQNVTDVCRPDDAATSAFWRSIWSVPVCHTEAGWMKDVERVCEAIPEMEPVLITPLDVARAVRPLPNWKSPGPDGLHNFWLKWLISSHTRLASQFQSSLESGSLPQFLTTGVTHLLHKSGSPAEPKNYRPITCLSTIYKLLTSILRAKINMHIDSNSIMSTSQNGCRNGSRGTKELLLIDMAISQQVRRSRKDLSTCWIDYKKAYDSVSHAWLMRVLELYKIDATLRTFLESCMGQWRTVLRYPGCRRIRGNDEPVRIKRGIFQGDSLSPLWFCLALNPLSTLLEDSGLGYRLRRGGQVISHLLYMDDLKLFAPNKLRLMELLKVTESFSSAIRMEFGVDKCAVMHVKRGEIMESEGIQLSDSIHLRSLSSSETYKYLGMSEALGINVADMKQSLRERFFGRLKKVLISLLSGGNKVRAFNGWVMPVLMYSFGILKWTQTELDALDRRVRTLLTANRMHHPRSSVMRLYIPRKCGGRGFLNAKTLHNREVCSLREYFLKSDVGMHRDVVAVDKGLTPLSMAKENWRKPVVLTTDDRKKVWQSKELHGRFYRALHEPGVDFLASVSWLRFGDLFGETEGFVCAIMDEVILTNNYRRYIMKDGTVDVCRACHRPGESIRHIISGCSRLANGEYLHRHNQVARIIHQQLALKYKLVDSEVPYYKYVPDPVLENDHVTLYWDRSIITDRTIVANKPDIVVIDRLARRAMIVDVTIPHDGNLVKAEKEKQIKYLDLAHEVVDMWNVDSAVIVPIVVTANGLIADSLDQHLSRLSLGGWIKGQIQKAVLLDTARIVRRFLSLQP

SEQ ID NO: 28934 - protein, 1202 aa, Cosmia trapezina
MLTRSAARARPPPPDSSLSSASPPPVSSPIVGAVITPAAAVASSSSDEYFSPPTSPTPVRRQGRGRPPRSLGLRGQPAPSRVPAAGGCVQRMRWTQSMNENVMRAYYGSTEGGTNLTAYRVRMLSLFQELEPTVNVSAQRISDQVRVIQRNHRLDDAALDRLRSEVLSNHIISNPTQTAVQPSIIDALPPRSNHVVEEEDDRVATVSSQCNDRLRDALEDAFCEYRSTPTELRPRLPRLPMHKKNRALMCALDSLLKDFFESSEDLVDTHSILYCAAVAACRLANVKFPNCDGATRPKPAVPAWQCRIERRIDGARVLIGKLYCFRQGNTRPRVMRFVRRAFSGTGISPPEYMSRVTERIDFLKQKVCAWASRIRRYKRRVDRYTQNRMFQSDERWVYRAWERPEQNVTDVCRPDDAATSAFWRSIWSVPVCHTEAGWMKDVERVCEAIPEMEPVLITPLDVARAVRPLPNWKSPGPDGLHNFWLKWLISSHTRLASQFQSSLESGSLPQFLTTGVTHLLHKSDSPAEPKNYRPITCLSTIYKLLTSILRAKINMHIDSNSIMSTSQNGCRNGSRGTKELLLIDMAISQQVRRSRKDLSTCWIDYKKAYDSVSHAWLMRVLELYKIDATLRTFLESCMGQWRTVLRYPGCRRIRGNDEPVRIKRGIFQGDSLSPLWFCLALNPLSTLLEDSGLGYRLRRGGQVISHLLYMDDLKLFAPNKLRLMELLKVTESFSSAIRMEFGVDKCAVMHVKRGEIMESEGIQLSDSIHLRSLSSSETYKYLGMSEALGINVADMKQSLRERFFGRLKKVLISLLSGGNKVRAFNGWVMPVLMYSFGILKWTQTELDALDRRVRTLLTANRMHHPRSSVMRLYIPRKCGGRGFLNAKTLHNREVCSLREYFLKSDVGMHRDVVAVDKGLTPLSMAKENWRKPVVLTTDDRKKVWQSKELHGRFYRALHEPGVDFLASVSWLRFGDLFGETEGFVCAIMDEVILTNNYRRYIMKDGTVDVCRACHRPGESIRHIISGCSRLANGEYLHRHNQVARIIHQQLALKYKLVDSEVPYYKYVPDPVLENDHVTLYWDRSIITDRTIVANKPDIVVIDRLARRAMIVDVTIPHDGNLVKAEKEKQIKYLDLAHEVVDMWNVDSAVIVPIVVTANGLIADSLDQHLSRLSLGGWIKGQIQKAVLLDTARIVRRFLSLQP

SEQ ID NO: 28935 - protein, 1199 aa, Mamestra brassicae
MITRAAARRAHPPPPGSSLSSASPTPDIGSQVSPVVAVASSSSDEYFSPPTSPTPVRRQGRGRPPRSLGSRGQPALSPVPAAGGCVQRMRWTQSMNENVMRAYYRSTEGGTNLTAYRVRMLSLFQDLEPTVNVSAQRLSDQVRVIQHNCRLDDAALERLRSEVLSNLIISTPTQTVVQAPASGAITPRPNNGSDEVDDRVVTVSSQCNDRLRSALEDALREYRLTPTELRPRLPRLPMHKKNRALVCALDSLLQNIFESSESLVDTHSILFCGAVAACRIANVKFPSCDEAIRPKPAAPAWQCRIERRIDEARALIGKLYCFREGNTRPRVMRFVRWAFSGTGISPREYTFRVTERIDFLKQKVCAWANRIRRYKRRVDRYSQNRMFQSDERWVYRAWERPEQSVTDVYRPDDVATSTFWRSIWSVPICHAEGGWMRDVERVCEAIPQMEKITITTLDIAKAVRPLPNWKSPGPDGLHNFWLKWYSSSHALLASQFQSSLESGSLPQFLTTGITHLLHKTGSPAESKNYRPITCLSTVYKLLTSILRAKINEHIESNSIMSASQNGCRKGFRGTKELLLIDMAISQQVRRSRKDLSTCWIDYKKAYDSVPHTWLMKVLELYKIDATLRTFLESCMRQWKTVLRYPGCQPIQGSDEPVWIKRGIFQGDSLSPLWFCLALNPLSTLLEDSGLGYRLRRGGQAISHLLYMDDLKLFAPNNLRLMELLKVTETFSSAIRMEFGVDKCAVMHVKKGEIMESEGIQLSDSIQVRSLSSTESYKYLGMSEALGINGTDMKQSLRERFVGRLKKVLNSLLSGGNKVRAFNGWVMPVLMYTFGILKWTQTELDALDRRVRTLLTANRMHHPRSSVMRLYIPRKCGGRGFLNVKTLHNREMCSLREYFLKADVGMHRDVVAVDKGLTPLSMAKENWRKPVILTTDDRKEVWKGKELHGRFYRALYGSDVDFSASVAWLRFGDLFGETEGFVCAIMDEVILTNNYRKHIMKDGTVDVCRACHRPGESIRHIISGCSRLANGEYLHRHNQVARIIHQQLALKYKLVDSEVPYYKYVPDPVLENDHVTLYWDRSIITDRTIVANKPDIVVIDRLARRTMIIDVTIPHDENLVKAEKEKQIKYLDLAHEVVDMWNVDSAVIVPIVITANGLMAKSFDDHLSKLALRGWIKGLIQKAVLLDTARIVRRFLSLEP

SEQ ID NO: 28936 - protein, 1199 aa, Mamestra brassicae
MITRAAARRAHPPPPGSSLSSASPTPDIGSQVSPVVAVASSSSDEYFSPPTSPTPVRRQGRGRPPRSLGSRGQPALSRVPAAGGCVQRMRWTQSMNENVMRAYYGSTEGGTNLTAYRVRMLSLFQDLEPTVNVSAQRLSDQVRVIQHNCRLDDAALERLRSEVLSNLIISTPTQTVVQAPASGAITPRPNNGSDEVDDRVVTVSSQCNDRLRSALEDALREYRLTPTELRPRLPRLPMHKKNRALVCALDSLLQNIFESSESLVDTHSILFCGAVAACRIANVKFPSCDEAIRPKPAAPAWQCRIERRIDEARALIGKLYCFREGNTRPRVMRFVRRAFSGTGISPREYTFRVTERIDFLKQKVCAWANRIRRYKRRVDRYSQNRMFQSDERWVYRAWERPEQSVTDVYRPDDVATSTFWRSIWSVPICHAEGGWMRDVERVCEAIPQMEKITITTLDIAKAVRPLPNWKSPGPDGLHNFWLKWYSSSHALLASQFQSSLESGSLPQFLTTGITHLLHKTGSPAEPKNYRPITCLSTVYKLLTSILRAKINEHIESNSIMSASQNGCRKGSRGTKELLLIDMAISQQVRRSRKDLSTCWIDYKKAYDSVPHTWLMKVLELYKIDATLRTFLESCMRQWKTVLRYPGCQPIQGSDEPVWIKRGIFQGDSLSPLWFCLALNPLSTLLEDSGLGYRLRRGGQAISHLLYMDDLKLFAPNNLRLMELLKVTETFSSAIRMEFGVDKCAVMHVKKGEIMESEGIQLSDSIQVRSLSSTESYKYLGMSEALGINGTDMKQSLRKRFFGRLKKVLNSLLSGGNKVRAFNGWVMPVLMYTFGILKWTQTELDALDRRVRTLLTANRMHHPRSSVMRLYIPRKCGGRGFLNAKTLHNREMCSLREYFLKADVGMHRDVVAVDKGLTPLSMAKENWRKPVILTTDDRKEVWKGKELHGRFYRALYGSDVDFSASVAWLRFGDLFGETEGFVCAIMDEVILTNNYRKHIMKDGTVDVCRACHRPGESIRHIISGCSRLANGEYLHRHNQVARIIHQQLALKYKLVDSEVPYYKYVPDPVLENDHVTLYWDRSIITDRTVVANKPDIVVIDRLARRTMIIDVTIPHDENLVKAEKEKQIKYLDLAHEVVDMWNVDSAVIVPIVITANGLMAKSFDDHLSKLALRGWIKGLIQKAVLLDTARIVRRFLSLEP

SEQ ID NO: 28937 - protein, 1199 aa, Mamestra brassicae
MLTRAALQRARPPPPDPSLSSASPPPDIGSPLSPAVAVASSSSDEYFSPPTSPTPVRRQGRGRPPRGLGPRGQPAPSRVPATGGCVQRMRWTQSMNENVMRAYYGSTEGGTNLTAYRVRMLSLFQDLEPTVNVSAQRLSDQVRVIQRNHRLDDAALDRLRSEILNNLIISTPTQTAVQAPVNGRITPQPNNVSDEVDDRVVTVSSQCNDRLRSALEDALREYRSTPTELRPRLPRLPMHKKNRALVCALDSLLQNIFESSESLVDTHSILYCGAVAACRIANVKFPGCDEAIRPKPAAPAWQRRIERRIDETRALIGKLYCFREGNTRPRVMRFVRRAFSGTEISPRDFTSRVTERIDFLKQKVCAWASRIRRYKRRVDRYSQNRMFQSDERWVYRAWERPEQSVTDVCRPDDVATSIFWRSIWSVPICHAEGGWMRDVERVCEAIPQMEKITITTLDVAKAVRPLPNWKSPGPDGLHNFWLKWYSSSHALLASQFQSSLDSGSLPQFLTTGVTHLLHKTGSPTEPKNYRPITCLSTVYKLLTSILRAKINEHIESNSIMSASQNGCRKGSRGTKELLLIDMAISQQVRRSRKDLSTCWIDYKKAYDSVPHTWLMKVLELYKIDATLRTFLESCMRQWKTVLRYPGCRPIQGSDEPVWIKRGIFQGDSLSPLWFCLALNPLSTLLEDSGLGYRLRRGGQAISHLLYMDDLKLFAPNNLRLMELLKVTETFSSAIRMEFGVDKCAVMHVKKGEIMESEGIHLSDSIQVRSLSSTETYKYLGMLEALGINGTDMKQSLKERFFGRLKKVLNSLLSGGNKVRAFNGWVMPVLMYTFGILKWTQTELDALDRRVRTLLTANRMHHPRSSVMRLYIPRKCGGRGFLNAKTLHNREVCSLREYFLKADVGMHRDVVAVDKGLTPLSMAKENWRTPVILTTDDRKEVWKGKELHGRFYRALHGSDVDFSASVAWLRFGDLFGETEGFVCAIMDEVILTNNYRRHIMKVGTVDMCRACHRPGESIRHIISGCSRLANGEYLHRHNQVARIIHQQLALKYNLVDSEVPYYKYVPDPVLENDHVTLYWDRSIITDRTIVANKPDIVVIDRLARRTMIIDVTIPHDENLVKAEKEKQIKYLDLAHEVVDMWNVESAVIVPIVVTANGLMAKSFDDHLSKLALRSWVKGLIQKAVLLDTARIVRRFLSLEP

SEQ ID NO: 28938 - protein, 1199 aa, Mamestra brassicae
MLTRAALQRARPPPPDPSLSSASPPPDIGSPLSPAVAVASSSSDEYFSPPTSPTPVRRQGRGRPPRGLGPRGQPVPSRVPATGGCVQRMRWTQSMNENVMRAYYGSTEGGTNLTAYRVRMLTLFQDLEPTVNVSAQRLSDQVRVIQRNHRLDDAALDRLRSEVLNNLIISTPTQTAVQAPVNGSITPRPNNVSDEVDDRVVTVSSQCNDRLRSALEDALREYRSTPTELRPRLPRLPMHKKNRALVCALDSLLQNIFESSESLVDTHSILYCGAVAACRIANVKFPGCDEAIRPKPAAPAWQRRIERRIDETRALIGKLYCFREGNTRPRVMRFVRRAFSGTEISPRDFTSRVTERIDFLKQKVCAWASRIQRYKRRVDRYSQNRMFQSDERWVYRAWERPEQSVTDVCRPDDVATSIFWRSIWSVPICHAEGGWMRDVERVCEAIPQMEKITITTLDVAKAVRPLPNWKSPGPDGLHNFWLKWYSSSHALLASQFQSSLDSGSLPQFLTTGVTHLLHKTGSPTEPKNYRPITCLSTVYKLLTSILRAKINEHIESNSIMSASQNGCRKGSRGTKELLLIDMTISQQVRRSRKDLSTCWIDYKKAYDSVPHTSLMKVLELYKIDATLRTFLESCMRQWKTVLRYPGCRPIQGSDEPVWIKRGIFQGDSLSPLWFCLALNPLSTLLEDSGLGYRLRRGGQAISHLLYMDDLKLFAPNNLRLMELLKVTETFSSTIRMEFGVDKCAVMHVKKGEIMESEGIHLSDSIQVRSLSSTETYKYLGMLEALGINGTDMKQSLRERFFGRLKKVLNSLLSGGNKVRAFNGWVMPVLMYTFGILKWTQTELDALDRRVRTLLTANRMHHPRSSVMRLYIPRKCGGRGFLNAKTLHNREMCSLREYFLKADVGMHRDVVAVDKGLTPLSMAKENWRTPVILTTDDRKEVWKGKELHGRFYRALHESDVDFSASVAWLRFGDLFGETEGFVCAIMDEVILTNNYRRHIMKDGTVDMCRACHRPGESIRHIISGCSRLANGEYLHRHNQVARIIHQQLALKYNLVDSEVPYYKYVPDPVLENDHVTLYWDRSIITDRTIVANKPDIVVIDRLARRTMIIDVTIPHDENLVKAEKEKQIKYLDLAHEVVDMWNVDSAVIVPIVVTANGLMAKSFDDHLSKLALRSWVKGLIQKAVLLDTARIVRRFLSLEP

SEQ ID NO: 28939 - protein, 1050 aa, Noctua fimbriata
MLDDAVLDRLRSEVLSNRVILTPAQTAVQASVIDATPPRFNQAVVEEDDRVAVVSSQCNDRLRSALEDALREYRSTPTELRPRLPRLPMHNKNRALVCALDSQLKNIFESSENLVDTHSILYCGAVAACRLANVKFPNCDVATRPKPAVPAWQCRIERRIDGARVLIGKLHCFREGNTRPRVMRFVRRAFSGTGISPQEYMSRVTERIDFLKQKVYAWANRIRRYKRRVDRYSQNRMFQSDERWVYRAWERPELNMTDVCRPDDAATSSFWRSIWSVPVCHTEADWMRDVERVCEPIPEMEPILITPLDIARAVRPLPNWKSPGPDGLHNFWLKWLSSSHTCLASQFQSSLESGSLPQFLTTGVTHLLHKSGSPAEPKNYRPITCLSTIYKLLTSILRAKINTHIDKNSIMSASQNGCRNGSRGTKELLLIDMAISQQVRRSRKDLSTCWIDYKKAYDSVPHTWLMRVLELYKIDATLRAFLESCMGQWRTVLRYPGCRQIQANDEPVWIKRGIFQGDSLSPLWFCLALNPLSTLLEDSGLGYRLRRGGQVISHLLYMDDLKLFAPNKLQLMELLKVTENFSSAIRMEFGVDKCAVMYVKQGEIMESEGIQLSDSIHLRTLSSTESYKYLGMSEALGINVTDMKQSLKERFFGRLNKVLHSLLSGGNKVRAFNGWVMPVLMYSFGVLKWTQTELDALDRRVRTLLTANRMHHPRSSVMRLYIPRKCGGRGFLNAKSLHNREMCSLREYFLKVEVGMHRDVVAVDKGLTPLSMAKENWRKPEVLTTDDRKEVWQGKELHGRFYRALHEPDVDFLASVSWLRFGDLFGETEGFVCAIMDEVMLTKNYRKYIMKDGTVDVCRACHRPGESIRHIISGCSRLANGEYLHRHNQVARIIHQQLALKYKLVESEVPYYKYVPDPVLEKDHVTLYWDQSIITDRTIVANKPDIVVIDRSARRVMIVDVTIPHDENLVKAEKEKQIKYLDLAHEVVDMWNVNSAIIVPIVVTANGLIAKSLDDHLSKLSLGGWIKGLIQKAVLLDTARIVRRFLSLEP

SEQ ID NO: 28940 - protein, 1206 aa, Noctua fimbriata
MITRSRAKQLQEAHTPSPGSSLSSASQPPRRATSVSTVSPVAAVASSSSDEFFSPPSTPPPSPRRRGRGRPPAGLGPRGQPAPNRVPAAGGNVSRMRWTQSINEQVMRAYYGATEGGTNLTAYRVGMLSLFQVLEPTINVSAQRLSDQVRVIQRNHMLDDAVLDRLRSEVLSNRIVFTPAQTAVQASVIDATPPRFNPAVVEEDDRVAVVSSQCNDRLRSALEDALREYRSTPTELRPRLPRLPMHNKNRALVCALDSQLKNLFESSENLVDTHSILYCGAVAACRLANVKFPNCDVATRPKPAVPAWQRRIECRIDGARVLIGKLHCFREGNTRPRVMRFVRRAFSGTGISPQEYMSRVTERIDFLKQKVYAWANRIRRYKRRVDRYSQNRMFQSDERWVYRAWERPDQNMTDMCRPDDAATSSFWRSIWSVPVCHTEADWMRDVEQVCEPIPEMEPILITPLDVARAVRSLPNWKSPGPDGLHNFWLKWLSSSHTCLASQFQSSLESGSLPQFLTTGVTHLLHKSGSPVEPKNYRPITCLSTVYKLLTSILRAKINTHIDKNSIMSASQNGCRNGSRATKELLLIDMAISQQVRRSRKDLSTCWIDYKKAYDSVPHTWLMRVLELYKIDATLRAFLESCMGQWRTVLRYPGCRQIQGNDEPVWIKRGIFQGDSLSPLWFCLALNPLSTLLEDSGLGYRLRRGGQVISHLLYMDDLKLFAPNKLQLMELLKVTETFSSAIRMEFGVDKCAVMYVKQGEIMESEGIQLSDSIHLRTLSSTESYKYLGMSEALGINVTDMKQSLKERFFGRLNKVLHSLLSGGNKVRAFNGWVMPVLMYSFGVLKWTQTELDALDRRVRTLLTANRMHHPRSSVMRLYIPRKCGGRGFLNAKSLHNREMCSLREYFLKVEVGMHRDVVAVDKGLTPLSMAKENWRKPEVLTTDDRKEVWQGKELHGRFYRALHGPDVDFLASVSWLRFGDLFGETEGFVCAIMDEVMLTNNYRKYIMKDGTVDVCRACHRPGESIRHIISGCSRLANGEYLHRHNQVARIIHQQLALKYKLVESEVPYYKYVPDPVLEKDHVTLYWDQSIITDRTIVANKPDIVVIDRSARRVMIVDVTIPHDENLVKAEKEKQIKYLDLAHEVVDMWNVNSAIIVPIVVTANGLIAKSLDDHLSKLSLGGWIKGLIQKAVLLDTARIVRRFLSLEP

SEQ ID NO: 28941 - protein, 1080 aa, Noctua fimbriata
MLSLFQVLEPTVNVSAQRLSDQVRVIQRNHMLDDAVLDRLRSEVLSNRIVLTPAQTAVQASVIDATPPRFNPAVVEEDDRVTVVSSQCNDRLRSALEDALREYRSTPTELRPRLPRLPMHNKNRALVCALDSQLENIFESSENLVDTHSILYCGAVAACRLANVKFPNCDVATRPKPAVPAWQRRIERRIDGARVLIGKLHCFREGNTRPRVMRFVRRAFSGTGISPQEYMSRVTERIDFLKQKVYAWANRIRRYKRRVDRYSQNRMFQSDERWVYRAWERPELNMTDVCRPDDAATSSFWRSIWSVPVCHTEADWMRNVERVCEPIPEMEPILITPLDIARAVCPLPNWKSPGPDGLHNFWLKWLSSSHTCLASQFQSSLESGSLPQFLTTGVTHLLHKSGSPAEPKNYRPITCLSTVYKLLTSILRAKINTHIDKNSIMSASQNGCRNGSRGTKELLLIDMAISQQVRRSRKDLSTCWIDYKKAYDSVPHTWLMRVLELYKIDATLRAFLESCMGQWRTVLRYPGCRQIQGNDEPVWIKRGIFQGDSLSPLWFCLALNPLSILLEDSGLGYRLRRGGQVISHLLYMDDLKLFAPNKLRLMELLKVTENFSSAIRMEFGVDKCAVMYVKQGEFMESEGIQLSDSIHLRTLSSTESYKYLGMSEALGINVTDMKQSLKERFFGRLNKVLHSLLSGGNKVRAFNGWVMPVLMYSFGVLKWTQTELDALDRRVRTLLTANRMHHPRSSVMRLYIPRKCGGRGFLNAKSLHNREMCSLREYFLKVEVGMHRVVVAVDKGLTPLSMAKENWRKPEVLTTDDRKEVWQGKELHGRFYRALHGPDVDFLASVSWLRFGDLFGETEGFVCAIMDEVMLTNNYRKYIMKDGTVDVCWACHRPGESIRHIISGCSRLANGEYLHRHNQVARIIHQQLALKYKLVESEVPYYKYVPDPVLEKDHVTLYWDQSIITDRTIVANKPDIVVIDRSARRVMIVDVTIPHDENLVKAEKEKQIKYLDLAHEVVDMWHVNSAVIVPIVVTANGLIAKSLDDHLSKLSLGGWIKGLIQKAVLLDTARIVRRFLSLEP

SEQ ID NO: 28942 - protein, 1202 aa, Noctua fimbriata
MITRAAYRRARLPPPDPSLSSASPPPESSPIVSAVTPAVAVASSSSDEYFSPPTSPTTVRRQGRGRPPRSLGLRGHPAPSRVPAAGGCVQRMRWTHSINENVMRAYYGSTEGGTNLTAYRVGMLSLFQVLEPTVNVSAQRLSDQVRVIQRNHMLDDAVLDRLRSEVLSNRIVLTPAQTAVQASVIDATPPRFNPAVVEEDDRVAVVSSQCNDRLRSALEDALREYRSTPTALRPRLPRLPMHNKNRALVCALDSQLKNIFESSENLVDTHSILYCGAVAACRLANVKFPNCDVATRPKPAVPAWQRRIERRIDGARVLIGKLHCFREGNTRPRVMRFVRRAFSGTGISPQEYMSRVTERIDFLKQKVYAWANRIRRYKRRVDRYSQNRMFQSDERWVYRTWERPELNMADVCRPDDATTSSFWRSIWSVPVCHTEADWMHDVERVCEPIPEMEPVLITPLDIARAVRPLPNWKSPGPDGLHNFWLKWLSSSHTCLASQFQSSLESGSFPQFLTTGVTHLLHKSGSPAEPKNYRPITCLSTVYKLLTSILRAKINTHIDKNSIMSASQNGCRNGSRGTKELLLIDMAISQQVRRSRKDLSTCWIDYKKAYDSVPHTWLMRVLELYKIDATLRAFLESCMGQWRTVLRYPGCRQIQGNDEPVWIKRGIFQGDSLSPLWFCLALNPLSTLLEDSGLGYRLRRGGQVISHLLYMDDLKLFAPNKLRLMELLKVTETFSSAIRMEFGVDKCAVMYVKQGEIMESEGIQLSDSIHLRTLSSTESYKYLGMSEALGINVTDMKQSLKERFFGRLNKVLHSLLSGGNKVRAFNGWVMPVLMYSFGVLKWTQTELDALDRRVRTLLTANRMHHPRSSVMRLYIPRKCGGRGFLNAKSLHNREICSLREYFLKVEVGMHRDVVAVDKGLTPLSMAKENWRKPEVLTTDDRKEVWQGKELHGRFYRALHGPDVDFLASVSWLRFGDLFGETEGFVCAIMDEVMLTNNYRKYIMKDGTVDVCRACHRPGESIRHIISGCSRLANGEYLHRHNQVARIIYQQLALKYKLVESEVPYYKYVPDPVLEKDHVTLYWDQSIITDRTIVANKPDIVVIDRSARRVMIVDVTIPHDENLVKAEKEKQIKYLDLAHEVVDMWNVNSAIIVPIVVTANGLIAKSLDDHLSRLSLGGWIKGLIQKAVLLDTARIVRRFLSLEP

SEQ ID NO: 28943 - protein, 1100 aa, Noctua fimbriata
MRAYYGATEGGTNLTAYRVGMLSLFQVLEPTVNVSAQRLSDQVRVIQRNHMLDDAVLDRLRSEVLSNRIVLTPAQTAVQASVIDATPPRFNPAVVEEDDRVAVVSSQCNDRLRSALEDALREYRSTPTELRPRLPRLPMHNKNRALVCALDSQLENIFESSENLVDTHSILYCGAVAACRLANVKFPNCDVATRPKPAVPAWQRRIERRIDGARVLIGKLHCFREGNTRPRVMRFVRRAFSGTGISPQEYMSRVTERIDFLKQKVYAWANRIRRYKRRVDRYSQNRMFQSDERWVYRAWERPELNMTDVCRPDDAATSSFWRSIWSVPVCHTEADWMRDVERVCEPIPEMEPILITPLDIARAVRPLPNWKSPGPDGLHNFWLKWLSSSHTCLASQFQSSLESGSLPQFLTTGVTHLLHKSGSPAEPKNYRPITCLSTVYKLLTSILRAKINTHIDKNSIMSASQNGCRNGSRGTKELLLIDMAISQQVRRSRKDLSTCWIDYKKAYDSVPHTWLMRVLELYKIDATLRAFLESCMGQWRTVLRYPGCRQIQGNDEPVWIKRGIFQGDSLSPLWFCLALNPLSTLLEDSGLGYRLRRGGQVISHLLYMDDLKLFAPNKLRLMELLKVTETFSSAIRMEFGVDKCAVMYVKQGEIMESEGIQLSDSIHLRTLSSTESYKYLGMSEALGINVTDMKQSLKERFFGRLNKVLHSLLSGGNKVRAFNGWVLPVLMYSFGVLKWTQTELDALDRRVRTLLTANRMHHPRSSVMRLYIPRKCGGRGFLNAKSLHNREMCSLREYFLKVEVGMHRDVVAVDKGLTPLSMAKENWRKPEVLTTDDRKEVWQGKELHGRFYRALHGPDVDFLASVSWLRFGDLFGETEGFVCAIMDEVMLTNNYRKYIMKDGTVDVCRACHRPGESIRHIISGCSRLANGEYLHRHNQVARIIHQQLALKYKLVESEVPYYKYVPDPILEKDHVTLYWDQSIITDRTIVANKPDIVVIDRSARRVMIVDVTIPHDENLVKAEKEKQIKYLDLAHEVVDMWNVNSAIIVPIVVTANGLIAKSLDDHLSRLSLGGWIKGLIQKAVLLDTARIVRRFLSLEP

SEQ ID NO: 28944 - protein, 1198 aa, Noctua fimbriata
MITRAAYRRARLTTPDSPLSSASPPPDPGSPVLPAAAVASSSSDEYFSPPTSPTPVRRQGRGRPPRSLGLRGHPAPSRVPAAGGCVQRMRWTHSINENVMRAYYGSTEGGTNLTAYRVRMLSLFQVLEPTVNVSAQRLSDQVRVIQRNHMLDDAVLDRLRSEVLSNRVILTPAQTAVQASVIDATPPRFNPAVVEEDDRVAVVSNQCNDRLRSALEDALREYRSTPTELRPRLPRLPMHNKNRALVCALDSQLKNIFESSENLVDTHSILYCGAVAACRLANVKFPNCDVATRPKPAVPAWQYRIERRIDGARVLIGKLHCFREGNTRPRVMRFVRRAFSGTGISPQEYMSRVTERIDFLKQKVYAWANRIRRYKRRVDRYSQNRMFQSDERWVYRAWERPELNMTDVCRPDDAATSSFWRSIWSVPVCHTEADWMRDVERVCEPIPEMEPILITPLDIARAVRPLPNWKSPGPDGLHNFWLKWLSSSHTCLASQFQSSLESGSLPQFLTTGVTHLLHKSGSPAEPKNYRPITCLSTVYKLLTSILRAKINTHINKNSIIASQNGCRNGSRGTKELLLIDMAISQQVRRSRKDLSTCWIDYKKAYDSVPHTWLMRVLELYKIDATLRAFLESCMGQWRTVLRYPGCRQIQGNDEPVWIKRGIFQGNSLSPLWFCLALNPLGTLLEDSGLGYRLRRGGQVISHLLYMDDLKLFAPNKLQLMELLKVTENFSSAIRMEFGVDKCAVMYVKQGEIMESEGIQLSDSIHLRTLSSTESYKYLGMSEALGINVTDMKQSLKERFFGRLNKVLHSLLSGGNKVRAFNGWVMPVLMYSFGVLKWTQTELDALDRRVRTLLTTNRMHHPRSSVMRLYIPRKCGGRGFLNAKSLHNREMCSLREYFLKVEVGMHRDVVAVDKGLTPLSMAKENWRKPEVLTTDDRKEVWQGKELHGRFYRALHGPDVDFLASVSWLRFGDLFGETEGFVCAIMDEVMLTNNYRKYIMKDGTVDVCRACHRPGESIRHIISGCSRLANGEYLHRHNQVARIIHQQLALKYKLVESEVPYYKYVPDPVLEKDHVTLYWDQSIITDRTIVANKPDIVVIDRSARRVMIVDVTIPHDENLVKAEKEKQIKYLDLAHEVVDMWNVNSAIIVPIVVTANGLIAKSLDDHLSKLSLGGWIKGLIQKAVLLDTARIVRRFLSLEP

SEQ ID NO: 28945 - protein, 1202 aa, Noctua fimbriata
MITRAAYRRARLPPPDPSLSSASPPPESSPIVSAVTPAVAVASSSSDEYFSPPTSPTPVRRQGRGRPPRSLGLRGHPAPSRVPAAGGCVQRMRWTHSINENVMRAYYGSTEGGTNLTAYRVGMLSLFQVLEPTVNVSTQRLSDQVRVIQRNHMLDDAVLDRLRSEVLSNRIVLTPAQTAVQASVIDATPPRFNPAVVEEDDRVAVVSSQCNDRLRSALEDALREYRSTPTELRPRLPRLPMHNKNRALVCALDSQLENIFESSENLVDTHSILYCGAVAACRLANVKFSNCDVATRPKPAVPAWQRRIERRIDGARVLIGKLHCFREGNTRPRVMRFVRRAFSGTGISPQEYMSRVTERIDFLKQKVYAWANRIRRYKRRVDRYSQNRMFQSDERWVYRAWERPELNMTDVCRPDDAATSSFWRSIWSVPVCHTEADWMRDVERVCEPIPEMEPILITPLDIARAVRPLPNWKSPGPDGLHNFWLKWLSSSHTCLASQFQSSLESGSLPQFLTTGVTHLLHKSGSPAEPKNYRPITCLSTVYKLLTSILRAKINTHIDKNSIMSASQNGCRNGSRGTKELLLIDMAISQQVRRSRKDLSTCWIDYKKAYDSVPHTWLMRVLELYKIDATLRAFLESCMGQWRTVLRYPGCRQIQGNDEPVWIKRGIFQGDSLSPLWFCLALNPLSTLLEDSGLGYRLRRGGQVISHLLYMDDLKLFAPNKLQLMELLKVTETFSSAIRMEFGVDKCAVMYVKRGEIMESEGIQLSDFIHLRSLSSSESYKYLGMSEALGINVTDMKQSLKERFFGRLNKVLHSLLSGGNKVRAFNGWVMPVLMYSFGVLKWTQTELDALDRRVRTLLTANRMHHPRSSVMRLYIPRKCGGRGFLNAKSLHNREMCSLREYFLKVEVGMHRDVVAVDKGLTPLSMAKENWRKPEVLTTDDRKEVWQGKELHGRFYRALHGPDVDFLASVSWLRFGDLFGETEGFVCAIMDEVMLTNNYRKYIMKDGTVDVCRACHRPGESIRHIISGCSRLANGEYLHRHNQVARIIHQQLALKYKLVESEVPYYKYVPDPVLEKNHVTLYWDQSIITDRTIVANKPDIVVIDRSARRVMIVDVTIPHDENLVKAEKEKQIKYLDLAHEVVDMWHVNSAIIVPIVVTANGLIAKSLDDHLSKLSLGGWIKGLIQKAVLLDTARIVRRFLSLEP

SEQ ID NO: 28946 - protein, 962 aa, Atethmia centrago
MHKKNRALVCALDSLLKDFFESSEDLVDTHSILYCAAVAACRLANVKFPNCDEATRPKPAVPAWQCRIERRIDGARVLISKLYCFREGNTRPRVMRFVRRAFSGTGISPREYMSRVTERIDFLKQKVCAWASRIRRYKRRVDRYTQNRMFQSDERWVYRAWERPEQNETDMCRPDDATTTAFWRSIWSEPVCHAEADWMRDVERVCETIPEMEVVVITPSDIARAVRPLPNWKSPGPDGLHNFWLKWLTSSHTCLASQFQSSLESGSLPQFLTTGITHLLHKSGSPAEPKNYRPITCLSTVYKLLTSILRAKINTHIDSNSIMSASQNGCRNGSRGTKELLLIDMAISQQVRRSRKDLSTCWIDYKKAYDSVPHTWLMKVLELYKIDTTLRTFLESCMGQWRTVLRYPGCRRIQGNDEPVWIKRGIFQGDSLSPLWFCLALNPLSTLLEDSGLGYRLRRGGQVISHLLYMGDLKIFAPNKLRLMELLKVTETFSGAIRMEFGVDKCAVMHVKRGEIMESEGIQLSDSIHLRSLSSPESYKYLGMSEALGINVTDMKQLLKERFFGRLKKVLISLLSGGNKVRAFNGWVMPVLMYSFGILKWTQTELDALDRRVRTLLTANRTHHPRSSVMRLYIPRKCGGRGFLNAKTLHNREICSLREYFLKAEVGMHRDVVAVDKGLTPLSMAKENWCKPVVLTTDDRKEIWQNKELHGRFYRALHEPDVDFLASVSWLRFGDIFGETEGFVCAIMDEVILTNNYRRHIMKDGTVDVCRACHRPGESIRHIISGCSRLANGEYLHRHNQVARIIHQQLALKYKLVNSEVPYYKYVPDPVLENDHVTLYWDRSIITDRTIVANKPDIVVIDRLARRAMIVDVTIPHDDSLVKAEKEKQIKYLDLAHEVVDMWNVNSAVIVPIVVTANGLMAESLNHHLSRLSLGGWIKGLIQKAVLLDTARIVRRFLSLEP

SEQ ID NO: 28947 - protein, 1111 aa, Atethmia centrago
MRWTQSMNENVMRAYYGSTEGGTNLTAYRVRMLSLFQKLEPTVNVSAQRLSDQVRVIQRNHRLDDAALDRLRSEVLSNHIVSTPAQTATHAPIINAIPPRSNHDVEEEDDRVATVSSQCNVRLRSALEDAFREYRSTPTELRPRLPRLPMHKKNTALVCALDSLLKDFFESSEDLVDTHSILYCAAVAACRLANVKFPNCDGATRPKPAVPAWQCRIERRIDGARVLIGKIYCFREGNTRPRVMRFVRRAFSGTGISPREYMSRVTERIDFLKQKVCAWASRIRRYKRRVDRCTQNRMFQSDERWVYRSWERPEQNETDVCRPDDATTTAFWRSIWSVPVCYAEADWMRDVERVCETIPEMEVVIITPSDIARAVRPLPNWKSPGPDGLHNFWLKWLTSSHTCLASQFQSSLESGSLPQFLTTGITHLLHKSGSPAEPKNYRPITCLSTVYKLLTSILRAKINTHIDSNSIMSASQNGCRNGSRGTKELLLIDMAISQQVRRFRKDLSTCWIDYKKAYDSVPHTWLMRVLELYKIDTTLRTFLESCMGQWRTVLRYPGCRQIQGNDEPVWIKRGIFQGDSLSPLWFCLALNPLSTLLEDSDLGYRLRRGGQVISHLLYMDDLKIFAPNKLQLMELLKVTETFSSAIRMEFGVDKCAVMHVKRGEIMEPEGIQLSDSIHLRSLSSPESYKYLGMSEALGINVTDMKQSLKERFFGRLKKVLISPLSGGNKVRAFNGWVMPVLMYSFGILKWTQTELDALDRRVRTLLTANRMHHPRSSVMRLYIPRKCGGRGFLNAKTLHNREICSLREYFLKTEVGMHRDVVAVDKGLTPLSMAKENWCKPVILTTDDRKEIWQNKELHGRFYRALHEPDVDFLASVSWLRFGDLFGETEGFVCAIMDEVILTNNYRRHIMKDGTVDVCRACHRPGESIRHIISGCSRLANGEYLHRHNQVARIIHQQLALKYKLVNSEVPYYKYAPDPVLENDHVTLYWDRSIITDRTIVANKPDIVVIDRLARRAMIVDVTIPHDENLVKAEKEKQIKYLDLAHEVVDMWNVDSAVIVPIVVTANGLMAESLNHHLSRLSLGGWIKGLIQKAVLLDTARIVRRFLSLES

SEQ ID NO: 28948 - protein, 1202 aa, Atethmia centrago
MLTRSAARARPPPPDSSLSSASPPPVPSPTVSAVTTPAAVVASSSSDEYFSPPTSPTPVRRQGRGRPPKSLGLRGQPAPSRVPAAGGCVQRMRWTQSMNENVMRAYYGSTEGGTNLTAYRVRMLSLFQKLEPTVNVSAQRLSDQVRVIQRNHRLDDAALDRLRSEVLSNHIVSTPAQTATHAPIINAIPPRSNHDVEEEDDRVATVSSQCNVRLRSALEDAFREYRSTPTELRPRLPRLPMHKKNTALVCALDSLLKDFFESSEDLVDTHSILYCAAVAACRLANVKFPNCDGATRPKPAVPAWQCRIERRIDGARVLIGKLYCFREGNTRPRVMRFVRRAFSGTGISPREYMSRVTERIDFLKQKVCAWASRIRRYKRRVDRCTQNRMFQSDERWVYRSWERPEQNETDVCRPDDATTTAFWRSIWSVPVCYAEADWMRDVERVCETIPEMEVVIITPSDIARAVRPLPNWKSPGPDGLHNFWLKWLTSSHTCLASQFQSSLESGSLPQFLTTGITHLLHKSGSPAEPKNYRPITCLSTVYKLLTSILRAKINTHIDSNSIMSASQNGCRNGSRGTKELLLIDMAISQQVRRFRKDLSTCWIDYKKAYDSVPHTWLMRVLELYKIDTTLRTFLESCMGQWRTVLRYPGCRQIQGNDEPVWIKRGIFQGDSLSPLCFCLALNPLSTLLEDSDLGYRLRRGGQVISHLLYMDDLKIFAPNKLQLMELLKVTETFSSAIRMEFGVDKCAVMHVKRGEIMEPEGIQLSDSIHLRSLSSPESYKYLGMSEALGINVTDMKQSLKERFFGRLKKVLISPLSGGNKVHAFNGWVMPVLMYSFGILKWTQTELDALDRRVRTLLTANRMHHPRSSVMRLYIPRKCGGRGFLNAKTLHNREICSLREYFLKTEVGMHRDVVAVDKGLTPLSMAKENWCKPVILTTDDRKEIWQNKELHGRFYRALHEPDVDFLASVSWLRFGDLFGETEGFVCAIMDEVILTNNYRRHIMKDGTVDVCRACHRPGESIRHIISGCSRLANGEYLHRHNQVARIIHQQLALKYKLVNSEVPFYKYAPDPVLENDHVTLYWDRSIITDRTIVANKPDIVVIDRLARRAMIVDVTIPHDENLVKAEKEKQIKYLDLAHEVVDMWNVDSAVIVPIVVTANGLMAESLNHHLSRLSLGGWIKGLIQKAVLLDTARIVRRFLSLES

SEQ ID NO: 28949 - protein, 1201 aa, Mesoligia furuncula
MLTRSAARRAHLPPPDSSLSPAPPPPEPSPIESAVTPAVAVASSSSDEYFSPPTSPTPVRRQGRGRPPNSLGLRGHPAPSRVPATGGCVQRMRWTQSMNENVMRAYYGSTEGGINLTAYRDRMLSLFQELEPTINVSAQRLSDQVRVIQRNHRLDDIALDRLRSEVLSNHIVSTSAQTAAQVSTVDAIPPRFNRVEEEDDRVDTVSSQCNVRLRSALEDALREYRSTPTELRPRLPRLPMHKKNRALVCALDSQLKNFFESSEDLVDTHSILYCAAVAACRLANVKFSSCDGATRPKPAVPAWQRRIERRIDGARVLIGKLYCFREGNTRPRVMRFVRRAFSGTGISPREYMSRVTERIDFLKQKVCAWASRIRRYKRRVDRYTQNRMFQSDERWVYRAWERPEQNVTDVCRPDDAATSAFWCSIWSVPVCHTEAGWMRDVERVCESVPEMEKVLITPSDVARAVRPLSNWKSPGPDGLHNFWLKWLISSHTCLASQFQSSLESGSLPQFLTTGVTHLLHKSGSPAEPKNYRPITCLSTVYKLLTSILRAKINKHIESNSIMSASQNGCRNGSRGTKELLLIDMAISQQVRRSRKDLSTCWIDYKKAYDSVPHTWLMRVLELYKIDANLRTFLESCMGQWKTVLRYPGCRQIQGNDEPVWIKRGIFQGDSLSPLWFCLALNPLSTLLEDSGLGYRLRRGGQVISHLLYMDDLKLFAPNKLRLMELLKVTKTFSSAIKMEFGVDKCAVMHVKRGEIMESEGIQLSDSISLRSRSSSESYKYLGMSEALGINDADMKQSLKERFFCRLKKVLISLLSGGNKVRAFNGWVMPVLMYSFGILKWTQTELDALDRRVRTLLTANRMHHPRSSVMRLYIPRKCGGRGFLNAKTLHNREVCSLREYFLKTEVGVHRDVVAVDKGLTPLSMAKENWRKPVVLSTDDRKRVWQSKELHGRFYRALHEPGVDFIASVSWLRFGDLFGETEGFVCAIMDEVILTNNYRRHIMKDGTVDVCRACHRPGESIRHIISGCSRLANGEYLHRHNQVARIIHQQLALKYKLVDSEVPYYKYVPDPVLENDHVTLYWDRSIITDRTIVANKPDIVVIDRLARRTMIVDVTIPHDGNLVKAEKEKQIKYLDLAHEVVDMWNVSSAIIVPIVVSANGLMAESLDQHLSRLSLGGWIKGLIQKAVLLDTARIVRRFLSLEP

SEQ ID NO: 28950 - protein, 1209 aa, Xestia c-nigrum
MLTRHRAKLLRDAHPPSPGSSLSSASQPPGRATPVSTVSPVAAVASSSSDEFFSPPSTPPPPPSRGRRRGRGRPPAGLGPRGQQASSRVPAAGGNVSRMRWTQSMNENVMRAYYGATEGGSNLIAYRGQMLSLFQVLEPAVNVDAQRLSDQVRVIQRNHMLDDTVLDRLRSESRSDLVTPASPMIAVQLQTIPCTPLRSDYDSEEDGDEVISVSTQCNAQLRSALEGAFREYRSTPPELRPRLPRLPMHKKNKALVCALDSQLSNCFDSSKDLADTHSILYCGAVAACRVAHVKFPNNDRTTRPKLAVPAWQCRIERRIGEARVLIGKLICFREGNTRPRVMRFVRRAFSGTDVSFRDYLARITERIDFLKQKICAWASRIRRYKRRVERYTQNSSFQSDERWVYRAWERPDQGVTDTRLPDDDAMCSFWRSIWSVPVSHTEGDWIRKVEQVCDQIQEMGAIIISPQDVACAVRRLLNWKSPGPDGLHNFWIKWFQRSHARLASQFQSALESGSLPQFMTTGITHLLHKSGSTAEPKNYRPITCLPTVYKVLTSILRAKINKHIESNSIMSTSQNGCRNGSRGTKELLLIDMAISQQVRRSRKNLSTCWIDYKKAYDSVPHTWLMRVLELYKINATLRAFLESCMGQWKTVLRYPGCRQIQGSDEPVWIKRGIFQGDSLSPLWFCLALNPLSTLLENSGLGYRLRKDGQVISHLLYMDDLKLFAPNKLQLLELLKVTETFSNAIRMEFGVDKCAVMYVKRGEIMESEGLQLSDSIHLRSLSSSESYKYLGMSEALGINVTDMKQSLRERFFGRLKKVLNSLLSGGNKVRAFNGWVMPVLMYSFGILKWTQTELDALDRRVRTLLTANRMHHPRSSMMRLYIPRKCGGRGFLNAKNLHNREVCSLREYFLEADVGMHRDVVSVDKGLTPLSLANGNWRKPKVLDTNDRREEWQGKELHGRFYRALHGPDVDFLASVSWLRFGDLFGETEGFVCAIMDEVMMTNNYRKYIVKDGTVDICRACHRPGESIRHIISGCSSLANGEYLHRHNLVARIIHQQLALKYNLVESEVPYYKYAPDPVLVNGNITLYWDRPITTDRTVVANRPDIVVIDRLERRTMIVDITVPHDENLVKAEQDKKNKYLDLAREVVDMWDVSTAIIVPIVVSANGLIAKSLDQHLRRLSLGSWIKGLIQKAVLLDTARIVRRFLSQEP

SEQ ID NO: 28951 - protein, 1199 aa, Xestia c-nigrum
MITRAASRRALIPSPDSSLSSASPPPDPGSPVSPVAAVASSSSDEYFSPPTSPTPVRRAGRGRPPKGLGLRGQQAPSRVPATGGCVQRMKWTQLMNENVMRAYYGSTEGGTNLTAYRVRMLSLFQDLEPTVNASAQRLSDQVRVIQRNHLLDGAALDRLRSEVLSNRIILTPAQTAVQASSIDANPPRSNPAVVEEDDRVATVSSQCNDRLRSALEDALHEYRSTSAELRPRLPRLPMHKKNRALVCALDSQLKNVFESSEDLVDTHSILFCGAVAACRLANVKFPNCDLATRPKPAVPAWQRRIERRIDGARVLIGKLHCFREGNTRPRVMRFVRRAFSGTEISPQEYMSRVTERIDFLKQKVYAWASRIRRYKRRVDRYSQNRMFQSDERWVYRAWERPQQNMTDVCRPDDAATSSFWRSIWSVPVCHSEADWMRDVERVCEPIPTMEPILITPLDIARAVRPLPNWKSPGPDGLHNFWLKWFSSSHTCLASQFQSSLESGSLPQFLTTGITHLLHKSGSPAEPKNYRPITCLSTVYKLLTSILRTKINTHVDSNSIMSASQNGCRNGSRGTKELLLIDMAISQQVRRARKDLSICWIDYKKAYDSVPHSWLKRVLELYKIDATLRTFLESCMGQWRTVLRYPGCRQIQGNDEPVWIKRGIFQGDSLSPLWFCLALNPVSTLLENSGLGYRLRKDGQVISHLLYMDDLKLFAPNKLQLMELLKVTETFSSAIGMEFGVDKCAVMYVKRGKIMGSEGLQLSDSIHLRSLSSSESYKYLGMSEALGINVTDMKQSLKERFFGRLKKVLNSLLSGGNKVRAFNGWVMPVLMYSFGILKWTQTELDALDRRVRTLLTENRMHHPRSSVMRLYIPRKCGGRGFLNAKTLHNREVCSLREYFLKVDVGMHRDVVAVDKGLTPLSMAKENWRKPVVLTTDDRKKEWQGKELHGRFYRALHGPDVDFLASVSWLRFGDLFGETEGFVCAIMDEVMLTNNYRKYIMKDGTVDVCRACHCPGESIRHIISGCSRLANGEYLHRHNQVARIIHQQLALKFKLVESEVPYYKYVPDPVLVKDHVTLYWDQSIITDRTIVANKPDIVVIDRSARRVMIIDVTIPHDENLVKAEKEKQMKYLDLAHEVRDMWNMNSVIIVPIIVTANGLIAKSLDEHLSKLSLGGWIKGLIQKAVLLDTARIVRRFLSLQP

SEQ ID NO: 28952 - protein, 1111 aa, Xestia c-nigrum
MRWTQSMNENAMRAYYRSTEGGTNLTAYRDRMLSLFQDLEPTVNVSAQRLSDQVRVIQRNHRLDDAALDRLRSEVLSNLIIQTTTQTAVQASVINATLPRSNPVVVAEDDRVATISSQCNDRLRSALEDALREYRSTPTELRPRLPRLPMHKKNRALVCALDSQLKNIFESSVDLVDTHSILFCGAVAACRVANVKFPNCDVVTRPKPAVPAWQRRIERRIDGARVLIGKLYCFREGNTRPRVMRFVRRAFSGTEISPQEYMSRVTERIDFLKQKFYAWANRIRRYKRRVDRYSQNRMFQSDERWVYRAWERPQQNMTDVCRPDDAATSSFWRSIWSAPVCHTEADWMRDVERVCEPIPEMEPIVITPIDIAKAVRSLPNWKSPGPDGLHNFWLKWLSSSHTCLASQFQSSLESGSLPQFLTTGVTHLLYKSGSPTEPKNYRPITCLSTVYKLLTSILRVKINTHIDKNSIMSASQNGCRNGSRGTKELLLIDMAISQQVRRARKDLSTCWIDYKKAYDSVPHSWLMRVLELYKIDATLRAFLESFMGQWRTVLRYPGCRQIQGNDETVWIKRGIFQGDSLSPLWFCLALNPLSTLLENSGLGYRLRKDGQVISHLLYMDDLKLFAPNKSQLMELLKVTETFSSAIRMEFGVDKCAVMYVKRGEIMGSEGLQLSDSIHLRSLSSSENYKYLGMSEALGINVTDMKQSLRERFFGRLKKVLNSLLSGGNKVRAFNGWVMPVLMYSFGILKWTQAELDALDRRVRTLLTENRMHHPRSSVMRLYIPRKCGGRGFLNAKTLHNREVCSLREYFMKVEVGMHHDVVTVDKGLTPLSMAKKNWRKPVVLTTDDRKKEWQGKELHGRFYRALHGPDVDFLASVSWLRFGDLFGETEGFVCAIMDEVMLTNNYRKYIMKDGSVDVCRACHLPGESIRHIISGCSRLANGEYLHRHNQVARIIHQQLALKYNLVESEVPYYKYVPDPVLVKDHVTLYWDQSIITDRTIVANKPDIVVIDRSARRVMIIDVTIPHDENLVKAEKEKQIKYLDLAHEVRDMWNMDSVIIVPIVVTANGLIAKSLDDHLSKLSLGGWIKSLIQKAVLLDTARIVRRFLSLQP

SEQ ID NO: 28953 - protein, 1004 aa, Xestia c-nigrum
MITRAALRRARLATPDSSLSSASPPPDPGSPVSPAVAVASSSSDEYFSPPTSPTPVRRAGRGRPPRSLGLRGSILFCGAVAACRLANVKFPNCDIATRPKPAVPAWQRRIERRIDGARVLIAKLYCFREGNTRPRVMRFVRRAFSGTEISPQEYMSRVTERIDFLKQKVYAWASRIRRYKRRVDRYSQNRMFQSDERWVYRAWERPQQNMTDVCRPDDAATSSFWRSIWSVPVCHSEADWMRDVERVCEPIPTMEPILITPLDIARAVRPLPNWKSPGPDGLHNFWLKWFSSSHTCLASQFQSTLESGSLPQFLTTGVTHLLHKSGSPAEPKNYRPITCLSTVYKLLTSILRTKINTHVDSNSIMSASQNGCRNGSRGTKELLLIDMAISQQVRRARKDLSTCWINYKKAYDSVPHSWLKRVLELYKIDATLRAFLESCMGQWRTVLRYPGCRQIQGNDEPVWIKRGIFQGDSLSPLWFCLALNPVSTLLENSGLGYRLRKDGQVISHLLYMDDLKLFAPNKLQLMELLKVTETFSSAIGMEFGVDKCAVMYVKRGKIMGSEGLQLSDSIHLRSLSSSESYKYLGMSEALGINVTDMKQSLKERFFGRLKKVLNSLLSGGNKVRAFNGWVMPVLMYSFGILKWTQTELDALDRRVRTLLTENRMHHPRSSVMRLYIPRKGGGRGFLNAKTLHNREVCSLREYFLKVDVGMHRDVVAVDKGLTPLSMAKENWRKPVVLTTDDRKNEWQGKELHGRFYRALHGPDVDFLASVSWLRFGDLFGETEGFVCAIMDEVMLTNNYRKYIMKDGTVDVCRACHCPGESIRHIISGCSRLANGEYLHRHNQVARIIHQQLALKFKLVESEVPYYKYVPDPVLVKDHVTLYWDQSIITDRTIVANKPDIVVIDRSARRVMIIDVTIPHDENLVKAEKEKQMKYLDLAHEVRDMWNMNSVIIVPIVVTANGLIAKSLDEHLSKLCLGGWIKGLIQKAVLLDTARIVRRFLSLQP

SEQ ID NO: 28954 - protein, 1203 aa, Omphaloscelis lunosa
MLTRSAARSARLPPPDSPLSSASPPPVPSPIVNAVSTPAAVVASSSSDEYFSPPTSPTPVRRQGRGQPPKSLGLRGRPAPSRVPAAGGCVQRMRWTQSMNENVMRAYYGSTEGGTNLTAYRVRMLSLFQELEPTVNVSAQRLSDQVRVIQRNHRLDDTALDRLRSEVLSNHIVSAREQTAAEASNIDPTPPRFNHGVEEEDDRVATVSSQCNNRLRSALEDAFREYRYTPTELRPRLPRLPMHKKNRALMCALDSQLTNFFESSEDLIDTHSILYCAAVAACRLANVKFPNCDGATRPKPAVPAWQCRIERRIDGARVLIGKLYCFREGNTRPRVMRFVRRAFSGTEISPQDYMSRVTERIDFLKQKVCAWASRIRRYKRRVDRYTQNRMFQSDERWVYRAWERPEQNVTDVCRPDDAATSAFWRSIWSVPVCHTEAGWMQDVERVCETIPEMDAVFITPLDVARAVRPLPNWKSPGPDGLHNFWLKWLSSSHTCLASQFQSSLESGSLPQFLTTGVTHLLHKSGNPAEPKNYRPITCLSTVYKLLTSILRTKINTHIDSNSIMSVSQNGCRNRSRGTKELLLIDMAISQQVRRSRKDLSTCWIDYKKAYDSVPHTWLMRVLELYKVDTTLRTFLMSCMGQWRTVLRYPGCRRTQGNDEPVWIKRGIFQGDSLSPLWFCLALNPLSTLLEDSGLGYRLRRGGQVISHLLYMDDLKLFAPNKLRLMELLKVTETFSGAIRMEFGVDKCAVMHVKRGEIMESEGIQLSDSIHLRPLSSAENYRYLGMSESLGINVADMKQSLKERFFGRLKKVLISFLSGGNKVRAFNGWVMPVLMYSFGILKWTQTELDALDRRVRTLLTANRMHHPRSSVMRLYIPRKCGGRGFLNAKTLHNREVCSLREYFFKADVGMHRDVVAVDNGLTPLSMAKENWRKPVVLTTDDRKEIWQSKALHGRFYRALHEPSVDFLASVSWLRFGDLFGETEGFICAIMDEVILTNNYRRHIMKDGTVDVCRACHRPGESIRHIISGCSRLANGEYLHRHNQVARIIHQQLALKYKLVDSEVPYYKYVPDPVLENDHATLYWDRSIITDRTIVANKPDIVVIDRLARHAMIVDVTIPHDENLVKAEKEKQIKYLDLAHEVVGMWNVSSAIIVPIVVTANGLMAKSLDHHLSRLSLGGWIKRLIQKAVLLDTARIVRRFLSLQP

SEQ ID NO: 28955 - protein, 1111 aa, Omphaloscelis lunosa
MRWTQSMNENVMRAYYGSTEGGTNLTAYRVRMLSLFQELEPTVNVSAQRLSDQVRVIQHNHRLDDTALDRLRSEVLSNHIVSAREQTAAEASNIDPTPPRFNHGVEEEDDRVATVSSQCNNRLRSALEDAFREYRYTPTELRPRLPRLPMHKKNRALMCALDSQLTNFFESSEDLIDTHSILYCAAVAACRLANVKFPNCDGATRPKPAVPAWQCRIERRIDGARVLIGKLYCFREGNTRPRVMRFVRRAFSGTEISPQDYMSRVTERIDFLKQKVCAWASRIRRYKRRVDRYTQNRMFQSDERWVYRAWERPEQNVTDVCRPDDAATSAFWRSIWSVPVCHTEAGWMQDVERVCETIPEMDAVFITPLDVARAVRPLPNWKSPGPDGLHNFWLKWLSSSHTCLASQFQSSLESGSLPQFLTTGVTHLLHKSGNPAEPKNYRPITCLSTVYKLLTSILRTKINTHIDSNSIMSVSQNGCRNGSRGTKELLLIDMAISQQVRRSRKDLSTCWIDYKKAYDSVPHTWLMRVLELYKVDTTLRTFLMSCMGQWRTVLRYPGCRWTQGNDEPVWIKRGIFQGDSLSPLWFCLALNPLSTLLEDSGLGYRLRRGGQVISHLLYMDDLKLFAPNKLRLMELLKVTETFSGAIRMEFGVDKCAVMHVKRGEIMESEGIQLSDSIHLRPLSSAENYRYLGMSESLGINVADMKQSLKERFFGRLKKVLISFLSGGNKVRAFNGWVMPVLMYSFGILKWTQTELDALDRRVRTLLTANRMHHPRSSVMRLYIPRKCGGRGFLNAKTLHNREVCSLREYFFKADVGMHRDVVAVDNGLTPLSMAKENWRKPVVLTTDDRKEIWQSKALHGRFYRALHEPSVDFLASVSWLRFGDLFGETEGFICAIMDEVILTNNYRRHIMKDGTIDVCRACHRPGESIRHIISGCSRLANGEYLHRHNQVARIIHQQLALKYKLVDSEVPYYKYVPDPVLENDHATLYWDRSIITDKTIVANKPDIVVIDRLARHAMIVDVTIPHDENLVKAEKEKQIKYLDLAHEVVGMWNVSSAIIVPIVVTANGLMAKSLDHHLSRLSLGGWIKRLIQKAVLLDTARIVRRFLSLQP

SEQ ID NO: 28956 - protein, 1203 aa, Omphaloscelis lunosa
MLTRSAARLARPSPPDSSLSSASPPPVPSPTVSATTTPAAVVASSSSDEYFSPPTSPTPVRRQGRGRPPKSLGLRGQPAPSRVPAAGGCVQRMRWTQSMNENVMRAYYGSTEGGTNLTAYRVRMLSLFQELEPTVNVSAQRLSDQVRVIQRNHRLDDTALDRLRSEVLSNHIVSTRAQTAAQASNIDATPPRFNHGVEEEDDRVATVSSQCNNRLRSALEDAFREYRYTPTELRPRLPRLPMHNKNRALVCALDSQLTNFFESSEDLIDTHSILYCAAVAACRLANVKFPNCDGATRPKPVVPAWQCRIERRIDGARVLIGKLYCFREGNTRPRVMRFVRRAFSGTGISPQDYMSRVTERIDFLKQKVCAWASRIRRYKRRVDRYTQNRMFQSDERWVYRAWERPEQNVTDVCRPDDATTSAFWRSIWSMPVCHTEAGWMQDVERVCETIPVMDAVFITPLDVARAVRPLPNWKSPGPDGLHNFWLKWLSSSHTRLASQFQSSLESGSLPQFLTTGVTHLLHKSGNPAEPKNYRPITCLSTVYKLLTSILRTKINTHIDSNSIMSASQNGCRNGSRGTKELLLIDMAISQQVRRSRKDLSTCWIDYKKAYDSVPHTWLMRVLELYKVDTTLRTFLMSCMGQWRTVLRYPGCRQTQGNDEPVWIKRGIFQGDSLSPLWFCLALNPLSTLLEDSGLGYRLRRGGQVISHLLYMDDLKLFAPNKLRLMELLKVTETFSGAIRMEFGVDKCAVMHVKRGEIMESEGIQLSDSIHLRSLSSAENYRYLGMSESLGINVADMKQSLKERFFGRLKKVLISFLSGGNKVRAFNGWVMPVLMYSFGILKWTQTELDALDRRVRTLLTANRMHHPHSSVMRLYIPRKCGGRGFLNAKTLHNREVCSLREYFFKADVGMHRDVVAVDNGLTPLSMAKENWRKPVVLTTDDRKEVWQSKALHGRFFRALHEPGVDFLASVSWLRFGDLFGETEGFICAIMDEVILTNNYRRHIMKDGTVDVCRACHRPGESIRHIISGCSRLANGEYLHRHNQVARIIHQQLALKYKLVDSEVPYYKYVPDPVLENDHVTLYWDRSIITDRTIVANKPDIVVIDRLARHAMIVDVTIPHDENLVKAEKEKQIKYLDLAHEVVDMWNVSSAVIVPIVVTANGLMAKSLDQHLSRLSLDGWIKRLIQKAVLLDTARIVRRFLSLQP

SEQ ID NO: 28957 - protein, 1202 aa, Sesamia nonagrioides
MLTRQAARRARSPPPDSSPSSASPPPVPSANVSAVTTPAAVVASSSSDEYFSPPTSPRPVRRQGRGRPPKSLGLRGHPAPSRVPAAGGCVQRMRWTQTMNENVMRAYYRATEGGTNLTAYRERMLSLFQALEPTVNVSAQRLSDQVRVIQRNHRLDDIALDRLRPEVLSNQITPTLTQTAAQASIIDAAPPRSNRVEEEDDRVETVSSQYNDRLRNALEDAFRDYRSTPTDLRPRLPRLPMHKKNRALVCALDSLLKNFFESSEDLIDTHSILYCAAVAACRLAKVKFPNCEEAARPKPAVPAWQRRIERRIDGTRVLIGKLYCFRDGNTRPRVMRFVRQAFSGTGISPREYINHLTERIDFLKQKVCAWASRIRRYKRRVDRYTQNRMFQSDERWVYRAWERPEQNEADVCRPDDATTSAFWRGIWSVSVCHTEVNWIQNVEQVCETIPEMDTILITPSDVAAAVRSLPNWKSPGPDGLHNFWLKWLSSSHTCLASQFQSSLESGSLPQFLTTGITHLLHKSGSTAEPKNYRPITCLPTVYKVLTSILKAKINKHLNSNSIMSVSQNGCKNGSRGTKELLLIDMAISQQVRRSRKDLSTCWIDYKKAYDSVPHTWLLRVLELYKVNATLRTFLRSCMGQWKTVLRYPGSRRIQGNDEPVWIKRGIFQGDSLSPLWFCLALNPLSTLLEDSGLGYRLKRGGQVISHLLYMDDLKLFAPNKLHLMKLLNVTETFSSGIKMEFGVDKCAVMHVKRGQIMESEGITLPDSIHLRSLSSFESYKYLGMSEALGINDADMKQSLKERFFGRLKKVLKSLLSGGNKVRAFNGWVMPVLMYSFGILKWTQTELDALDRRVRTLLTANRMHHPRSSVMRLYIPRKCGGRGFLNAKTLHNREVCSLREHFFKTVVGMHHDVVTVDKGLTPLSMAKENWHKPIILTTDDRKMIWQSKELHGRFYRALHEPDVDFLASVSWLRFSDLFGETEGFVCAIMDEVILTNNYRRYIMKDGTIDVCRACHHPGESIRHIISGCSRLANSEYLHRHNQVARIIHQQLALKYKLVDSEVPYYKYVPDPVLENDHVTLYWDWSIITDRTIVANKPDIVVIDRLARLAMIVDVTIPHDGNLVKAEKEKQIKYLDLAHEIVDMWNMNSAVIVPIVVSANGLIAKSLDQHLLRLSLGSWIKGLIQKAVLLDTARIVKRFLSLEP

SEQ ID NO: 28958 - protein, 962 aa, Apamea monoglypha
MHKKNRALVCALDSQLKNFFESSEDLVDTHSILYCAAVAACRLANVKFPNCDGATRPKPAVPAWQYRIERRIDGARVLIGKLYCFREGNTRPRVMRFVRQAFSGTGISPREYISNVTERIDFLKQKVCAWASRIRRYKRRVDRYTQNRMFQSDERWVYRAWERPEQNVTDVCRPDDANTNAFWRSIWSVPVYHAEGGWMQDIKRVCETIPEMDPVLITPLDVARAVRPLPNWKSPGPDGLHNFWLKWLISSHSRLASQFQSSLESGSLPQFLTTGVTHLLHKSGSPAEPKNYRPITCLSTVYKLLTSILRAKINTHIDNNSIMSASQNGCRNGSRGTKELLLIDMAISQQVRRSRKDLSTCWIDYKKAYDSVPHAWLMRVLELYKIDATLRTFLESCMGQWRTVLRYPGCRQIQGNDEPVWIKRGIFQGDSLSPLWFCLALNPLSTLLEDSGLGYRLKRGGQVISHLLYMDDLKLFAPNKLRLLELLKVTETFSSAIRMEFGVDKCAVMHVKRGEIMESEGIQLSDSIHLRSLSSSESYKYLGMSEALGINVADMKQMLRERFFGRLKKVLVSLLSGGNKVRAFNSWVMPVLMYSFGILKWTQTELDALDRRVRTLLTANRMHHPRSSVMRLYIPRKCGGRGFLNAKTLHNREVCNLREYFIKAEVGMHRDVVAVDKGLTPLSMAKENWRKPVILTTDDRKEVWQSKELHGRFYRALHEPGVDFLASVSWLRFGDLFGETEGFVCAIMDEVVLTNNYRRYIMKDGTVDVCRACHRPGESIRHIISGCSRLANGEYLHRHNQVARIIHQQLALKYKLVDSEVPYYKYVPDPVLENDHVTLYWDRSIITDRTIVANKPDIVVIDRLARRTMIVDVTIPHDGNLVKAEKEKQIKYLDLAHEVVDMWNVSSAIIVPIVVSANGLMAESLDQHLSRLSLGGWIKGLIQKAVLLDTARIVRRFLSLEP

SEQ ID NO: 28959 - protein, 1111 aa, Mamestra configurata
MRWTQSMNENVMRAYYGSTEGGTNLTAYRVRMLSLFQDLEPTVNVSAQRLSDQVRVIQRNHRLDDAALDRLRSEVLNNLIISTPTQTAVQAPVNGRITPRPNNVSDEVDDRVVTVSSQCNDRLRSALEDALREYRSTPTELRPRLPRLPMHKKNRALVCALDSLLQNIFESSESLVDTHSILYCGAVAACRIANVKFPGCDEAIRPKPAAPAWQRRIERRIDETRALIGKLYCFREGNTRPRVMRFVRRAFSGTEISPRDFTSRVTERIDFLKQKVCAWASRIRRYKRRVDRYSQNRMFQSDERWVYRAWERPEQSVTDVCRPDDVATSIFWRSIWSVPICHAEGGWMRDVERVCEAIPQMEKITITTLDVAKAVRPLPNWKSPGPDGLHNFWLKWYSSSHALLASQFQSSLDSGSLPQFLTTGVTHLLHKTGSPTEPKNYRPITCLSTVYKLLTSILRAKINEHIESNSIMSASQNGCRKGSRGTKELLLIDMAISQQVRRSRKDLSTCWIDYKKAYDSVPHTWLMKVLELYKIDATLRTFLESCMRQWKTVLRYPGCRPIQGSDEPVWIKRGIFQGDSLSPLWFCLALNPLSTLLEDSGLGYRLRRGGQAISHLLYMDDLKLFAPNNLRLMELLKVTETFSSAIRMEFGVDKCAVMHVKKGEIMESEGIQLSDSIQVRSLSSTETYKYLGMSEALGINGTDMKQSLRERFFGRLKKVLNSLLSGGNKVRAFNGWVMPVLMYTFGILKWTQTELDALDRRVRTLLTANRMHHPRSSVMRLYIPRKCGGRGFLNAKTLHNREMCSLREYFLKADVGMHRDVVAVDKGLTPLSMAKENWRTPVILTTDDRKEVWKGKELHGRFYRALHGSDVDFSASVAWLRFGDLFGETEGFVCAIMDEVILTNNYRRHIMKDGTVDMCRACHRPGESIRHIISGCSRLANGEYLHRHNQVARIIHQQLALKYKLVDSEVPYYKYVPDPVLENDHVTLYWDRSIITDRTIVANKPDIVVIDRLARRTMIIDVTIPHDENLVKAEKEKQIKYLDLAHEVVDMWNVDSAVIVPIVVTANGLMAKSFDDHLSKLALRSWVKGLIQKAVLLDTARIVRRFLSLEP

SEQ ID NO: 28960 - protein, 1199 aa, Noctua janthe
MITRAAYRRARFTTPDSSLSSASPPPDPGSPVSPAAAVASSSSDEYFSPPTSPTPVRRQGRGRPPKSLGLRGHPAPSRVPAVGGCVQRMRWTKTINENVMRAYYGSTEGGTNLTAYRVRMLSLFQVLEPIVNVSAQRLSDQVRVIQRNHMLDDAALDRLRSEVLSNRIVLTPAQTAVQASTIDATPPRSNPAVVEEDDRVAMVSSQCNDRLRSALEDALREYRSTPTKLRPRLPRLPMHNKNRALVCALDSQLKNIFESSENLVDTHSILYCGAVAACRLANVKFPNYDVAIRPKPAVPTWQRRIECRIDEARVLIGKLHCFREGNTRPRVMRFVRRAFSGTGISPQEYMSRVTERIDFLKQKVYAWANRIRRYKRRVDRYSQNRIFQSDERWVYRAWERPEQNMTDVCRPDDAATSSFWRSIWSVPVCHTEADWMRDVERACEPIPEMEPILITSIDITRAVRPLPNWKSPGPDGLHNFWLKWLSSSHTCLASQFQSSLESGSLPQFLTTGVTHLLHKSGSPAEPKNYRPITCLSTVYKLLTSILRVKINTHIDKNFIMSASQNGCRNRSRGTKELLLIDMAISQQVRRSRKDLSTCWIDYKKAYDSVPHTWLMRVLELYKIDSTLRAFLESCMGQWRTVLRYPGCRQIQGNDEPVWIKRGIFQGDSLSPLWFCLALNPLSTLLEDSGLGYRLRRGGQVISHLLYMDDLKLFAPNKLRLMELLKVTETFSNAIRMEFGVDKCAVMYVKRGEIMESEGIQLSDSIHLRSLSSSESYKYLGMSESLGINVTDMKQSLRERFFGRLNKVLNSLLSGGNKVRAFNGWVMPVLMYSFGVLKWTQTELDALDRRVRTLLTANRMHHPRSSVMRLYIPRKCGGRGFLNAKTLHNREICSLREYFLKTEVGMHRDVVAVDKGLTPLSMAKENWRKPVVLTTDDRKEVWQGKELHGRFYRALHGPDVDFLASVSWLRFGDLFGETEGFVCAIMDEVMLTNNYRKYIMKDGTVDVCRACHRPGESIRHIISGCSRLANGEYLHRHNQVARIIHQQLALKYKLVESEVPYYKYVPDPVLEKDHVTLYWDRSIITDRTIVANKPDIVVIDRLARRVMIVDVTIPHDENLVKAEKEKQIKYLDLAHEVVDMWNVNSAIIVPIVVTANGLIAKSLDDHLSRLSLGGWIKGLIQKAVLLDTARIVRRFLSLEP

SEQ ID NO: 28961 - protein, 1204 aa, Noctua janthe
MLTRRRAKLHETHSPSPGSSLSSASHSPGRATSVSAASPVAAVASSSSDEFFSPPSTPPPPRRRGRGRPPASLGPRGQQATNRVPAAGGNVSRIRWTQSMNENVMRAYYGSTEGGTNLTAYRVRMLSLFQVLEPIVNVSAQRLSDQVRVIQRNHMLDDAALDRLRSEVLSNRIVLTPAQTAVQASAIDATPPRSNPAVVEEDDRVAMVSSQCNDRLRSALEDALREYRSTPTKLRPRLPRLPMQNKNRALVCALDSQLKNIFESSENLVDTHSILYCGAVAAYRLANVKFPNDDVAIRPKPAVPTWQRRIECRIDEARVLIGKLHCFREGNTRPRVMRFVRRAFSGTGISPQEYMSRVTERIDFLKQKVYAWANRIRRYKRRVDRYSQNRIFQSDERWVYRAWERPEQNMTDVCRPDDAATSSFWRSIWSVPVCHTEADWIRDVERTCEPIPEMEPILITPIDIARAVRPLPNWKSPGPDGLHNFWLKWLSSSHTCLASQFQSSLESGSLPQFLTTGVTHLLHKSGSPTEPKNYRPITCLSTVYKLLTSILRVKINTHIDKNFIMSASQNGCRNGSRGTKELLLIDMAISQQVRRSRKDLSTCWIDYKKAYDSVPHTWLMRVLELYKIDATLRAFLESCMGQWRTVLRYPGCRQIQGNDEPVWIKRGIFQGDSLSPLWFCLALNPLSTLLEDSGLGYRLRRGGQVISHLLYMDDLKLFAPNKLRLMELLKVTETFSNAIRMEFGVDKCAVMYVKRGEIMESEGIQLSDSIHLRSLSSSESYKYLGMSESLGSNVTDMKQSLRERFFGRLNKVLNSLLSGGNKVRAFNGWVMPVLMYSFGVLKWTQTELDALDRRVRTLLTANRMHHPRSSVMRLYIPRKCGGRGFLNAKTLHNREICSLREYFLKTEVGMHRDVVAVDKGLTPLSMAKENWRKPVVLTTDDRKEVWQGKELHGRFYRALHGTDVDFLASVSWLRFGDLFGETEGFVCAIMDEVMLTNNYRKYIMKDGTVDVCRACHRPGESIRHIISGCSRLANGEYLHRHNQVARIIHQQLALKYKLVESEVPYYKYVPDLVLEKDHVTLYWDRSIITDRTIVANKPDIVVIDRLARRVMIVDVTIPHDENLVKAEKEKQIKYLDLAHEVVDMWNVNSAIIVPIVVTANGLIAKSLDDHLSRLSLGGWIKGLIQKAVLLDTARIVRRFLSLEP

SEQ ID NO: 28962 - protein, 1200 aa, Mythimna ferrago
MLTRSATRRARHPPTGSLLSSASPPPDPGSPVSPVAAVASSSSDEYFSPPTSPTPVRRPGRGRPPNGLGPRGQPAPSRVPAAGGCVQRMKWTQSINENVMRAYYRATEGGTNLTAYRVRMLSLFQELEPSVNVTTQRLSDQVRVIQRNHRLDDAALDRLRSEVLSNRIISTPIQTQTAAPRATDTIMPRPNYGDDEADDRVVAVSSQCNDQLRSALEDALREYRSTPIALRPRLPRLPMHKKNRALVCALDSLLENVFESSVNLVDTHSILYCGAIAACRLANVKLPSCDGATRPKPAVPAWQCRIERRIDGARALIGKLYCFREGNTRPRVMRYVRRAFSGTGVSPREYLAHVTERIDFLKQKVCAWANRIRRYKRRVDRYSQNRMFQSDERWVYRDWERPEQSVTDVLRPDVAATNEFWRSIWSVPVCHTEGGWMRDIERVCEAIPEMEKVFISPIDVARAVRPLPNWKSPGPDGLQNFWLKWYSSSHALLASQFQSSLESGSLPQFLTTGVTHLLHKTGSTAEPKNYRPITCLSTVYKLLTSILRTKINNHIENNSIMSASQNGCRNGSRGTKELLLIDMAISQQVRRSRKDLSTCWIDYKKAYDSVPHTWLMRVLELYKIDATLRTFLESCMGEWNTVLRYPGCRSIRGDDEPLWIKRGIFQGDSLSPLWFCLALNPLSTLLEDSGLGYRLRRGGQVLSHFLYMDDLKLIAPNKLQLMELLKVTETFSSAIRMEFCVDKCAVMHVKRGEIMESEGIQLSDSIHLRSLSSTETYKYLGMSEALGINVTDMKQSLRERFFSRLKKVLNSLLSGGNKVRAFNGWVMPVLMYSFGILKWTQTELDALDRRVRTLLTANRMHHPRSSVMRLYIPRKCGGRGFLNAKTLHNREVCNLREYFQKTDVGMHRDVVAVDKGLTPLSMAKENWRKPVVLTTDDRREVWKNKELHGRFYRALHEPDVDFGASVTWLRFSNLFGETEGFICAIMDEVILTNNYRRYIMKDGTVDVCRACHRPGESIRHIISGCSRLANGEYLHRHNQVARIIHQQLALKYKLMESEVPYYRYVPDPVLENDHVTLYWDRSIITDRTIIANKPDIVVIDRLARRAMIVDVTIPHDENLVKAEKEKKIKYLDLAHEVVDLWNVDSAVIVPIVVNVNGLIAKSFDDHLSKLALRGWIKGLIQKAVLLDTARIVRRFLSLEP

SEQ ID NO: 28963 - protein, 1200 aa, Mythimna ferrago
MLTRTAARRARHPPPGSSLSSASPPPDPGSPVSPAAAVASSSSDEYFSPPTSPTPVRRPGRGRPPKSMGPRGQPAPSRVPAAGGCVQRMRWTQSMNENVMRAYYGSTEGGTNLTAYRERMLSLFQVLEPTVNVSAQRLSDQVRVIQRNHRLDDAALDRLRSEILSNQIVSTSTQTQTAATPTTNAISPRSDHNNDDADDRVVTVSSQCNERLRSALEDALCEYMSTPTELRPRLPRLPMHKKNRALVCALDSLLKNIFESSENLVDTHSILYCGAVAACRLAKIKFPNIDGTIRPKTAVPAWQCRIERRIDEARVLIGKLHCFREGNTRPRVMRFVRRAFLGTGISPQGYMSRVTERIDFLKQKVCAWASRIRRYKRRVDRYSQNRMFQSDERWVYRAWERPEHSVIDECRPDDLATITFWRNIWSVPVSHTEGDWMRDVERVCEAIPEMEKVTITPEDVAKAVRPLPNWKSPGPDGLQNFWLKWYSSSHAPLASQFQSILESGSLPEYLTTGVTHLLHKTGNPVDPKNYRPITCLSTVYKLLTSILRAKINIHIENNQIISPSQNGCRNGSRGTKELLLIDMAISQQTRRSRKDLSTCWIDYKKAYDSVPHTWLMRVLELYKIDITLRTFLESCMRQWKTVLRYPGCRPIQGNDEPIWIKRGIFQGDSLSPLWFCLALNPLSTLLEDSGLGYRLRRGGQVISHLLYMDDLKLFAPNKLRLMELLKVTENFSSAIRMEFGVDKCAVMHVKRGEIMESEGVQLSDSIHLRSLSSTETYKYLGMSEALGINVTDVKQSLKERFVGRLKKVLNSLLSGGNKVRAFNGWVMPVLMYSFGILKWTQTELDALDRRVRTLLTANRMHHPRSSVMRLYIPRKCGGRGFLNAKTLHNREVCSLREYFLKTDVGMHRDVVAVDKGLTPLSMAKENWRKPVVLTTDDRKEVWKGKELHGRFFRALHEPDVDFSASVAWLRFSNLFGETEGFVCAIMDEVILTNNYRRHIMKDGTIDVCRACHRPGESIRHIISGCSRLANGEYLHRHNQVARILHQQLALKYNLVDSEVPYYRYVPDPVLENDHVTLYWDRSIITDRTIVANKPDIVVIDRLARRAMIVDVTIPHDENLVKAEKEKQIKYLDLAHEVVDMWNVDSAIIVPIVVTANGLIAKSFDDHLSKLSLHGWIKGLIQKAVLLDTARIVRRFLSLEP

SEQ ID NO: 28964 - protein, 868 aa, Mythimna ferrago
MRFVRRAFLGTGISPQGYMSRVTERIDFLKQKVCAWASRIRRYKRRVDRYSQNRMFQSDERWVYRAWERPEHSVIDECRPDDLATITFWRNIWSVPVSHTEGGWMRDVERVCDAIPEMEKVTITPEDVAKAVRPLPNWKSPGPDGLQNFWLKWYSSSHAPLASQFQSILESGSLPEYLTTGVTHLLHKTGNPVDPKNYRPITCLSTVYKLLTSILRAKINIHIENNQIISPSQNGCRNGSRGTKELLLIDMAISQQTRRSRKDLSTCWIDYKKAYDSVPHTWLMRVLELYKIDITLRTFLESCMRQWKTVLRYPGCRPIQGNDEPIWIKRGIFQGDSLSPLWFCLALNPLSTLLEDSGLGYRLRRGGQVISHLLYMDDLKLFAPSNLQLMELLKVTETFSSAIRMEFGVDKCAGMHVKRGEIMESEGIQLPDSIHLRSLSSTETYRYLGMSEALGINNADMKQSLKERFFGRLKKVLNSLLSGGNKVRAFNGWVMPVLMYSFGILKWTQTELDALDRRVRTLLTANRMHHPRSSVMRLYIPRKCGGRGFLNAKTLHNREVCSLREYFLKTDVGMHRDVVAVDKGLTPLSMAKEDWHKPVIMTTDNRKEIWKGKELHGRFFRALHEPDVDFLASVAWLRFSDLFGETEGFVCAITDEVILTNNYRRYIMKDGMVDVCRACHRPGESIRHIISGCSRLANGEYLHRHNQVARIIHQQLALKYNLVDLEVPYYKYVPDPVLENDHVTLYWDRSIITDRTIVANKPDIVVIDRLARRAMIVDITIPHDENLVKAEKEKQIKYLDLAHEIVAMWNVDSAIIVPIVVTANGLIAKSFDDHLSKLSLRGWIKGQIQKAVLLDTARIVRKFLSLEP

SEQ ID NO: 28965 - protein, 1200 aa, Mythimna ferrago
MLTRTAARRARHPPPGSSLSSASPPPDPGSPVSPAAAVASSSSDEYFSPPTSPTPVRRPGRGRPPKSMGPRGQPAPSRVPAAGGCVQRMRWTQSMNENVMRAYYGSTEGGTNLTAYRERMLSLFQVLEPTVNVSAQRLSDQVRVIQRNHRLDDAALDRLRSEILSNQIVSTSTQTQTAATPTTNAISPRSDHNNDDADDRVVTVSSQCNERLRSALEDALCEYMSTPTELRPRLPRLPMHKKNRALVCALDSLLKNIFESSENLVDTHSILYCGAVAACRLAKIKFPNIDGTIRPKTAVPAWQCRIERRIDEARVLIGKLHCFREGNTRPRVMRFVRRAFLGTGISPQGYMSRVTERIDFLKQKVCAWASRIRRYKQRVDRYSQNRMFQSDERWVYRAWERPEHSVIDECRPDDLATITFWRNIWSVPVSHTEGGWMRDVERVCEAIPEMEKVTITPEDVAKAVRPLPNWKSPGPDGLQNFWLKWYSSSHAPLASQFQSILESGSLPEYLTTGVTHLLHKTGNPVDPKNYRPITCLSTVYKLLTSILRAKINIHIENNQIISPSQNGCRNGSRGTKELLLIDMAISQQTRRSRKDLSTCWIDYKKAYDSVPHTWLMRVLELYKIDITLRTFLESCMRQWKTVLRYPGCRPIQGNDEPIWIKRGIFQGDSLSPLWFCLALNPLSTLLEDSGLGYRLRRGGQVISHLLYMDDLKLFASSNLQLMELLKVTETFSSAIRMEFGVDKCAGMHVKRGEIMESEGIQLPDSIHLRSLSSTETYRYLGMSEALGINNADMKQSLKERFFGRLKKVLNSLLSGGNKVRAFNGWVMPVLMYSFGILKWTQTELDALDRRVRTLLTANRMHHPRSSVMRLYIPRKCGGRGFLNAKTLHNREVCSLREYFLKTDVGMHRDVVAVDKGLTPLSMAKEDWHKPVIMTTDNRKEIWKGKELHGRFFRALHEPDVDFLASVAWLRFSDLFGETEGFVCAIMDEVILTNNYRRYIMKDGTVDVCRACHRPGESIRHIISGCSRLANGEYLHRHNQVARIIHQQLALKYNLVDLEVAYYKYVPDPVLENDHVTLYWDRSIITDRTIVANKPDIVVIDRLARRAMIVDITIPHDENLVKAEKEKQIKYLDLAHEIVAMWNVDSAIIVPIVVTANGLIAKSFDDHLSKLALRGWIKGQIQKAVLLDTARIVRKFLSLEP

SEQ ID NO: 28966 - protein, 1202 aa, Noctua pronuba
MLTRAAARRARLSPPDSSLSSASPLPESSPIVSAVTPAVAVASSSSDEYFSPPTSPTPVRRQGRGRPPTSLGLRGHPAPSRVPATGGCVQRMRWTHPINENVMRAYYGSTEGGTNLTAYRVRMLSLFQVLEPTVNVSAQRLSDQVRVIQRNHMLDDAVLDRLRSEVLSNRIVLTPSQTVVQASAIDITPPRSNPAVVEEDDRVATVSSQCNDRLRSALEDALREYRYTPTELRPRLPRLPMHKKNRALMCALDSQLKNLFENSEDLVDTHSILYCGAVAACRLAKLKFTNSDAATRPKPAVPAWQCRIERRINGARVLIGKLHCFREGNTRPRVMRFVRRAFSGTGISPQEYMSRVTERIDVLKQKVYAWANRIRRYKRRVDRYSQNRMFQSDERWVYRAWERPEQNMTDVCRPDDATTSSFWSSIWSVPVCHTEGDWMRAVERVCEPIPEMEPILITSLDVARSVRPLPNWKSPGPDGLHNFWLKWLSSSHTCLASQFQSSLESGALPQFLTTGVTHLLHKSGNPAEPKNYRPITCLSTVYKLLTSILRAKINTHIDKNSIMSASQNGCRNGSRGTKELLLIDMAISQQVRRSRKDLSTCWIDYKKAYDSVPHTWLMRVLELYKIDATLRTFLESCMGQWRTVLRYPGCRQIQGNDEPIWIKRGIFQGDSLSPLWFCLALNPLSTLLEDSGLGYRLRRGGQVISHLLYMDDLKLFAPNKLRLMELLKVTETFSSAIRMEFGVDKCAVMYVKRGEIMESEGIQLSDSIHLRSLSSSESYKYLGMSEALGINVTDMKQSLRERFFGRLKKVLNSLLSGGNKVRAFNGWVMPVLMYSFGILKWTQTELDALDRRVRTLLTANRMHHPRSSVMRLYIPRKCGGRGFLNAKTLHNRELCSLREYFLKAEVGMHRDVVAVDKGLTPLSMAKENWRKPVVLTTADRKEVWQGKELHGRFYRALHGPDVDFLASVSWLRFGDLFGETEGFVCAIMDEVMLTNNYRKYIMKDGTVDVCRACHRPGESIRHIISGCSRLANGEYLHRHNQVARIIHQQLALKYKLVESEVPYYKYVPDPVLEKDHVTLYWDRSIITDRTIVANKPDIVVIDRSARRVMIVDVTIPHDENLVKAEKEKQIKYLDLAHEVVDMWNVNSAIIVPIVVTANGLMAKSLDDHLSRLSLGGWIKGLIQKAVLLDTARIVRRFLSLEP

SEQ ID NO: 28967 - protein, 1207 aa, Ochropleura plecta
MLTRRRAQEQQALPSSPGSSLSSASQPPGRATRVSAVSPVTAVASSSSDEFFSPPSSPPPPPTRQRRGRGRPPAGLGSRGQQAPIRVPAAGGNVSRMRWTSFINANVMRAYYGSTEGGTNLTAYRVRMLSLFQDLEPTINVSAQRLSDQVRVIQRNHLLDDAALDRLRSEVLSNRVILTTPQTAVQASAIDVTQPRSNPAVVEEDDRVATVSSQCNDRLRSALEDALRDYRSTPAELRPRLPRLPMHKKNRALVCALDSQLKNLFESSEDLVDMHSILYCGAVAVCRLANVKLPNCDVATRPKPSVPAWQCRIERRIDEARALIGKLYCFREGNTRPRVMRFVRRAFSGTGISPQEYMSRTTERIDFLKQKVYAWANRIKRYKRRVDRYSQNHMFRSDERWVYRAWERPEQSVTDVCRPDDVATSSFWHSIWSVRVCHTEADWMRDVERVCETIPEMEPILITSLDIASAVRPLPNWKSPGPDGLHNFWLKWLSSSHTRLASQFQSCLESGSLPQFLTTGVTHLLYKSGSPAEPKNYRPITCLSTVYKLLTSILRAKINSHIVKNSIISASQNGCSNGSRGTKELLLIDMAISQQVRRSRKDLSTCWIDYKKAYDSVPHTWLKRVLELYKIDTTLRTFLESCMGQWRTVLRYPGCRQIQGNDEPVWIKRGIFQGDSLSPLWFCLALNPLSTLLEDSGLGYRLRRGGQVISHLFYMDDLKLFAPNKLRLMELLKVTETFSNAIRMEFGVDKCAVMYVKRGEIMESEGIHLSDSIHLRSLSSSESYKYLGMSEALGINVADMKQLLRERFFGRLKKVLKSLLSGGNKVRAFNSWVMPVLMYSFGILKWTQTELDALDRRVRTLLTANRMHHPRSSVMRLYIPRKCGGRGFLNAKTLHNREVCSLREYFLKTDVGMHRDVVAVDKGLTPLSMAKENWRKPVVLTTDYRKEVWQGKELHGRFYKALHGPDVDFLASVSWLRFGDLFGETEGFVCAIMDEVMLTNNYRKYIMKDGTVDVCRACHRPGESIRHIISGCSRLANGEYLHRHNQVARIIHQQLALKYNLVESEVPYYKYVPDPVLEKDHVTLYWDRSIITDRTIVANKPDIVVIDRSARRVMIIDVTIPHDENLVKAEKEKQLKYLDLAHEVVDMWNVNSAIIVPIVITANGLIAKSLDEHLSKLSLGGWIKGLIQKAVLLNTARIVRRFLSLEP

SEQ ID NO: 28968 - protein, 1207 aa, Ochropleura plecta
MLTRRRAQEQQALPSSPGSSLSSASQPPGRATRVSAVSPVAAVASSSSDEFFSPPSSPPPPPTRQRRGRGRPPAGLGSRGQQAPIRVPAAGGNVSRMRWTSFINANVMRAYYGSTEGGTNLTAYRVRMLSLFQDLEPTINVSAQRLSDQVLVIQRNHLLDDAALDRLRSEVLSNRVILTTPQTAVQASAIDVTQPRSNPAVVEEDDRVATVSSQCNDRLRSALEDALRDYRSTPAELRPRLPRLPMHKKNRALVCALDSQLKNLFESSEDLVDTHSILYCGAVAVCRLANVKFPNCDVATRPKPSVPAWQCRIERRIDEARALIGKLYCFREGNTRPRVMRFVRRAFSGTGISPQEYMSRTTERIDFLKQKVYAWANRIQRYKRRVDRYSQNRMFRSDERWVYRAWERPEQSVTDVCRPDDVATSSFWHSIWSVRVCHTEAGWMRDVERVCETIPEMEPILITSLDIASAVRPLPNWKSPGPDGLHNFWLKWLSSSHTRLASQFQSCLESGSLPQFLTTGVTHLLYKSGSPAEPKNYRPITCLSTVYKLLTSILRAKINSHIVKNSIISASQNGCRNGSRGTKELLLIDMAISQQVRRSRKDLSTCWIDYKKAYDSVPHTWLKRVLELYKIDTTLRTFLESCMGQWRTVLRYPGCRQIQGNDEPVWIKRGIFQGDSLSPLWFCLALNPLSTLLEDSGLGYRLRRGGQVISHLFYMDDLKLFAPNKLRLMELLKVTETFSNAIRMEFGVDKCAVMYVKRGEIMESEGIHLSDSIHLRSLSSSESYKYLGMSEALGINVADMKQLLRERFFGRLKKVLKSLLSGGNKVRAFNSWVMPVLMYSFGILKWTQTELDALDRRVRTLLTANRMHHPRSSVMRLYIPRKCGGRGFLNAKTLHNREVCSLREYFLKTDVGMHRDVVAVDKGLTPLSMAKENWRKPVVLTTDYRKEVWQGKELHGRFYKALHGPDVDFLASVSWLRFGDLFGETEGFVCAIMDEVMLTNNYRKYIMKDGTVDVCRACHRPGESIRHIISGCSRLANGEYLHRHNQVARIIHQQLALKYNLVESEVPYYKYVPDPVLEKDHVTLYWDRSIITDRTIVANKPDIVVIDRSARRVMIIDVTIPHDENLVKAEKEKQLKYLDLAHEVVDMWNVNSAIIVPIVITANGLIAKSLDEHLSKLSLGGWIKGLIQKAVLLDTARIVRRFLSLEP

SEQ ID NO: 28969 - protein, 1206 aa, Ochropleura plecta
MLTRRRAQEQQTLPPSPGSSLSSASQPPGRATRVSAVSPVAAVASSSSDEFFSPPSSPPPPTRQRRGRGRPPAGLGSRGQQVPIRVPAAGGNVSRMRWTSFINENVMRAYYGSTEGGTNLTAYRVRMLSLFQDLEPTINVSAQRLSDQVRVIQRNHLLDDAALDRLRSEVLGNRAILTTPQTAVQASAIDVTQPRSNPAVVEEDDRVATVSSQCNERLRSALEDALRDYRSTPTELRPRLPRLPMHKKNRALVCALDSQLKNLFESSENLVDTHSILYCGAVAVCRVANVKFQNSDVATRPKPSVPVWQCRIERRIDEARVLIGKLYCFREGNTRPRVMRFVRRAFSGTGISPQEYLSCTTERIDLLKQKVYAWTNRIRRYKRRVDRYSQNRMFRSDERWVYRAWERPEQSVTDVCRPDDVATSSFWHSIWSVPVCHTEADWMRDVERVCETIPEMEPILITSIDIASAVRPLPNWKSPGPDGLHNFWLKWLSSSHTHLASQFQSCLESGSLPQFLTTGITHLLYKSGSPAEPKNYRPITCLSTVYKLLTSILRAKINSHIDKNSIMSASQNGCRNGSRGTKELLLIDMAISQQVRRSRKDLSTCWIDYKKAYDSVPHTWLKRVLELYKIDATLRAFLESCMGQWRTVLRYPGCRQIQGNDEPVWIKRGIFQGDSLSPLWFCLALNPLSTLLEDSGLGYRLRRGGQVISHLLYMDDLKLFAPNKLRLMELLKVTETFSNAIRMEFGVDKCAVMYVKRGEIMESEGIQLSDSIHLRSLSSSESYKYLGMSEALGINVADMKQLLRERFFGRLKKVLKSLLSGGNKVRAFNSWVMPVLMYSFGILKWTQTELDALDRRVRTLLTGNRMHHPRSSVMRLYIPRKCGGRGFLNAKTLHNREVCSLREYFLKTDVGMHRDVVAVDKGLTPLSMAKENWRKPVVLTTDDRKVVWQGKELHGRFYKALHGPDVDFLASVSWLRFGDLFGETEGFVCAIMDEVMLTNNYRKYIMKDGTVDVCRACHRPGESIRHIISGCSRLANSEYLHRHNQVARVIHQQLALKYNLVESEVPYYKYVPDPVLEKDHITLYWDRSIITDRTIVANKPDIVVIDRSARRVMIIDVTIPHDENLVKAEKEKQLKYLDLAHEVVDMWNVNSAIIVPIVVTANGLIAKSLDEHLSKLSLGGWIKGLIQKAVLLDTARIVRRFLSLEP

SEQ ID NO: 28970 - protein, 1200 aa, Hecatera dysodea
MMLTRAATLRARHPPPGSPLSSASPPPDIESQVSPTAAVASSSSDEYFSPPTSPTPVRRQGRGRPPRSLGSRGQPAPSRVPAAGGCVQRMRWTQSMNENVMRAYYGSTEGGTNLTAYRVRMLSLFQDLEPAVNVSAQRLSDQVRVIQRSHRLDDAALERLRSEVLNNLIISTQTQTAVQAPVRGANTPQANNDSDEVDDRVVTVSSQYNNRLRSALEDALREYRSTPTELRPRLPRLPMHKKNRALVCALDSLLQNTFVSSENLVDTHSILYCGAVAACRLANVKFPSGDEAIRPKPAAPAWQCRIERRIDEARALIGKLYCFREGNTRPRVMRFVRRAFAGTGISPHEYTSRITERIDFLKQKVCAWANRIRRYKRRVDRYSQNRMFQSDERWVYRTWERPEQSVTDVCRPDDIATTTFWRSIWSVPVRHTEGDWMRDVERVCEAIPQMEKITITPTDIATAVRPLPNWKSPGPDGLHNFWLKWYSSSHAVLASQFQSSLESGSLPQFLTTGITHLLHKTGSPAEPKNYRPITCLSTVYKLLTSILRVKINEHIESNSIMSSSQNGCRKGSRGTKELLLIDMAISQQVRRSRKDLSTCWIDYKKAYDSVPHTWLMKVLELYKIDATLRTFLESCMRQWKTVLRYPGCRPIQGSDEPIWIKRGIFQGDSLSPLWFCLALNPLSTLLEDSGLGYRLRRGGQAISHLLYMDDLKLFAPNNLRLMELLKVTETFSSAIRMEFGVDKCAVMHVKKGEIMESEGIQLSDSIQVRSLSSTETYKYLGMSEALGINGADMKQSLKERFFGRLKKVLNSLLSGGNKVRAFNGWVMPVLMYSFGILKWTQAELDALDRRVRTLLTANRMHHPRSSVMRLYIPRKCGGRGFLNAKTLHNREMCSLREYFLETDVGMHRDVVAVDKGLTPLSMAKENWRKPVIHTTDDRKEVWKGKELHGRFYRALYGSDVDFSASVAWLRFGDLFGETEGFVCAIMDEVILTNNYRRHIMKDGTVDVCRACHRPGESIRHIISGCSRLANSEYLHRHNQVARIIHQQLALKYKLVDSEVPYYKYVPDPVLENGHVTLYWDRSIITDRTIVANKPDIVVIDRLARRTMIIDVSIPHDENLVKAEKEKQIKYLDLAHEVVDMWDVDSAVIVPIIVTANGLMAKSFDDHLSKLALRSWVKGLIQKAVLLDTARIVRRFLSLQP

SEQ ID NO: 28971 - protein, 962 aa, Hecatera dysodea
MHKKNRALVCALDSLLQNTFLSSENLVDTHSILYCGAVAACRLANVKFPSCDEAIRPKPAAPAWQCRIERRIDEARALIGKLYCFREGNTRPRVMRFVRRAFAGTGISPHEYTSRITERIDFLKQKVCAWANRIRRYKRRVDRYSQNRMFQSDERWVYRNWERPEQSVTDVYRPDDIATSTFWRSIWSVPVRHTEGDWMHGVERVCEAIPQMEKIIITSTDVATAVRPLPNWKSPGPDGLHNFWLKWYSSSHALLASQFQSSLESGSLPQFLTTGVTHLLHKTGSPAEPKNYRPITCLSTVYKLLTSILRVKINKHIESNSIMSSSQNGCRKGSRGTKELLLIDMAISQQVRRSRKDLSTCWIDYKKAYDSVPHTWLMKVLELYKIDTTLRTFLESCMRQWKTVLRYPGCRPIQGNDEPVWIKRGIFQGDSLSPLWFCLALNPLSTLLEDSGLGYRLRRGGQAISHLLYMDDLKLFAHNKLRLMELLKVTETFSSAIRMEFGVDKCAVMHVKKGEIVESEGVQLSDSIQVRSLSSTETYKYLGMSEALGINGADMKQSLKERFFGRLKKVLNSLLSGGNKVRAFNGWVMPVLMYSFGILKWTQTELDALDRRVRTLLTANRMHHPRSSVMRLYIPRKCGGRGFLNAKTLHNREMCSLREYFLKADVGMHRDVVAVDKGLTPLSMAKENWRKPVILTTDDRKEVWRGKELHGRFYRALYGSDVDFSASVAWLRFGDLFGETEGFVCAIMDEVILTNNYRRHIMKDGTVDVCRACHCPGESIRHIISGCSRLANGEYLHRHNQVARIIHQQLALKYKLVDSEVPYYKYVPDPVLENDHVTLYWDRSIITDRTIVANKPDIVVIDRLARRTMIIDVTIPHDENLVKAEKEKHIKYLDLAHEVVDMWNVDSAVIVPIVVTANGLMAKSFDDHLSKLALHGWLKGLIQKAVLLDTARIVRRFLSLEP

SEQ ID NO: 28972 - protein, 1200 aa, Hecatera dysodea
MMLTRAATLRARHPPPGSPLSSASPPPDIESQVSPTAAVASSSSDEYFSPPTSPTPVRRQGRGRPPRSLGSRGQPAPSRVPAAGGCVQRMRWTQSMNENVMRAYYGSTEGGTNLTACRVRMLSLFQDLEPAVNVSAQRLSDQVRVIQRSHRLDDAALERLRSEVLNNLIISTQTQTAVQAPVRGANTPQANNDSDEVDDRVVTVSSQYNNRLRSALEDALREYRSTPTELRPRLPRLPMHKKNRALVCALDSLLQNTFVSSENLVDTHSILYCGAVAACRLANVKFPSGDEAIRPKPAAPAWQCRIERRIDEARALIGKLYCFREGNTRPRVMRFVRRAFAGTGISPHEYTSRITERIDFLKQKVCAWANRIRRYKRRVDRYSQNRMFQSDERWVYRTWERPEQSVTDVCRPDDIATTTFWRSIWSVPVRHTEGDWMRDVERMCEAIPQMEKITITPTDIATAVRPLPNWKSPGPDGLHNFWLKWYSSSHAVLASQFQSSLESGSLPQFLTTGITHLLHKTGSPAEPKNYRPITCLSTVYKLLTSILRVKINEHIESNSIMSSSQNGCRKGSRGTKELLLIDMAISQQVRRSRKDLSTCWIDYMKAYDSVPHTWLMKVLELYKIDATLRTFLESCMRQWKTVLRYPGCRPIQGSDEPIWIKRGIFQGDSLSPLWFCLALNPLSTLLEDSGLGYRLRRGGQAISHLLYMDDLKLFAPNNLRLMELLKVTETFSSAIRMEFGVDKCAVMHVKKGEIMESEGIQLSDSIQVRSLSSTETYKYLGMSEALGINGADMKQSLKERFFGRLKKVLNSLLSGGNKVRAFNGWVMPVLMYSFGILKWTQTELDALDRRVRTLLTANRMHHPRSSVMRLYIPRKCGGRGFLNAKTLHNREMCSLREYFLETDVDMHRDVVAVDKGLNPLSMAKENWRKPVIHTTDDRKEVWKGKELHGRFYRALYGSDVDFSASVAWLRFGDLFGETEGFVCAIMDEVILTNNYRRHIMKDGTVDVCRACHRPGESIRHIISGCSRLANSEYLHRHNQVARIIHQQLALKYKLVDFEVPYYKYVPDPVLENGHVTLYWDRSIITDRTIVANKPDIVVIDRLARRTMIIDVSIPHDENLVKAEKEKQIKYLDLAHEVVDMWDVDSAVIVPIIVTANGLMAKSFDDHLSKLALRSWVKGLIQKAVLLDTARIVRRFLSLQP

SEQ ID NO: 28973 - protein, 1199 aa, Hecatera dysodea
MLTRAATLRARHPPPDSPLSSASPPPDIESQVSPAAAVASSSSDEYFSPPTSPPPVRRQGRGRPPRGLGPRGQPAPSRVPATGGCVQRMRWTQSMNENVMRAYYGSTEGGTNLTAYRLRMLSLFQDLEPTVNVSAQRLSDQVRVIQRSHRLDDATLERLRSEVLNNLIISTQTQTAVQAPVSGANTPQANNDSDEVDDRVVTVSSQYNNRLRSALEDALREYRSTPTELRPRLPRLPMHKKNRALVCALDSLLQNTFVSSENLVDTHSILYCGAVAACRLANVKFPSGDEAIRPKPAAPAWQCRIERRIDEARALIGKLYCFREGNTRPRVMRFVRRAFAGTGISPHEYTSRITERIDFLKQKVCAWANRIRRYKRRADRYSQNRMFQSDERWVYRTWERPEQSVTDVCRPDDIATTTFWRSIWSVPVRHTEGDWMRDVERVCEAIPQMEKITITPTDIATAVRPLPNWKSPGPDGLHNFWLKWYSSSHAVLASQFQSSLESGSLPQFLTTGITHLLHKTGSPAEPKNYRPITCLSTVYKLLTSILRVKINEHIESNSIMSSSQNGCRKGSRGTKELLLIDMAISQQVRRSRKDLSTCWIDYKKAYDSVPHTWLMKVLELYKIDATLRTFLESCMRQWKMVLRYPGCRPIQGSDEPIWIKRGIFQGDSLSPLWFCLALNPLSTLLEDSGLGYRLRRGGQAISHLLYMDDLKLFAPNNLRLMELLKVTETFSSAIRMEFGVDKCAVMHVKKGEIMESEGIQLSDSIQVGSLSSTETYKYLGMSEALGINGADMKQSLKERFFGRLKKVLNSLLSGGNKVRAFNGWVMPVLMYSFGILKWTQTELDALDRRVRTLLTANRMHHPRSSVMRLYIPRKCGGRGFLNAKTLHNREMCSLREYFLETDVGMHRDVVAVDKGLTPLSMAKENWRKPVIHTTDDRKEVWKGKELHGRFYRALYGSDVDFSASVAWLRFGDLFGETEGFVCAIMDEVILTNNYRRHIMKDGTVDVCRACHRPGESIRHIISGCSRLANSEYLHRHNQVARIIHQQLALKYKLVNSEVPYYKYVPDPVLENDHVTLYWDRSIITDRTIVANKPDIVVIDRLARRTMIIDVSIPHDENLVKAEKEKQIKYLDLAHEVVDMWDVDSAVIVPIIVTANGLMAKSFDDHLSKLALRSWVKGLIQKAVLLDTARIVRRFLSLQP

SEQ ID NO: 28974 - protein, 1200 aa, Mythimna impura
MLTRAAARRARHPPPGSPLSSASPPPDLESPVSPVAAVASSSSDEYFSPPTSPTPVRRPGRGRPPRSLGSRGQPAPSRVPAAGGCVQRMRWTQSMNENVMRAYYGSTEGGTNLTAYRVRMLSLFQELEPTVNVTTQRLSDQVRVIQRNHRLDDAALDRLRSEVLSNRIISTPIQTQTAAPRATDAILPQSNHVDDEADDRVVTVSSQCNDRLRSALEDALREYRSTPIDLRPRLPRLPMHKKNRALVCALDSLLENVFESSVNLADTHSILYCGAIAACRLANVKLPSCDGATRPKSVAPAWQCRIEKRIDGARALIGKLYCFREGNTRPRVMRYVRRAFSGTGISPPEYLSRVTERIDFLKQKVCAWANRIRRYKRRVDRYSQNRMFQSDERWVYRAWERPEQNVTDVTRPDAVATNAFWRNIWSVPVCHTEDGWMREVERVCEAIPEMEKVIISPTDVARAVRPLPNWKSPGPDGLQNFWLKWYSSSHALLASQFQSSLESGSLPQFLTTGVTHLLHKTGSTAEPKNYRPITCLSTVYKLLTSILRTKINQHIDNNSIMSASQNGCRNGSRGTKELLLIDMTISQQVRRSRKDLSTCWIDYKKAYDSVPHTWLMRVLELYKIDATLRTFLESCMGQWNTVLRYPGCRSIRRDDEPIWIKRGIFQGDSLSPLWFCLALNPLSTLLEESGLGYRLRRDGQVLSHLLYMDDLKLIAPNKLRLMELLKVTETFSNAIRMEFGVDKCAVMHVKRGEIMESEGIQLSDSIHLRSLSSTETYKYLGMSEALGINVADMKQSLKERFFGRLKKVLNSLLSGGNKVRAFNGWVMPVLMYSFGILKWTQTELDALDRRLRTLLTANRMHHPRSSVMRLYIPRKCGGRGFLNTKTLHNREVCSLREYFHKTDVGMHRDVVAVDKGLTPLSMAKENWRKPVVLTTDDRKEVWKSKELHGRFYRALHESDVDFAASVAWLRFSNLFGETEGFICAIMDEVILTNNYRRYIMKDGTIDVCRACHRPGESIRHIISGCSRLANGEYLHRHNQVARIIHQQLALKYNLVYSEVPYYRYVPDPVLENDHVTLYWDRSIITDRTIVANKPDIVVIDRLARRVMIVDVTIPHDENLVKAEKEKQIKYLDLAHEVVDMWNVDSAVIVPIVVTANGLIAKSFDDHLSKLSLRGWIKGLIQKAVLLDTARIVRRFLSLEP

SEQ ID NO: 28975 - protein, 1081 aa, Mythimna impura
MLSLFQELEPTVNVTAQRLSDQVRVIQRNHRLDGAALDRLRSEVLSNRIISTPSQTQTEAPQATDAILPRSNHIDDEADDRVVTVSSQCNDRLRSALEDALREYRSTPIALRPRLPRLPMHKKNRALVCALDSLLENVFESSVNLADTHSILYCGAIAACRLANVKLPSCDGATRPKPAAPAWQCRIERRIDEARALIGKLYCFREGNTRPRVMRYVRRAFSGTEISPREYLSRVTERIDFLKQKVCAWANRIRRYKRRVDRYSQNRMFQSDERWVYRAWERPEQNVTDVIRPDAVAMNTFWRNIWSVPVCHTEDGWMREVERVCEAIPEMEKIVISPIDVARAVRPLPNWKSPGPDGLQNFWLKWYSSSHALLASQFQSSLESGSLPQFLTTGVTHLLHKTGSTAEPKNYRPITCLSTVYKLLTSILRTKINKHIDSNSIMSASQNGCRNGSRGTKELLLIDMAISQQVRRSRKDMSTCWIDYKKAYDSVPHTWLMRVLELYKIDVTLRTFLESCMGQWNTVLRYPGCRSIRRDDEPIWIKRGIFQGDSLSPLWFCLALNPLSTLLEESGLGYRLRRGGQVLSHLLYMDDLKLIAPNKLRLMELLKVTETFSSAIRMEFGVDKCAVMHVKRGEIMESEGIQLSDSIHFRSLSSTETYKYLGMSEALGINGADMKQSLKERFFGRLKKVLNSLLSGGNKVRAFNGWVMPVLMYSFGILKWTQTELDAVDRRVRTLLTANRMHHPRSSVMRLYIPRKCGGRGFLNAKTLHNREVCSLREYFHKTDVGMHRDVVAVDKGLTPLSMAKENWRKPVVLTTDDRKEVWKSKELHGRFYRALHESDIDFAASVAWLRFSNLFGETEGFICAIMDEVILTNNYRRYIMKDGTVDVCRACHRPGESIRHIISGCSRLANGEYLHRHNQVARIIHQQLALKYNLVDYEVPYYRYVPDPVLENDHVTLYWDRSIITDRTIVANKPDIVVIDRLARRVMIVDVTIPHDENLVKAEKEKQIKYLDLAHEVVDMWNVDSAVIVPIVVTANGLIAKSFDDHLSKLSLRGWIKGLIQKAVLLDTARIVRRFLSLEP

SEQ ID NO: 28976 - protein, 1202 aa, Mythimna impura
MIMLTRAATRRARPSPLGSSLSSASPPPVLGSPVSPTAAVASSSSDEYFSPPTSPTPVRRPGRGRPPKSLGPRGQPAPSRVPATGGCVQRMKWTQSMNENVMRAYYGSTEGGTNLTAYRVRMLSLFQELEPTVNVTAQRLSDQVRVIQRNHRLDGAALDRLRSEVLSNRIISTPSQTQTEAPQATDAILPRSNHIDDEADDRVVTVSSQCNDRLRSALEDALREYRSTPIALRPRLHWLPMHKKNRALVCALDSLLENVFESSVNLADTHSILYCGAIAACRLANVKLPSCDGATRPKPAAPAWQCRIERRIDEARALIGKLYCFREGNTRPRVMRYVRRAFSGTEISPREYLSRVTERIDFLKQKVCAWANRIRRYKRRVDRYSQNRMFQSDERWVYRAWERPEQNVTDVTRPDAVATNTFWRNIWSVPVCHTEDGWMREVERVCEAIPEMEKIVISPIDVARAVRPLPNWKSPGPDGLQNFWLKWYSSSHALLASQFQSSLESGSLPQFLTTGVTHLLHKTGSTAEPKNYRPITCLSTVYKLLTSILRTKINKHIDSNSIMSASQNGCRNGSRGTKELLLIDMAISQQVRRSRKDLSTCWIDYKKAYDSVPHTWLMRVLELYKIDATLRTFLESCMGQWNTVLRYPGCRSIRRDDEPIWIKRGIFQGDSLSPLWFCLALNPLSTLLEESGLGYRLRRGGQVLSHLLYMDDLKLIAPNKLRLMELLKVTETFSSAIRMEFGVDKCAVMHVKRGEIMESEGIQLSDSIHFRSLSSTETYKYLGMSEALGINVADMKQSLKERFFGRLKKVLNSLLSGGNKVRAFNGWVMPVLMYSFGILKWTQTELDAVDRRVRTLLTANRMHHPRSSVMRLYIPRKFGGRGFLNAKTLHNREVCSLREYFHKTDVGMHRDVVAVDKGLTPLSMAKENWRKPVVLTTDDRKEVWKSKELHGRFYRALHESDIDFAASVAWLRFSNLFGETEGFICAIMDEVILTNNYRRYIMKDGTVDVCRACHRPGESIRHIISGCSRLANGEYLHRHNQVARIIHQQLALKYNLVDYEVPYYRYVPDPVLENDHVTLYWDRSIITDRTIVANKPDIVVIDRLARRVMIVDVTIPHDENLVKAEKEKQIKYLDLAHEVVDMWNVDSAVIVPIVVTANGLIAKSFDDHLSKLSLRGWIKGLIQKAVLLDTARIVRRFLSLEP

SEQ ID NO: 28977 - protein, 1199 aa, Phlogophora meticulosa
MLTRAAKRRARPPSPDSPLSSASPPPDLGSPVTPTVAAASSSSDEYFSPPTSPTPVRRQGRGRPPKSLGSRGQPAPSQVPATGGCVQRMRWTQSMNENVMRAYYGSTEGGTNLTAYRARMLSLFQVLEPTVNVSAQRLSDQVRVIQRNHRLDDTALDRLRSEVLNNHIVLTSTQTAVQASIINATPSPSNHVSEEADDRVVTVSSQCNEKLRSALEDALREYRSTPTELRPRLPRLPMHKKNRALVCNLDSLLKDLFESSGDLVDTHSILYCAAVAACRLANVKFPNNDVAIRPKPAVPAWQSRIERRIDGARVLIGKLYCFREGNTRPRVMRFVRRAFAGTGISPREYMSRIVERIDFLKQKVYAWANRIRRYKRRVDRYSQNRMFQSDERWVYRAWERPEQDVADVHRPDDTTTNTFWRNIWSVPVCHTEAHWIRDVERVCETITEMEKIIITPLDVATAVRPLPNWKAPGPDGLHNFWLKWLGSSHTRLASQFQSCLESGSLPQFLTTGITHLLYKSGSTTEPKNYRPITCLSTVYKLLTSILRAKITEHIVGNSIISASQNGCRNGSRGTKELLLIDMAISQQVRRSHKDLSTCWIDYKKAYDSVPHAWLMRVLELYKIDATLRTFLESCMGQWRTVLRYPGCRQIQGNDEPIWIKRGIFQGDSLSPLWFCLALNPLSTLLEDSGLGYRLRRGGQVISHLLYMDDLKLFASNNLQLMELLKITESFSSTIRMEFGVDKCAVMHVKRGEIVESEGIQLPDSIQLRSLSSSDNYKYLGMSEALGINVTDMKQSLKERFFGRLKKVLNSLLSGGNKVRAFNGWVMPVLMYSFGILKWTQTELDALDRRVRTLLTANRMHHPRSSVMRLYIPRKCGGRGFLNAKTLYNREVCNLRDYFLKTEVGMHRDVVAVDKGLTPLSMAKENWRKPVVLTTDDRKQVWQSKELHGRFYRALHGPDVDFIASVSWLRFGDLFGETEGFVCAIMDEVILTNNYRKHIMKDGTVDMCRACHRPGESIRHIISGCSRLANGEYLHRHNQVARIIHQQLALRYKLVESEVPYYKYVPDPVLEDDHVTLYWDRSIITDRTIVANKPDIVVIDRLARRAMIVDVTIPHDENLVKAEKEKQIKYLDLAHEVVDMWNVDSAVIVPIVVTANGLLAKSLDDHLSRLSLHGWIKGLIQKAVLLDTARIVRRFLSLQP

SEQ ID NO: 28978 - protein, 1199 aa, Phlogophora meticulosa
MITRAATRRARPPSPDSPLSSASPPPDLGSPVTPAVAAASSSSDEYFSPPTSPTPVRRQGRGRPPKSLGSRGQPAPSQVPATGGCVQRMRWTQSMNENVMRAYYGSTEGGTNLTAYRVRMLSLFQGFEPTVNVSAQRLSDQVRVIQRNHRLDDAALDRLRSEMLSNHIVLTSTQTAVQAPAFNAILPRSNHVSNEADDRVDTVCSRYNDRLRSALEDALREYRSTPTELRPRLPRLPMHRKNRALVCALDSLLKNFFESSGDLVDTHSILYCAAVAACRLANVKFPKNDLAIRPQPAVPAWKSRIERRIDGARVLIGKLYCFREGNTRPRVMRFVKRAFSGTGISPREYMSRIVERIDFLKQKVCAWANRIRRYKRRVDRYSQNRMFQSDERWVYRAWERPEQDVAGEHRPDDVATNAFWRSIWSVPAHHVEAHWMSDYESVCETIPEMEKIIITPEDVATAVRPVPNWKSPGPDGLHNFWLKWLSSSHTRLASQFQSCLESGSLPQFLTTGITHLLYKSGSTTEPKNYRPITCLSTVYKLLTSILRAKITEHIVGNSIMSASQNGCRNGSRGTKELLLIDMAISQQVRRSRKDLSTCWIDYKKAYDSVPHAWLTRVLELYKIDATLRTFLASCMGQWKTVLRYPGCRQIQGNAEPIWIKRGIFQGDSLSPLWFCLALNPLSTLLEDSGLGYRLKRGGQVISHLLYMDDLKLFAPNNLRLMELLKITESFSSAIRMEFGVDKCAVMHVKRGEIVESEGIQLSDSIHLRSLSSSENYKYLGMSEALGINATDMKQSLKERFFGRLKKVLNCLLSGGNKVRAFNGWVMPVLMYSFGILKWTQTELDALDRRVRTLLTANRMHHPRSSVMRLYIPRKCGGRGFLNAKTLHNREVCNLRDYFLKTEVGMHRDVVAVDKGLTPLSMAKENWRKPVVLTTDDRKQVWQSKELHGRFYRALHGPDVDFLASVSWLRFGDLFGETEGFVCAIMDEVILTNNYRKHIMKDGTVDMCRACHRPGESIRHIISGCSRLANGEYLHRHNQVARIIHQQLALRYKLVESEVPYYKYVPDPVLEDDHVTLYWDRSIITDRTIVANKPDIVVIDRLARRAMIVDVTIPHDENLVKAEKEKQIKYLDLAHEVVDMWNVDSAVIVPIVVTANGLLAKSLDDHLSRLSLHGWIKGLIQKAVLLDTARIVRRFLSLQP

SEQ ID NO: 28979 - protein, 1199 aa, Phlogophora meticulosa
MLTRAAKRRARPPSPDSPLSSASPPPDLGSPVTPTVAAASSSSDEYFSPPTSPTPVRRQGRGRPPKSLGSRGQPAPSQVPATGGCVQRMRWTQSMNENVMRAYYGSTEGGTNLTAYRARMLSLFQVLEPTVNVSAQRLSDQVRVIQRNHRLDDTALDRLRSEVLNNHIVLTSTQTAVQASIINATPSPSNHVSEEADDRVVTVSSQCNEKLRSALEDALREYRSTPTELRPRLPRLPMHKKNRALVCNLDSLLKDLFESSGDLVDTHSILYCAAVAACRLANVKFPNNDVAIRPKPAVPAWQSRIERRIDGARVLIGKLYCFREGNTRPRVMRFVRRAFAGTGISPREYMSRIVERIDFLKQKVYAWANRIRRYKRRVDRYSQNRMFQSDERWVYRAWERPEQDVADVHRPDDTTTNTFWRNIWSVPVCHTEAHWIRDVERVCETITEMEKIIITPLDVATAVRPLPNWKAPGPDGLHNFWLKWLGSSHTRLASQFQSCLESGSLPQFLTTGITHLLYKSGSTTEPKNYRPITCLSTVYKLLTSILRAKITEHIVGNSIMSASQNGCRNGSRGTKELLLIDMAISQQVRRSHKDLSTCWIDYKKAYDSVPHAWLMRVLELYKIDATLRTFLESCMGQWRTVLRYPGCRQIQGNDEPIWIKRGIFQGDSLSPLWFCLALNPLSTLLEDSGLGYRLRRGGQVISHLLYMDDLKLFASNNLQLMELLKITESFSSTIRMEFGVDKCAVMHVKRGEIVESEGIQLPDSIQLRSLSSSDNYKYLGMSEALGINVTDMKQSLKERFFGRLKKVLNSLLSGGNKVRAFNGWVMPVLMYSFGILKWTQTELDALDRRVRTLLTANRMHHPRSSVIRLYIPRKCGGRGFLNAKTLYNREVCNLRDYFLKTEVGMHRDVVAVDKGLTPLSMAKENWRKPVVLTTDDRKQVWQSKELHGRFYRALHGPDVDFIASVSWLRFGDLFGETEGFVCAIMDEVILTNNYRKHIMKDGTVDMCRACHRPGESIRHIISGCSRLANGEYLHRHNQVARIIHQQLALRYKLVESEVPYYKYVPDPVLEDDHVTLYWDRSIITDRTIVANKPDIVVIDRLARRAMIVDVTIPHDENLVKAEKEKQIKYLDLAHEVVDMWNVDSAVIVPIVVTANGLLAKSLDDHLSRLSLHGWIKGLIQKAVLLDTARIVRRFLSLQP

SEQ ID NO: 28980 - protein, 1080 aa, Xestia xanthographa
MLSLFQDLEPTVNVSAQRLSDQVRVIQRNHRLDDAALDRLRSEVLSNLFILTPTQTAVQVSDINVTLPRSIPAVVEEDDRVATVSSQCNDRLRSALEDALREYRSTPTELRPRLPRLPMHKKNRALVCALDSQLKHIFESSENLVDTHTILFCGAVAACRLANVKFPNCDVATRPKPAVPAWQRRIERRIDEARVLIGKLYCFREGNTRPRVMRFVRRAFSGTEISPQEYMSRATERIDFLKQKVYAWANRIRRYKQRVDRYSQNRMFQSDERWVYRAWERPEQNMTDVCRPDDATTSSFWRSIWSVPVCHTEADWMRDVERVCEPIPEMEPIFITPLDVARAVRPLPNWKSPGPDGLHNFWLKWFSSSHTCLASQFQSSLESGSLPQFLTTGVTHLLHKSGSPAEPKNYRPITCLSTIYKLLTSILRMKINTHIDKNSIMSASQNGCRNGSRGTKELLLIDMAISQQVRRSRKDLSTCWIDYKKAFDSVPHTWLMRVLELYKVDTTLRTFLESCMGQWKTVLRYPGCRQIQGSDEPVWIKRGIFQGDSLSPLWFCLALNPLSTLLENSGLGCRLRKDGQVISHLLYMDDLKLFAPNKLRLMELLKVTETFSSAIRMEFGVDKCAVMYVKRGEIMESEGLQLSDSINLKSLSSSETYKYLGMSEALGINVTDMKQSLRERFFGRLRKVLNSLLSGGNKVRAFNGWVMPVLMYSFGILKWTQTELDALDRRVRTLLTESRMHHPRSSVMRLYIPRKCGGRGFLNAKTLHNREVCSLREYFLKAEVGMHRDVVAVDKGLTPLSMAKENWHRPEVLTTDDRKEVWQGKELHGRFYRALHGPDVDFLASVSWLRFGDLFGETEGFVCAIMDEVMLTNNYRKYIMKDGTVDVCRACHLPGESIRHIISGCSRLANGEYLHRHNQVARIIHQQLALKYKLVESEVPYYKYVPDPVLENDHVTLYRDRSIITDRTIVANKPDIVMMDRSARRVMIIDVTIPHDENLVKAEKEKQIKYLDLAHEVRGMWNMNSVIIVPIVVTANGLIAKSFDDHLSKLSLGGWIKGLIQKAVLLDTARIVRRFLSLQP

SEQ ID NO: 28981 - protein, 1201 aa, Xestia xanthographa
MMLTRAAAARRARLPTPDSSLSSASPPPDPGSPVSPVAAVASSSSDEYFSPPTSPPPVRRAGRGRPPKGLGLRGQQAPSRVPATSGCVQRMKWTQAMNENVMRAYYGSTEGGTNLTAYRVRMLSLFQDLEPTVNVSAQRLSDQVRVIQRNHRLDDAALDRLRSEVLSNLIIPTPTQTAVQVSAINVTLPRSNLAVVEEDDRVATVSSQCNDRLRSALEDALREYRSTPTELRPRLPRLPMHKKNRALVCALDSQLKNIFESSEDLVDTHSILFCGAVAACRLANVKFPNCDVAIRPKSAVPVWQRRIERRIDEARVLIGKLYCFREGNTRPRVMRFVRRAFSGTEVSPQEYMSRATERIDFLKQKVYAWANRIRRYKRRVDRYSQNRMFQSDERCVYRAWERPELNMTDVCRPDDAATSSFWRSIWSVPVCHTEADWMRDVERVCEPIPEMEPIFITPLDVARAVRPLPNWKSPGPDGLHNFWLKWFSSSHTCLASQFQSSLESGSLPQFLTTGVTHLLHKSGSPAEPKNYRPITCLSTIYKLLTSILRIKINTHIDKNSIMSAFQNGCRNGSRGTKELLLIDMAISQQVRRSRKDLSTCWIDYKKAYDSVPHTWLMRVLELYKVDTTLRTFLESCMGQWKTVLRYPGCRQIQGSDEPVWIKRGIFQGDSLSPLWFCLALNPLSTLLENSGLGCRLRKDGQVISHLLYMDDLKLFAPNKLRLMELLKVTETFSSAIRMEFGVDKCAVMYVKRGEIMESEGLQLSDSIHLKSLSSSETYKYLGMSEALGINVTDMKQSLRERFFGRLRKVLNSLLSGGNKVRAFNGWVMPVLMYSFGILKWTQTELDALDRRVRILLTESRMHHPRSSVMRLYIPRKCGGRGFLNAKTLHNREVCSLREYFLKAEVGMHRDVVAVDKGLTPLSMAKENWHRPEVLTTDDRKEVWQGKELHGRFYRALHGPDVDFLASVSWLRFGDLFGETEGFVCAIMDEVMLTNNYRKYIMKDGTVDVCRACHLPGESIRHIISGCSRLANGEYLHRHNQVARIIHQQLALKYKLVESEVPYYKYVPDPVLENDHVTLYWDRSIITDRTIVANKPDIVMMDRSAHRVMIIDVTIPHDENLVKAEKEKQIKYLDLAHEVRGMWNMNSVSIVPIVVTANGLIAKSFDDHLSKLSLGGWIKGLIQKAVLLDTARIVRRFLSLQP

SEQ ID NO: 28982 - protein, 1201 aa, Xestia xanthographa
MMLTRAAAARRAHLPTPDSSLSSASPPPDPGSPASPVAAVASSSSDEYFSPPTSPPPVRRAGRGRPPTSLGLRGQQAPSRVPATGGCVQRMKWTQSMNENVMRAYYGSTEGGTNLTAYRVRMLSLFQDLEPTVIVSAQRLSDQVRVIQRSHRLDDAALDRLRSEVLSNLIVLTPTQTAVQVSAIDATPPRLNPAVVEEDDGVATVSSQCNDRLRSALENALHEYRSTPTELRPRLPRLPMHKKNRALVCALDSQLKNIFESSENLVDTHSILFCGAVAACRIANVKFPNCDVATRPKPAVPAWQRRIERRIDGARVLIGKLYCFREGNTRPRVMRFVRRAFSGTEISPQEYMSRATERIDFLKQKVYAWANRIRRYKRRVDRYSQNRMFQSDERWVYRAWERPEQNMTDVCRPDDAATSSFWRSIWSVPVCHTEADWMRDVERVCKPIPEMEPIFITPLDVARAVRPLPNWKSPGPDGLHNFWLKWFSSSHTCLASQFQSSLESGSLPQFLTTGVTHLLHKSGSPAEPKNYRPITCLSTIYKLLTSILRVKINTHIDKNSIMSASQNGCRNGSRGTKELLLIDMAISQQVRRSRKDLSTCWIDYKKAYDSVPHTWLMRVLELYKVDTTLRTFLESCMGQWKTVLRYPGCRQIQGSDEPVWIKRGIFQGDSLSPLWFCLALNPLSTLLENSGLGCRLRKDGQVISHLLYMDDLKLFAPNKLRLMELLKVTETFSSAIRMEFGVDKCAVMYVKRGEIMESEGLQLSDSIHLKSLSSSETYKYLGMSEALGINVTDMKQSLRERFFGRLRKVLNSLLSGGNKVRAFNGWVMPVLMYSFGILKWTQTELDALDRRVRTLLTESRMHPPRSSVMGLYIPRKCGGRGFLNAKTLHNREVCSLREYFLKAEVGMHRDVVAVDKGLTPLSMAKENWHRPEVLTTDDRKEVWQGKELHGRFYRALHGPDVDFLASVSWLRFGDLFGETEGFVCAIMDEVMLTNNYRKYIMKDGTVDVCRACHLPGESIRHIISGCSRLANGEYLHRHNQVARIIHQQLALKYKLVESEVPYYKYVPDPVLEKDHVTLYWDRSIITDRTIVANKPDIVMIDRSARRVMIIDVTIPHDENLVKAEKEKQIKYLDLAHEVRDMWNMNSVIIMPIVVTANGLIAKSFDDHLSKLSLGGWIKGLIQKAVLLDTARIVRRFLSLQP

SEQ ID NO: 28983 - protein, 1201 aa, Xestia xanthographa
MMLTRAAAARRAHLPTPDSSLSSASPPPDPRSPVSPVAAVASSSSDEYFSPPTSPPPVRRAGRGRPPTSLGLRGRQAPSRVPATGGCVQRMKWTQSMNENVMRAYYGSTEGGTNLTAYRVRMVSLFQDLEPTVIVSAQRLSDQVRVIQRSHRLDDAALDRLRSEVLSNLIVLTPKQTAVQVSAIDATPPRLNPAVVEEDDGVATVSSQCNDRLRSALENALHEYRSTPTELRPRLPRLPMHKKNRALVCALDSQLKNIFESSENLVDTHSILFCGAVAACRIANVKFPNCDVATRPKPAVPAWQRRIERRIDGARVLIGKLYCFREGNTRPRVMRFVRRAFSGTEISPQEYMSRATERIDFLKQKVYASANRIRRYKRRVDRYSQNRMFQSDERWVYRAWERPEQNMTDVCRPDDAATSSFWRSIWSVPVCHTEADWMRDVERVCEPIPEMEPIFITPVDVARAVRPLPNWKSPGPDGLHNFWLKWFSSSHTCLASQFQSSLESGSLPQFLTTGVTHLLHKSGSPAEPKNYRPITCLSTIYKLLTSILRVKINTHIDKNSIMSASQNGCRNGSRGTKELLLIDMAISQQVRRSRKDLSTCWIDYKKAYDSVPHTWLMRVLELYKVDTTLRTFLESCMGQWKTVLRYPGCRQIQGSDEPVWIKRGIFQGDSLSPLWFCLALNPLSTLLENSGLGCRLRKDGQVISHLLYMDDLKLFAPNKLRLMELLKVTETFSSAIRMEFGVDKCAVMYVKRGEIMESEGLQLSDSIHLKSLSSSETYKYLGMSEALGINVTDMKQSLRERFFGRLRKVLNSLLSGGNKVRAFNGWVMPVLMYSFGILKWTQTELDALDRRVRTLLTESRMHHPRSSVMRLYIPRKCGGRGFLNAKTLHNREVCSLREYFLKAEVGMHRDVVAVDKGLTPLSMAKENWHRPEVLTTDDRKEVWQGKVLHGRFYRALHGPDVDFIASVSWLRFGDLFGETEGFVCAIMDEVMLTNNYRKYIMKDGTVDVCRACHLPGESIRHIISGCSRLANGEYLHRHNQVARIIHQQLALKYKLVESEVPYYKYVPDPVLENDHVTLYWDRSIITDRTIVANKPDIVMMDRSARRVMIIDVTIPHDENLVKAEKEKQIKYLDLAHEVRGMWNMNSVIIVPIVVSANGLIAKSFDDHLSKLSLGGWIKGLIQKAVLLDTARIVRRFLSLQP

SEQ ID NO: 28984 - protein, 1202 aa, Cosmia trapezina
MLTRSAARARPPPPDSSLSSASPPPVSSPTVSAVTTPAAVVASSSSDEYFSPPTSPIPVRRQGRGRPPKSLGLGGQPAPSRVPAAGGCVQRMRWTQSMNENVMRAYYGSTEGGTNLTAYRVRMLSLFQELEPTVNVSAQRLSDQVRVIQRNHRLDDAALDRLRSEILSDRIVSTQAQTAVQDSIIDPLPPRSNHVVEEEDDRVATVSSQSNDRLRSALEDAFREYRSTPTELRPRLPRLPMHKKNRALVCALDSHLKDFFESSEDLVDTHSILYCAAVAACRLANVKFPNCDGANRSKPAVPAWQCRIERRIDGARVLIGKLYCFREGNTRPRVMRFVRRAFSGTGISPPEYMSRVTERIDFLKQKVCAWASRIRRYKRRVDRYTQNRMFQSDERWVYRAWERPEQNVTDVCRPDDAATSAFWRSIWSVPVCHAEAGWMQDVERVCETIPEMETVLITPLDVARAVRPFPNWKSPGPDGLHNFWLKWLISSHTCLASQFQSSLESGSLPQFLTTGVTHLLHKSGSPVEPKNYRPITCLSTVYKLLTSILRAKINTHIASNSIISASQNGCRTGSRGTKELLLIDMAISQQVRRSRKDLSTCWIDYKKAYDSVPHTWLLKVLELYKIDATLRTFLESCMGQWRTVLRYPGCQQIRGSDEPVWIKRGIFQGDSLSPLWFCLALNPLSTLLEDSGLGYRLRRGGQVISHLLYMDDLKLFAPNELRLMELLKVTETFSGAIRMEFGVDKCAVMHVKRGEIMESEGIQLTDSIYLRSLSSSETYKYLGMSEALGINVADVKQSLKERFFGRLKKVLISLLSGGNKVRAFNGWVMPVLMYSFGILKWTQTELDALDRRVRTLLTANRMHHPRSSVMRLYIPRKCGGRGFLNAKTLHNREVCSLREYFLKADVGMHRDVVAVDKGLTPLSMAKENWRKPVLLTTDDRRKVWQSKELHGRFYRALHEPGVDFLASVSWLRFSDLFGETEGFVCAIMDEVILTNNYRRYIMKDGTVDVCRACHRPGESIRHIISGCSRLANGEYLHRHNQVARIIHQQLALKYKLVDSEVPYYKYVPDPVLENDHVTLYWDRSIITDRTIVANKPDIVVIDRLARRAMIVDVTIPHDGNLVKAEKEKQIKYLDLAHEVVDMWNVDSAVIVPIVVTANGLIADSLDQHLSRLSLGGWIKGQIQKAVLLDTARIVRRFLSLQP

SEQ ID NO: 28985 - protein, 1111 aa, Mamestra brassicae
MRWTQSMNENVMRAYYGSTEGGTNLTAYRVRMLSLFQDLEPTVNVSAQRLSDQVRVIQHNCRLDDAALERLRSEVLSNLIISTPTQTVVQAPASGAITPRPNNGSDEVDDRVVTVSSQCNDRLRSALEDALREYRLTPTELRPRLPRLPMHKKNRALVCALDSLLQNIFESSESLVDTHSILFCGAVAACRIANVKFPSCDEAIRPKPAAPAWQCRIERRIDEARALIGKLYCFREGNTRPRVMRFVRRAFSGTGISPREYTFRVTERIDFLKQKVCAWANRIRRYKRRVDRYSQNCMFQSDERWVYRAWERPEQSVTDVYRPDDVATSTFWRSIWSVPICHAEGGWMRDVERVCEAIPQMEKITITTLDIAKAVRPLPNWKSPGPDGLHNFWLKWYSSSHALLASQFQSSLESGSLPQFLTTGITHLLHKTGSPAEPKNYRPITCLSTVYKLLTSILRAKINEHIESNSIMSASQNGCRKGSRGTKELLLIDMAISQQVRRSRKDLSTCWIDYKKAYDSVPHTWLMKVLELYKIDATLRTFLESCMRQWKTVLRYPGCQPIQGSDEPVWIKRGIFQGDSLSPLWFCLALNPLSTLLEDSGLGYRLRRGGQAISHLLYMDDLKLFAPNNLRLMELLKVTETFSSAIRMEFGVDKCAVMHVKKGEIMESEGIQLSDSIQVRSLSSTESYKYLGMSEALGINGTDMKQSLRERFFGRLKKVLNSLLSGGNKVRAFNGWVMPVLMYTFGILKWTQTELDALDRRVRTLLTANRMHHPRSSVMRLYIPRKCGGRGFLNAKTLHNREMCSLREYFLKADVGMHRDVVAVDKGLTPLSMAKENWRKPVILTTDDRKEVWKGKELHGRFYRALYGSDVDFSASVAWLRFGDLFGETEGFVCAIMDEVILTNNYRKHIMKDGTVDVCRACHRPGESIRHIISGCSRLANGEYLHRHNQVARIIHQQLALKYKLVDSEVPYYKYVPDPVLENDHVTLYWDRSIITDRTIVANKPDIVVIDRLARRTMIIDVTIPHDENLVKAEKEKQIKYLDLAHEVVDMWNVDSAVIVPIVITANGLMAKSFDDHLSKLALRGWIKGLIQKAVLLDTARIVRRFLSLEP

SEQ ID NO: 28986 - protein, 1199 aa, Noctua fimbriata
MITRAAYRRARLTTPDSPLSSASPPPDPGSPVLPAAAVASSSSDEYFSPPTSPTPVRRQGRGRPPRSLGLRGHPAPSRVPAAGGCVQRMRWTHSINENVMRAYYGSTEGGTNLTAYRVRMLSLFQVLEPTVNVSAQRLSDQVRVIQRNHMLDDAVLDRLRSEVLSNRVILTPAQTAVQASVIDATPPRFNTAVVEEDDRVAVVSSQCNDRLRSALEDALREYRSTPTNFRPRLPRLPMHNKNRALVCALDSQLKNIFESSENLVDTHSILYCGAVAACRLANVKFPNCDVATRPKPAVPAWQCRIERRIDGARVLIGKLHCFREGNTRPRVMRFVRRAFSGTGISPQEYMSRVTERIDFLKQKVYAWANRIRRYKRRVDRYSQNRMFQSDERWVYRAWERPEQNMTDVCRPDDAATSSFWRSIWSVPVCHTETVWMRDVEQVCEPIPEMEPILITPLDVARAVRLLPNWKSPGPDGLHNFWLKWLSSSHTCLASQFQSSLESGSLPQFLTTGVTHLLHKSGSPAEPKNYRPITCLSTVYKLLTSILRAKINTHIDKNSIMSASQNGCRNGSRGTKELLLIDMAISQQVRRSRKDLSTCWIDYKKAYDSVPHTWLMRVLELYKIDATLRAFLESCMGQWRTVLRYPGCRQIQGNDEPVWIKRGIFQGDSLSPLWFCLAMNPLSTLLEDSGLGYRLRRGGQVISHLLYMDDLKLFAPNKLRLMELLKVTETFSSAIRMEFGVDKCAVMYVKQGEIMESEGIQLSDSIHLRTLSSTESYKYLGMSEALGINVTDMKQSLKERFFGRLNKVLHSLLSGGNKVRAFNGWVMPVLMYSFGVLKWTQTELDALDRRVRTLLTANRMHHPRSSVMRLYIPRKCGGRGFLNAKSLHNREMCSLREYFLKVEVGMHRDVVAVDKGLTPLSMAKENWRKPEVLTTDDRKEVWQGKELHGRFYRALHGPDVDFLASVSWLRFGDLFGETEGFVCAIMDEVILTNNYRKYIMKDGTVDVCRACHRPGESIRHIISGCSRLANGEYLHRHNQVARIIHQQLALKYKLVESEVPYYKYVPDPVLEKDHVTLYWDQSIITDRTIVANKPDIVVIDRSARRVMIVDVTIPHDENLVKAEKEKQIKYLDLAHEVVDMWNVNSAIIVPIVVTANGLIAKSLDDHLSKLSLGGWIKGLIQKAVLLDTARIVRRFLSLEP

SEQ ID NO: 28987 - protein, 1199 aa, Noctua fimbriata
MITRAAYRRARLTTPDSPLSSASPPPDPGSPVLPAAAVASSSSDEYFSPPTSPTPVRRQGRGRPPRSLGLRGHPAPSRVPAAGGCVQRMKWTHSINENVMRAYYGSTEGGTNLTAYRVRMLSLFQVLEPTVNVSAQRLSDQVRVIQRNHMLDDAVLDRLRSEVLSNRVILTPAQTAVQASVIDATPPRFNPAVVEEDDRVAVVSNQCNDRLRSALEDALREYRSTPTELRPRLPRLPMHNKNRTLVCALDSQLKNIFESSENLVDTHSILYCGAVAACRLANVKFPNCDVATRPKPAVPAWQYGIERRIDGARVLIGKLHCFREGNTRPRVMRFVRRAFSGTGISPQEYMSRVTERIDFLKQKVYAWANRIRRYKRRFDRYSQNRMFQSDERWVYRAWERPELNMTDVCRPDDAATSSFWRSIWSVPVCHTEADWMRDVERVCEPIPEMEPILITPLDIARAVRPLPNWKSPGPDGLHNFWLKWLSSSHTCLASQFQSSLESGSLPQFLTTGVTHLLHKSGSPAEPKNYRPITCLSTVYKLLTSILRAKINTHIDKNSIMSASQNGCRNGSRGTKELLLIDMAISQQVRRSRKDLSTCWIDYKKAYDSVPHTWLMRVLELYKIDATLRAFLESCMGQWRTVLRYPGCRQIQGNDEPVWIKRGIFQGDSLSPLWFCLALNPLGTLLEDSGLGYRLRRGGQVISHLLYMDDLKLFAPNKLQLMKLLKVTENFSSAIRMEFGVDKCAVMYVKQGEIMESEGIQLSDSIHLRTLSSTESYKYLGMSEALGINVTDMKQSLKERFFGRLNKVLHSLLSGGNKVRAFNGWVMPVLMYSFGVLKWTQTELDALDRRVRTLLTANRMHHPRSSVMRLYIPRKCGGRGFLNAKSLHNREMCSLREYFLKVEVGMHRDVVAVDKGLTPLSMAKENWRKPEVLTTDDRKEVWQGKELHGRFYRALHGPDVDFLASVSWLRFGDLFGETEGFVCAIMDEVMLTNNYRKYIMKDGTVDVCRACHRPGESIRHIISGCSRLANGEYLHRHNQVARIIHQQLALKYKLVESEVPYYKYVPDPVLEKDHVTLYWDQSIITDRTIVANKPDIVVIDRSARRVMIVDVTIPHDENLVKAEKEKQIKYLDLAHEVVDMWNVNSAIIVPIVVTANGLIAKSLDDHLSKLSLGGWIKGLIQKAVLLDTARIVRRFLSLEP

SEQ ID NO: 28988 - protein, 1199 aa, Noctua fimbriata
MITRAAYRRARLPPPDPSLSSASPPPESSPIVSAVTPAVAVASSSSDEYFSPPTSPTPVRRQGRGRPPRSLGLRGHPAPSRVPAAGGCVQRMRWTHSINENVMRAYYGSTEGGTNLTAYRVGMLSLFQVLEPTVNVSAQRLSDQVRVIQRNHMLDDAVLDRLRSEVLSNRIVLTPAQTAVQASVIDATPPRFNPAVVEEDDRVAVVSNQCNDRLRSALEDALREYRSTPTELRPRLPRLPMHNKNRALVCALDSQLENIFESSENLVDTHSILYCGAVAACRLANVKFSNCDVATRPKPAVPAWQRRIERRIDGARVLIGKLHCFREGNTRPRVMRFVRRTFSGTGISPQEYMSRVTERIDFLKQKVYAWANRIRRYKRRVDRYSQNRMFQSDERWVYRAWERPETDVCRPDDAATSSFWRSIWSVPVCHTEADWMRDVERVCEPIPEMEPILITPLDIARAVRPLPNWKSPGPDGLHNFWLKWLSSSHTCLASQFQSSLESGSLPQFLTTGVTHLLHKSGSPAEPKNYRPITCLSTVYKLLTSILRAKINTHIDKNSIMSASQNGCRNGSRGTKELLLIDMAISQQVRRSRKDLSTCWIDYKKAYDSVPHTWLMRVLELYKIDATLRAFLESCMGQWRTVLRYPGCRQIQGNDEPVWIKRGIFQGDSLSPLWFCLALNPLSTLLEDSGLGYRLRRGGQVISHLLYMDDLKLFAPNKLQLMELLKVTETFSSAIRMEFGVDKCAVMYVKRGEIMESEGIQLSDFIHLRSLSSSESYKYLGMSEALGINVTDMKQSLKERFFGRLNKVLHSLLSGGNKVRAFNGWVMPVLMYSFGVLKWTQTELDALDRRVRTLLTANRMHHPRSSVMRLYIPRKCGGRGFLNAKSLHNREMCSLREYFLKVEVGMHGDVVAVDKGLTPLSMAKENWRKPEVLTTDDRKEVWQGKELHGRFYRALHGPDVDFLASVSWLRFGDLFGETEGFVCAIMDEVMLTNNYRKYIMKDGTVDVCRACHRPGESIRHIISGCSRLANGEYLHRHNQVARIIHQQLALKYKLVESEVPYYKYVPDPVLEKNHVTLYWDQSIITDRTIVANKPDIVVIDRSARRVMIVDVTIPHDENLVKAEKEKQIKYLDLAHEVVDMWHVNSAIIVPIVVTANGLIAKSLDDHLSKLSLGGWIKGLIQKAVLLDTARIVRRFLSLEP

SEQ ID NO: 28989 - protein, 1202 aa, Noctua fimbriata
MITRAAYRRARLPPPDPSLSSASPPPESSPIVSAVTPAVAVASSSSDEYFSPPTSPTPVRRQGRGRPPRSLGLRGHPAPSRVPAAGGCVQRMRWTHSINENVMRAYYGSTEGGTNLTAYRVGMLSLFQVLEPTVNVSAQRLSDQVRVIQRNHMLDDAVLDRLRSEVLSNRIVLTPAQTAVQASVIDATPPRFNPAVVEEDDRVAVVSSQCNDRLRSALEDALREYRSTPTELRPRLPRLPMHNKNRALVCALDSQLKNLFESSENLVDTHSILYCGAIAACRLANVKFPNCDVATRPKPAVPAWQRRIERCIDGARVLIGKLHCFREGNTRPRVMRFVRRAFSGTGISPQEYMSRVTERIDFLKQKVYAWANRIRRYKRRVDRYSQNRMFQSDERWVYRAWERPELNMTDVCRPDDAATSSFWRSIWSVPVCHTEADWMRDVERVCEPIPEMEPILITPLDIARAVRPLPNWKSPGPDGLHNFWLKWLSSSHTCLASQFQSSLESGSLPQFLTTGVTHLLHKSGSPAEPKNYRPITCLSTVYKLLTSILRAKINTHIDKNSIMSASQNGCRNGSRGTKELLLIDMAISQQVRRSRKDLSTCWIDYKKAYDSVPHTWLMRVLELYKIDATLRAFLESCMGQWRTVLRYPGCRQIQGNDEPVWIKRGIFQGDSLSPLWFCLALNPLSTLLEDSGLGYRLRRGGQVISHLLYMDDLKLFAPNKLQLMELLKVTETFSSAIRMEFGVDKCAVMYVKRGEIMESEGIQLSDFIHLRSLSSSESYKYLGMSEALGINVTDMKQSLKERFFGRLNKVLHSLLSGGNKVRAFNGWVMPVLMYSFGVLKWTQTELDALDRRVRTLLTANRMHHPRSSVMRLYIPRKCGGRGFLNAKSLHNREMCSLREYFLKVEVGMHRDVVAVDKGLTPLSMAKENWRKPEVLTTDDRKEVWQGKELHGRFYRALHGPDVDFLASVSWLRFGDLFGETEGFVCAIMDEVMLTNNYRKYIMKDGTVDVCRACHRPGESIRHIISGCSRLANGEYLHRHNQVARIIHQQLALKYKLVESEVPYYKYVPDPVLEKNHVTLYWDQSIITDRTIVANKPDIVVIDRSARRVMIVDVTIPHDENLVKAEKEKQIKYLDLAHEVVDMWHVNSAIIVPIVVTANGLIAKSLDNHLSKLSLGGWIKGLIQKAVLLDTARIVRRFLSLEP

SEQ ID NO: 28990 - protein, 962 aa, Noctua fimbriata
MHNKNRALVCALDSQLENIFESSENLVDTHSILYCGAVAACRLANVKFPNCDVATRPKPAVPAWQRRIERRIDGARVLIGKLHCFREGNTRPRVMRFVRRAFSGTGISPQEYMSRVTERIDFLKQKVYAWANRIRRYKRRVDRYSQNRMFQSDERWVYRAWERPKLNMTDVCRPDDAATSSFWRSIWSVPVCHTEADWMRDVERVCEPIPEMEPILITRLDIARAVRPLPNWKSPGPDGLHNFWLKWLSSSHTCLASQFQSSLESGSLPQFLTTGVTHLLHKSGSPAEPKNYRPITCLSTVYKLLTSILKAKINTHIDKNSIMSASQNGCRSGSRGTKELLLIDMAISQQVRRSHKDLSTCWIDYKKAYDSVPHTWLMRVLELYKIDATLRAFLESCMGQWRTVLRYPGCGQIQGNDEPVWIKRGIFQGDSLSPLWFCLALNPLSTLLEDSGLGYRLRRGGQVISHLLYMDDLKLFAPNKLQLMELLKVTETFSSAIRMEFGVDKCAVMYVKQGEIMESEGIQLSDSIHLRTLSSTESYKYLGMSEALGINVTDMKQSLKERFFGRMNKVLHSLLSDGNKVRAFNGWVMPVLMYSFGVLKWTQTELDALDRRVRTLLTANRMHHPRSSVMRLYIPRKCGGRGFLNAKSLHNREMCSLREYFLKVEVGMHRDVVAVDKGLTPLSISKENWRKPEVLTTDDRKEVWQGKELHGRFYRALHGPDVDFLASVSWLRFGDLFGETEGFVCAIMDEVMLTNNYRKYIMKDGTVDMCRACHRPGESIRHIISGCSRLANGEYLHRHNQVARIIHQQLALKYKLVESEVPYYKYVPDPVLEKDHVTLYWDQSIITDRTIVANKPDIVVIDRSARRVMIVDVTIPHDENLVKAEKEKQIKYLDLAHEVVDMWNVNSAIIVPIVVTANGLIAKSLDDHLSKLSLGGWIKGLIQKAVLLDTARIVRRFLSLEP

SEQ ID NO: 28991 - protein, 1202 aa, Noctua fimbriata
MITRAAYRRARLPPPDPSLSSASPPPESSPIVSAVTPAVAVASSSSDEYFSPPTSPTSVRRQGRGRPPRSLGLRGHPAPSRVPAAGGCVQRMRWTHSINENVMRAYYGSTEGGTNLTAYRVGMLSLFQVLEPTVNVSAQRLSDQVRVIQRNHMLDDAVLDRLRSEVLSNRIVLTPAQTAVQASVIDATPPRFNPAVVEEDDRVAVVSSQCNDRLRSALEDALREYRSTPTELRPRLPRLPMHNKNRALVCALDSQLENIFESSENLVDTHSILYCGAVAACRLANVKFPNFDVATRPKPAVPAWQRRIERRIDEARVLIGKLHCFREGNTRPRVMRFVRRAFSGTGISPQEYMSRVTERIDFLKQKVYAWANRIRRYKRRVDRYSQNRMFQSDERWVYRAWERPELNMTDVCRPDDAATSSFWRSIWSVPVCHTEADWMRDVERVCEPIPEMEPILITRLDIARAVRPLPNWKSPGPDGLHNFWLKWLSSSHTCLASQFQSSLESGSLPQFLTTGVTHLLHKSGSPAEPKNYRPITCLSTVYKLLTSILRAKINTHIDKNSIMSASQNGCRSGSRGTKELLLIDMAISQQVRRSRKDLSTCWIDYKKAYDSVPHTWLMRVLELYKIDATLRAFLESCMGQWRTVLRYPGCGQIQGNDEPVWIKRGIFQGDSLSPLWFCLALNPLSTLLEDSGLGYRLRRGGQVISHLLYMDDLKLFAPNKLQLMELLKVTETFSSAIRMEFGVDKCAVMYVKQGEIMESEGIQLSDSIHLRTLSSTESYKYLGMSEALGINVTDMKQSLKERFFGRLNKVLHSLLSGGNKVRAFNGWVMPVLMYSFGVLKWTQTELDALDRRVRTLLTANRMHHPRSSVMRLYIPRKCGGRGFLNAKSLHNREMCSLREYFLKVEVGMHRDVVAVDKGLTPLSMAKENWRKPEVLTTDDRKEVWQGKELHGRFYRALHGPDVDFLASVSWLRFGDLFGETEGFVCAIMDEVMLTNNYRKYIMKDGTVDVCRACHRPGESIRHIISGCSRLANGEYLHRHNQVARIIHQQLALKYKLVESEVPYYKYVPDPVLEKDHVTLYWDQSIITDRTIVANKPDIVVIDRSARRVMIVDVTIPHDENLVKAEKEKQIKYLDLAHEVVDMWNVNSAIIVPIVVTANGLIAKSLDDHLSKLSLGGWIKGLIQKAVLLDTARIVRRFLSLEP

SEQ ID NO: 28992 - protein, 1202 aa, Noctua fimbriata
MITRAAYRRARLPPPDPSLSSASPPPESSPIVSAVTPAVAVASSSSDEYFSPPTSPTPVRRQGRGRPPRSLGLRGHPAPSRVPAAGGCVQRMRWTHSINENVMRAYYGSTEGGTNLTAYRVGMLSLFQVLEPTVNVSAQRLSDQVRVIQRNHMLDDAVLDRLRSEVLSNRIVLTPAQTAVQASVIDATPPRFNPAVVEEDDRVAVVSSQCNDRLRSALEDALREYRSTPTELRPRLPRLPMHNKNRALVCALDSQLENIFESSENLVDTHSILYCGAVAACRLANVKFPNCDVATRPKPAVPAWQRRIERRIDGARVLIGKLHCFREGNTRPRVMRFVRRAFSGTGISPQEYMSRVTERIDFLKQKVYAWANRIRRYKRRVDRYSQNRMFQSDERWVYRAWERPELNMTDVCRPDDAATSSFWRSIWSVPVCHTEADWMRDVERVCEPIPEMEPILITPLDIARAVRPLPNWKSPGPDGLHNFWLKWLSSSHTCLASQFQSSLESGSLPQFLTTGVTHLLHKSGSPAEPKNYRPITCLSTVYKLLTSILRAKINTHIDKNSIMSASQNGCRNGSRGTKELLLIDMAISQQVRRSRKDLSTCWIDYKKAYDSVPHTWLMRVLELYKIDATLRAFLESCMGQWRTVLRYPGCRQIQGNDEPVWIKRGIFQGDSLSPLWFCLALNPLSTLLEDSGLGYRLRRGGQVISHLLYMDDLKLFAPNKLQLMELLKVTETFSSAIRMEFGVDKCAVMYVKRGEIMESEGIQLSDSIHLRSLSSSESYKYLGMSEALGINVTDMKQSLKERFFGRLNKVLHSLLSGGNKVRAFNGWVMPVLMYSFGVLKWTQTELDALDRRVRTLLTANRMHHPRSSVMRLYIPRKCGGRGFLNAKSLHNREMCSLREYFLKVEVGMHRDVVAVDKGLTPLSMAKENWRKPEVLTTDDRKEVWQGKELHGRFYRALHGPDVDFLASVSWLRFGDLFGETEGFVCAIMDEVMLTNNYRKYIMKDGTVDVCRACHRPGESIRHIISGCSRLANGEYLHRHNQVARIIHQQLALKYKLVESEVPYYKYVPDPVLEKDHVTLYWDQSIITDRTIVANKPDIVVIDRSARRVMIVDVTIPHDENLVKAEKEKQIKYLDLAHEVVDMWHMNSAVIVPIVVTANGLIAKSLDDHLSKLSLGGWIKGLIQKAVLLDTARIVRRFLSLEP

SEQ ID NO: 28993 - protein, 1202 aa, Noctua fimbriata
MLTRAAARRARLPPPDPSLSSASPPPESSHIVSAVTPAVAVASSSSDEYFSPPTSPTPVRRQGRGRPPRSLGLRGHPAPSRVPAAGGCVQRMRWTHSINENVMRAYYGSTEGGTNLTAYRVGMLSLFQVLEPTVNVSAQRLSDQVRVIQRNHMLDDAVLDRLRSEVLSNRIVLTPAQTAVQASVIDATLPRFNPAVVEEDDRVAVVSSQCNDRLRSALEDALREYRSTPTELRPRLPRLPMHNKNRALVCALDSQLENIFESSENLVDTHSILYCGAVAACRLANVKFPNCDVATRPKPAVPAWQRRIERRIDGARVLIGKLHCFREGNTRPRVMRFVRRAFSGTGISPQEYMSRATERIDFLKQKVYAWANRIRRYKRRVDRYSQNRMFQSDERWVYRAWERPELNMTDVCRPDDAATSSFWRSIWSVPVCHTEADWMCDVERVCEPIPEMEPILITPLDIARAVRPLPNWKSPGPDGLHNFWLKWLSSSHTCLASQFQSSLESGSLPQFLTTGVTHLLHKSGSPAEPKNYRPITCLSTVYKLLTSILRAKINTHIDKNSIMSASQNGCRNGSRGTKELLLIDMAISQQVRRSRKDLSTCWIDYKKAYDSVPHTWLMRVLELYKIDATLRAFLESCMGQWRTVLRYPGCRQIQGNDEPVWIKRGIFQGDSLSPLWFCLALNPLSTLLEDSGLGYRLRRGGQVISHLLYMDDLKLFAPNELRLMELLKVTETFSSAIRMEFGVDKCAVMYVKQGEIMESEGIQLSDSIHLRTLSSTESYKYLGMSEALGINVTDMKQSLKERFFGRLNKVLHSLLSGGNKVRAFNGWVMPVLMYSFGVLKWTQTELDALDRRVRTLLTANRMHHPRSSVMRLYIPRKCGGRGFLNAKSLHNREMCSLREYFLKVEVGMHRDVVAVDKGLTPLSMAKENWRKPEVLTTDDRKEVWQGKELHGRFYRALHGPDVDFLASVSWLRFGDLFGETEGFVCAIMDEVMLTNNYRKYIMKDGTVDVCRACHRPGESIRHIISGCSRLANGEYLHRHNQVARIIHQQLALKYKLVESEVPYYKYVPDPVLEKDHVTLYWDQSIITDRTIVANKPDIVVIDRSARRVMIVDVTIPHDENLVKAEKEKQIKYLDLAHEVVDMWNVNSAIIVPIVVTANGLIAKSLDDHLSRLSLGGWIKGLIQKAVLLDTARIVRRFLSLEP

SEQ ID NO: 28994 - protein, 1111 aa, Noctua fimbriata
MRWTHSINENVMRAYYGSTEGGTNLTAYRVGMLSLFQVLEPTVNVSAQRLSDQVRVIQRNHMLDEAVLDRLRSEVLSNRIILTPAQTAVQASVVDATPPRFNPAVVEEDDRVAVVSSQCNDRLRSALEDALREYRSTPTELRPRLPRLPMHNKNRALVCALDSQLKNIFESSENLVDTHSILYCGAVAACRLANVKFPNCDVATRPKPAVPAWQRRIERRIDGARVLIGKLYCFREGNTRPRVMRFVRRAFLGTEISPQEYMSRVTERIDFLKQKVYAWANRIRRYKRRVDRYSQNRMFQSDERWVYRAWERPELNMTDVCRPDDAATCSFWRSIWSVPVCHTEADWMRDVERVCEPIPEMEPILITPLDIARAVRPLPNWKSPGPDGLHNFWLKWLSSSHTCLASQFQSSLESGSLPQFLTTGVTHLLHKSGSPAEPKNYRPITCLSTVYKLLTSILRVKINTHIDKNSIMSASQNGCRNGSRGTKELLLIDMAISQQVRRSRKDLSTCWIDYKKAYDSVPHTWLMRVLELYKIDATLRAFLESCMGQWRTVLRYPGCRQIQGNDEPVWIKRGIFQGDSLSPLWFCLALNPLSTLLEDSGLGYRLRRGGQVISHLLYMDDLKLFAPNKLQLMELLKVTETFSSAIRMEFGVDKCAVMYVKQGEIMESEGIQLSDSIHLRTLSSTESYKYLGMSEALGINVTDMKQSLKERFFGRLNKVLHSLLSGGNKVRAFNGWVMPVLMYSFGVLKWTQTELDALDRRVRTLLTANRMHHPRSSVMRLYIPRKCGGRGFLNAKSLHNREMCSLREYFLKVEVGMHRDVVAVDKGLTPLSMAKENWRKPEVLTTDDRKEVWQGKELHGRFYRALHGPDVDFLASVSWLRFGDLFGETEGFVCAIMDEVMLTNNYRKYIMKDGTVDVCRACHRPGESIRHIISGCSRLANGEYLHRHNQVARIIHQQLALKYKLVESEVPYYKYVPDPVLEKDHVTLYWDQSIITDRTIVANKPDIVVIDRSARRVMIVDVTIPHDENLVKAEKEKQIKYLDLAHEVVDMWNVNSAIIVPIVVTANGLIAKSLDDHLSKLSLGGWIKGLIQKAVLLDTARIVRRFLSLEP

SEQ ID NO: 28995 - protein, 1202 aa, Noctua fimbriata
MLTRAAARRARLPPPDPSLSSASPPPESSHIVSAVTPAVAVASSSSDEYFSPPTSPTPVRRQGRGRPPRSLGLRGHPAPSRVPAAGGCVQRMRWTHSINENVMRAYYGSTEGGTNLTAYRVGMLSLFQVLEPTINVSAQRLSDQVRVIQRNHMLDDAVLDRLRSEVLSNRIVFTPAQTAVQASVIDATPPRFNPAVVEEDDRVAVVSSQCNDRLRSALEDALREYRSSPTELRPRLPRLPMHNKNRALVCALDSQLKNLFESSENLVDTHSILYCGAVAACRLANVKFPNCDVATRPKPAVPAWQRRIERRIDGARVLIGKLHCFREGNTRPRVMRFVRRAFSGTGISPQEYMSRVTERIDFLKQKVYAWANRIRRYKRRVDRYSQNRIFQSDERWVYRAWERPDQNMTDVCRPDDAATSSFWRSIWSVPVCHTEADWMRDVEQVCEPIPEMEPILITPLDVARAVRPLPNWKSPGPDGLHNFWLKWLSSSHTCLASQFQSSLESGSLPQFLTTGVTHLLHKSGSPAEPKNYRPITCLSTVYKLLTSILRAKINTHIDKNSIMSASQNGCRNGSRGTKELLLIDMAISQQVRRSRKDLSTCWIDYKKAYDSVPHTWLMRVLELYKIDATLRAFLESCMGQWRTVLRYPGCRQIQGNDEPVWIKRGIFQGDSLSPLWFCLALNPLSTLLEDSGLGYRLRRGGQVISHLLYMDDLKLFAPNKLRLMELLKITETFSSAIRMEFGVDKCAVMYVKQGEIMESEGIQLSDSIHLRTLSSTESYKYLGMSEALGINVTDMKQSLKERFFGRLNKVLHSLLSGGNKVRAFNGWVMPVLMYSFGVLKWTQTELDALDRRVRTLLTANRMHHPRSSVMRLYIPRKCGGRGFLNAKSLHNREMCNLREYFLKVDLGMHRDVVAVDKGLTPLSMAKENWRKPEVLTTDDRKEVWQGKELHGRFYRALHGPDVDFLASVSWLRFADLFGETEGFVCAIMDEVMLTNNYRKYIMKDGTVDVCRACHRPGESIRHIISGCSRLANGEYLHRHNQVARIIHQQLALKYKLVESEVPYYKYVPDPVLEKDHVTLYWDQSIITDRTIVANKPDIVVIDRSARRVMIVDVTIPHDENLVKAEKEKQIKYLDLAHEVVDMWNVNSAIIVPIVVTANGLIAKSLDDHLSKLSLGGWIKGLIQKAVLLDTARIVRRFLSLES

SEQ ID NO: 28996 - protein, 1111 aa, Noctua fimbriata
MRWTHSINENVMRAYYGSTEGGTNLTAYRVRMLSLFQVLEPTVNVSAQRLSDQVRVIQRNHMLDDAVLDRLRSEVLSNRVILTPAQTAVQASVIDATPPRFNTAVVEEDDTVAVVSSQCNDRLRSALEDALREYRSTPTEFRPRLPRLPMHNKNRALVCALDSQLKNIFESSENLVDTHSILYCGAVAACRLANVKFPNYDVATRPKPAVPAWQCRIERRIDGARVLIGKLHCFREGNTRPRVMRFVRRAFSGTGISPQEYMSRVTERIDFLKQKVYAWANRIRRYKRRVDRYSQNRMFQSDERWVYRAWERPEQNMTDVCRPDDAATSSFWRSIWSVPVCHTEAVWMRDVEQVCEPIPEMEPILITPLDVARAVRPLPNWKSPGPDGLHNFWLKWLSSSHTCLASQFQSSLESGSLPQFLTTGVTHLLHKSGSPAEPKNYRPITCLSTVYKLLTSILRAKINTHVDKNSIMSASQNGCRNGSHGTKELLLIDMAISQQVRRSRKDLSTCWIDYKKAYDSVPHTWLMRVLELYKIDATLRAFLESCMGQWRTVLRYPGCRQIQGNDEPVWIKRGIFQGDSLSPLWFCLALNPLSTLLEDSGLGYRLRRGGQVISHLLYMDDLKLFAPNKLRLMELLKVTETFSSAIRMEFGVDKCAVMYVKQGEIMESEGIQLSDSIHLRTLSSTESYKYLGMSEALGINVTDMKQSLKERFFGRLNKVLHSLLSGGNKVRAFNGWVMPVLMYSFGVLKWTQTELDALDRRVRTLLTANRMHHPRSSVMRLYIPRKCGGRGFLNAKSLHNREMCSLREYFLKVEVGMHRDVVAVDKGLTPLSMAKENWRKPEVLTTDDRKEVWQGKELHGRFYRALHGPDVDFLASVSWLRFGDLFGETEGFVCAIMDEVMLTNNYRKYIMKDGTVDVCRACHRPGESIRHIISGCSRLANGEYLHRHNQVARIIHQQLALKYKLVESEVPYYKYVPDPVLEKDHVTLYWDQSIITDRTIVANKPDIVVIDRSARRVMIVDVTIPHDENLVKAEKEKQIKYLDLAHEVVDMWNVNSAIIVPIVVTANGLIAKSLDDHLSKLSLGGWIKGLIQKAVLLDTARIVRRFLSLEP

SEQ ID NO: 28997 - protein, 1203 aa, Atethmia centrago
MLTRAASKRARPPPPDSSLSSASPPPVSSPTVSAVITPAAVVASSSSDEYFSPPTSPTPVRRQGRDRPSKSLGLRGHPAPSRVPAAGGCVQRMRWTQSMNENVMRAYYGSTEGGTNLTAYRVRMLSLFQELETTVNVSAQRLSDQVRVIQRNRRLDDATLDRLRSEVLSNYIISTPAQTVVHTPIIDVIPPRSNHGVEEEDDRAATVSSQCNVRLRSALEDAFREYRSTPTELRPRLPRLPMHKKNRALMCALDSQLKVFFESSEDLVDTHSILYCAAVAACRLANVKFPNSDGATRPKPAVPAWQCRIERRIDKARVLIGKLYCFREGNTRPRVMRFVRRAFSGTGISPREYMSHITERIDFLKQKVCAWASRIRRYKRRVDRYTQNRMFQSDERWVYRAWERPKQNVTDVCRPDDATTTAFWRSIWSVPVCHVEADWMRVVERVCETIPEMEVVIITPSDIARAVRPLPNWKSPGPDGLHNFWLKWLTSSHTCLASQFQSSLESGSLPQFMTTGITHLLHKSGSPAEPKNYRPITCLSTVYKLLTSILRAKINTHIDSNSIMSASQNGCRNGSRGTKELLLIDMAISQQVRRSRKDLSTCWIDYKKAYDSVPHTWLMRVLELYKIDTTLRTFLESCMGQWRTVLRYPGCRQIQGNDEPVWIKRGIFQGDSLSPLWFCLALNPLSMQLEDSGLGYRLRRGGQIISHLLYMDDLKIFAPNKLQLMKLLKVTETFSSAIRMEFGVDKCAVMHVKRGEIMESEGIQLSDSIHLRSLSSPESYKYLGMSEALGINVTDMKQSLKERFFGRLKKVLISLLSGGNKVRAFNSWVMPVLTYSFGILKWTQTELDALDRRVRTLLTANRMHHPRSSVMRLYIPRKCGGRGFLNAKTLHNREICSLREYFLKTEVGMHRDVVAVDKGLTPLSMAKENWCKPVVLTTDDRKEIWQSKELHGRFYRALHEPDVDLLASVSWLRFGDLFGETEGFVCAIMDEVILTNNYRRHIMKDGTVDVCRACHRPGESIRHIISGCSRLANGEYLHRHNQVARIIHQQLALKYKLVNSEVPYYKYVPDPVLENDHVTLYWVRSIITDRTIVANKPDIVVIDRLARRAMIVDVTIPHDDNLVKAEKEKQIKYLDLAHEVVDMWNVNSAVIVPIVVTANGLMARSLNHHLSRLALDGWIKGLIQKAVLLDTARIVRRFLSLEP

SEQ ID NO: 28998 - protein, 1105 aa, Atethmia centrago
MNENVMRAYYRSTEGGTNLTAYRVKMLSLFQELEPAVNVSAQRLSDQVRVIQRNRRLDDAALDRLRSEVLSNYIISTPAQTAVHTPIIDVIPPRSNHGVEEEDDRAATVSSQCNVRLRSALEDAFREYRSTPTELRPRLPRLPMHKKNRALMCALDSQLKVFFESSEDLVDTHSILYCAAVAACRLANVKFPNSDGATRPKPAVPAWQCRIERRIDKARVLIGKLYCFREGIARPRVMRFVRRAFSGTGISPREYMSHITERIDFLKQKVCAWASRIRRYKRRVDRYTQNRMFQSDERWVYRAWERPKQNVTDVCRPDDATTTAFWRSIWSVPVCHVEADWMRDVERVCETIPEMEVVIITPSDIARAVRPLPNWKSPGPDGLHNFWLKWLTSSHTCLASQFQSSLESGSLPQFMTTGITHLLHKSGSPTEPKNYRPITCLSTVYKLLTSILRAKINTHIDSNSIMSASQNGCRNGSRGTKELLLIDMAICQQVRRSRKDLSTCWIDYKKAYDSVPHTWLMRVLELYKIDTTLRNFLESCMGQWRTVLRYPGCQQIQGNDEPVWIKRGIFQGDSLSPLWFCLALNPLSMQLEDSGLGYRLRRGGQVISHLLYMDDLKIFAPNKLQLMKLLKVTETLSSAIRMEFGVDKCAVMHVKRGEIMESEGIQLSDSIHLRSLSSPESYKYLGMSEALGINVTDMKQSLKERFFGRLKKVLISLLSGGNKVRAFNGWVMPVLMYSFGILKWTQTELDALDRRVRTLLTANRMHHPRSSVMRLYIPRKCGGRGFLNAKTLHNREICSLREYFLKTEVGMHRDVVAVDKGLTPLSMAKENWCKPVVLTTDDRKEIWQSKELHGRFYRALHEPDVDFLASVSWLRFGDLFGETEGFVCAIMDEVILTNNYRRHIMKDGTVDVCRACHRPGESIRHIISGCSRLANGEYLHRHNQVARIIHQQLALKYKFVNSEVPYYKYVPDPVLENDHVTLYWDLSIITDRTIVANKPDIVVIDRLARRAMIVDVTIPHDDNLVKAEKEKQIKYLDLAHEVVDMWNVNSAVNVPIVVTANGLMARSLNHHLSRLALDGWIKGLIQKAVLLDTARIVRRFLSLEP

SEQ ID NO: 28999 - protein, 1203 aa, Atethmia centrago
MLTRAASKRARPPPPDSSLSSASPPPVSSPTVSAVITPAAVVASSSSDEYFSPPTSPTPVRRQGRDRPPKSLGLRGHPAPSRVPAAGGCVQRMRWTQSMNENVMRAYYGSTEGGTNLTAYRVRMLSLFQELEPTVNVSAQRLSDQVRVIQRNRRLDDATLDRLRSEVLSNYIISTPAQTVVHTPIIDVIPPRSNHGVEEEDDRAATVSSQCNVRLRSALEDAFREYRSTPTELRPRLPRLPMHKKNRALMCALDSQLKVFFESSEDLVDTHSILYCAAVAACRLANVKFPNSDGATRPKPAVPAWQCRIERRIDKARVLIGKLYCFREGNTRPRVMRFVRRAFSGTGISPREYMSHITERIDFLKQKVCAWASRIRRYKRRVDRYTQNRMFQSDERWVYRAWERPKQNVTDVCRPDDATTTAFWRSIWSVPVCHVEADWMRDVERVCETIPEMEVVIITPSDIARAVRPLPNWKSPGPDGLHNFWLKWLTSSHTCLASQFQSSLESGSLPQFMTTGITHLLHKSGSPAEPKNYRPITCLSTVYKLLTSILRAKINTHIDSNSIMSASQNGCRNGSRGTKELLLIDMAISQQVRRSRKDLSTCWIDYKKAYDSVPHTWLMRVLELYKIDTTLRTFLESCMGQWRTVLRYPGCRQIQGNDEPVWIKRGIFQGDSLSPLWFCLALNPLSMQLEDSGLGYRLRRGGQIISHLLYMDDLKIFAPNKLQLMKLLKVTETFSSAIRMEFGVDKCAVMHVKRGEIMESEGIQLSDSIHLRSLSSPESYKYLGMSEALGINVTDMKQSLKERFFGRLKKVLISLLSGGNKVRAFNSWVMPVLTYSFGILKWTQTELDALDRRVRTLLTANRMHHPRSSVMRLYIPRKCGGRGFLNAKTLHNREICSLREYFLKTEVGMHRDVVAVDKGLTPLSMAKENWCKPVVLTTDDRKEIWQSKELHGRFYRALHEPDVDLLASVSWLRFGDLFGETEGFVCAIMDEVILTNNYRRHIMKDGTVDVCRACHRPGESIRHIISGCSRLANGEYLHRHNQVARIIHQQLTLKYKLVNSEVPYYKYVPDPVLENDHVTLYWDRSIITDRTIVANKPDIVVIDRLARRAMIVDVTIPHDDNLVKAEKEKQIKYLDLAHEVVDMWNVNSAVIVPIVVTANGLMARSLNHHLSRLALDGWIKGLIQKAVLLDTARIVRRFLSLEP

SEQ ID NO: 29000 - protein, 1203 aa, Atethmia centrago
MLTRAASKRARPPPPDSSLSSASPPPVSSPTVSAVITPAAVVASSSSDEYFSPPTSPTPVRRQGRDRPPKSLGLRSHPAPSRVPAAGGCVQRMRWTQSMNENVMRAYYGSTEGGTNLTAYRVRMLSLFQELEPTVNVSAQRLSDQVRVIQRNRRLDDATLDRLRSEVLSNYIISTPAQTAVHTPIIDVIPPRSNHGVEEEDDRAATVSSQCNVRLRSALEDAFREYRSTPTELRPRLPRLPMHKKNRALMCALDSQLKVFFESSEDLVDTHSILYCAAVAACRLANVKFPNSDGATRPKPAVPAWQCRIERRIDKARVLIGKLYCFREGNTRPRVMRFVRRAFSGTGINPREYMSHITERIDFLKQKVCAWASRIRRYKRRVDRYTQNRMFQSDERWVYRAWERPKQNVTDVCRPDDATTTAFWRTIWSVPVCHVEADWMRDVERVCETIPEMEVVIITPSDIARAVRPLPNWKSPGPDGLHNFWLKWLTSSHTCLASQFQSSLESGSLPQFMTTGITHLLHKSGSPAEPKNYRPITCLSTVYKLLTSILRAKINTHIDSNSIMSASQNGCRNGSRGTKELLLIDMAISQQVRRSRKDLSTCWIDYKKAYDSVPHTWLMRVLELYKIDTTLRTFLESCMGQWRTVLRYPGCRQIQGNDEPVWIKRGIFQGDSLSPLWFCLALNPLSMQLEDSGLGYRLRRGGQIISHLLYMDDLKIFAPNKLQLMKLLKVTETFSSAIRMEFGVDKCAVMHVKRGEIMESEGIQLSDSIHLRSLSSPESYKYLGMSEALGINVTDMKQSLKERFFGRLKKVLISLLSGGNKVRAFNSWVMPVLTYSFGILKWTQTELDALDRRVRTLLTANRMHHPRSSVMRLYIPRKCGGRGFLNAKTLHNREICSLREYFLKTEVGMHRDVVAVDKGLTPLSMAKENWCKPVVLTTDDRKEIWQSKELHGRFYRALHEPDVDFLASVSWLRFGDLFGETEGFVCAIMDEVILTNNYRRHIMKDGTVDVCRACHRPGESIRHIISGCSRLANGEYLHRHNQVARIIHQQLALKYKLVNSEVPYYKYVPDPVLENDHVTLYWDRSIITDRTIVANKPDIVVIDRLARRAMIVDVTIPHDDNLVKAEKEKQIKYLDLAHEVVDMWNVNSAVIVPIVVTANGLMARSLNHHLSRLALDGWIKGLIQKAVLLDTARIVRRFLSLEP

SEQ ID NO: 29001 - protein, 1111 aa, Atethmia centrago
MRWTQSMNENVMRAYYGSTEGEINLTAYRVRMLSLFQELEPTVSVSAQRLSDQVRVIQRNHRLDDAALDRLRSEVLSNHIVSTPAQTATHAPIIDAIPPRSNHDVEEEDDRVATVSSQCNVRLRSALEDAFREYRSTPTELRPRLPRLPMHKKNRALVCALDSLLKDFFESSEDLVDTHSILYCAAVAACRLANVKFPNCDEATRPKPAVPAWQCRIERRIDGARVLISKLYCFREGNTRPRVMRFVRRAFSGTGISPREYMSRVTERIDFLKQKVCAWASRIRRYKRRVDRYTQNRMFQSDERWVYRAWERPEQNETDMCRPDDATTTAFWRSIWSEPICHAEADWMRDVERVCETIPEMEVVVITPSDIARAVRPLPNWKSPGPDGLHNFWLKWLTSSHTCLASQFQSSLESGSLPQFLTTGITHLLHKSGSPAEPKNYRPITCLSTVYKLLTSILRAKIDTHIDSNSIMSASQNGCRNGSRGTKELLLIDMAISQQVRRSRKDLSTCWIDYKKAYDSVPHTWLMKVLELYKIDTTLRTFLESCMGQWRTVLRYPGCRRIQGNDEPVWIKRGIFQGDSLSPLWFCLALNPLSTLLEDSGLGYRLRRGDQVISHLLYMDDLKIFAPNKLRLMELLKVTESFSGTIRMEFGVDKCAVMHVKRGEIMESEGIQLSDSIHLRSLSSPESYKYLGMSEALGINVTDMKQLLKERFFGRLKKVLISLLSGGNKVRAFNGWVMPVLMYSFGILKWTQTELDALDRRVRTLLTANRMHHPRSSVMRLYIPRKCGGRGFLNAKTLHNREICSLREYFLKAEVGMHRDVVAVDKGLTPLSMAKENWCKPVVLTTDDRKEIWQNKELHGRFYRALHKPDVDFLASVSWLRFGDLFGETEGFVCAIMDEVILTNNYRRHIMKDGTVDVCRACHRPGESIRHIISGCSRLANGEYLHRHNQVARIIHQQLALKYKLVNSEVPYYKYVPDPVLENDHVTLYWDRSIITDRTIVANKPDIVVIDRLARRAMIVDVTIPHDDNLVKAEKEKQIKYLDLAHEVVDMWNVNSAVIVPIVVTANGLMAESLNHHLSRLSLGGWIKGLIQKAVLLDTARIVRRFLSLEP

SEQ ID NO: 29002 - protein, 1202 aa, Atethmia centrago
MLTRSAARARPPPPDSSLSSASPPPVPSPTVSAVTTPAAVVALSSSDEYFSPPTSPTPVRRQGRGRPPKSLGLRGQLAPSRVPAAGGCVQRMRWTQSMNENVMRAYYGSTEGGTNLTAYRVRMLSLFQELEPTVNVSAQRLSDQVRVIQRNHRLDDAALDRLRSEVLSNHIVSTPAQTATHAPIIDAIPPRSNHDVEEEDDRVATVSSQCNVRLRSALEDAFREYRSTPTELRPRLPRLPMHKKNRALVCALDSLLKDFFESSEDLVDTHSILYCAAVAACRLANVKFPNCDEATRPKPAVPAWQYRIERRIDGARVLISKLYCFREGNTRPRVMRFVRRAFSGTGISPREYMSRVTERIDFLKQKVCAWASRIRRYKRRIDRYTQNRMFQSDERWIYRAWERPEQNETDMCRPDDATTTAFWRSIWSEPVCHAEADWMRDVERVCETIPEMEVVVITPSDIARAVRPLPNWKSPGPDGLHNFWLKWLTSSHTYLASQFQSSLESGSLPQFLTTGITHLLHKSGSPAEPKNYRPITCLSTVYKLLTSILRAKINTHIDSNSIMSASQNGCRNGSRGTKELLLIDMAISQQVRRSRKDLSTCWIDYKKAYDSVPHTWLMKVLELYKIDTTLRTFLESCMGQWRTVLRYPGCRRIQGNDEPVWIKRGIFQGDSLSPLWFCLALNPLSTLLEDSGLGYRLRRGGQVISHLLYMDDLKIFAPNKLRLMELLKVTETFSGAIRMEFGVDKCAVMHVKRGEIMESEGIQLSDSIHLRSLSSPESYKYLGMSEALGINVTDMKQLLKERFFGRLKKVLISLLSGGNKVRAFNGWVMPVLMYSFGILKWTQTELDALDRRVRTLLTANRMHHPRSSVMRLYIPRKCGGRGFLNAKTLHNREICSLREYFLKAEVGMHRDVVAVDKGLTPLSMAKENWCKPVVLTTDDRKEIWQNKELHGRFYRALHEPDVDFLASVSWLRFGDLFGETEGFVCAIMDEVILTNNYRRHIMKDGTVDVCRACHRPGESIRHIISGCSRLANGEYLHRHNQVARIIHQQLALKYKLVNSEVPYYKYVPDPVLENDHVTLYWDRSIITDRTIVANKPDIVVIDRLARRAMIVDVTIPHDDNLVKAEKEKQIKYLDLAHEVVDMWNVNSAVIVPIVVTANGLMAESLNHHLSRLSLGGWIKGLIQKAVLLDTARIVRRFLSLEP

SEQ ID NO: 29003 - protein, 1201 aa, Mesoligia furuncula
MLTRSAARRAHLPPPDSSLSPAPPPPEPSPIESAVTPAAAVASSSSDEYFSPPTSPTPVRRQGRGRPPNCLGLRGHPAPSRVPATGGCVQRMRWTQSMNENVMRAYYGSTEGGINLTAYRDRMLSLFQELEPTVNVSAQRLSDQVRVIQRNHRLDDIALDRLRSEVLSNHIVSTSAQTAAQVSSVDAIPPRFNHVEEEDDRVDTVSSQCNVRLRSALEDALREYRSTPTELRPRLPRLPMHKKNRALVCALDSQLKNFFESSVDLVDTHSILYCAAVAACRLANVKFPSCDGATRPKPAVPAWQRRIERRIDGARVLIGKLYCFREGNTRPRVMRFVRRAFSGTGISPQEYMSRVTERIDFLKQKVSAWASRIRRYKRRMDRYTQNRMFQSDERWVYRAWERPEQNVTDVCRPDDAATSAFWCSIWSVPVCHTEAGWMQDVERVCESVPEMETVLITPSDVARAVRPLSNWKSPGPDGLHNFWLKWLISSHTCLASQFQSSLESGSLPQFLTTGVTHLLHKSGSPAEPKNYRPITCLSTVYKLLTSILRAKINKHIESNSIMSTSQNGCRNGSRGTKELLLIDMAISQQVRRSRKDLSTCWIDYKKAYDSVPHTWLMRVLELYKIDATLRTFLESCMGQWKTVLRYPGCRQIQGNDEPVWIKRGIFQGDSLSPLWFCLALNPLSTLLEDSGLGYRLRRGGQVISHLLYMDDLKLFAPNKLRLMELLKVTKTFSSAIRMEFGVDKCAVMHVKRGEIMESEGIQLSDSISLRSLSSSESYKYLGMSEALGINDADMKQSLKERFFCRLKKVLISLLSGGNKVRAFNGWVMPVLMYSFGILKWTQTELDALDRRVRTLLTANRMHHPRSSVMRLYIPRKCGGRGFLSAKTLHNREVCSLREYFLKTEVGMHRDVVAVDKGLTPLSMAKENWRKPVVLSTDDRKKVWQSKELHGRFYRALHEPGVDFIASVSWLRFGDLFGETEGFVCAIMDEVILTNNYRRHIMKDGTVDVCRACHRPGESIRPIISGCSRLANGEYLHRHNQVARIIHQQLALKYKLVDSEVPYYKYVPDPVLENDHVTLYWDRSIITDRTIVANKPDIVVIDRLARRTMIVDVTIPHDGNLVKAEKEKKIKYLDLAHEVVDMWNVSSAVIVPIVVSANGLMAESLDQHLSRLSLGGWIKGLIQKAVLLDTARIVRRFLSLEP

SEQ ID NO: 29004 - protein, 1080 aa, Xestia c-nigrum
MLSLFQDLEPAVNVSAQQLSDQVRVIQRSHRLDDATLDRLRSEVLSNLITITPTQTAVHMSVVNATLPRSNPVVVEEDDSVALVSSQCNDRLRSALDNALREYRSISAELRPRLPRLPMHKKNRALVCALDSQLKNIFESSEDLVDTHSILFCGAVAACRLANVKFPNCDIAIRPKPAVPAWQRRIERRIDGARVLIGKLYCFREGNTRPRVMRFVRRAFSGTEISPQEYMSRVTERIDFLKQKVYAWASRIRRYKRQVDRYSQNRMFQSDERWVYRAWERPQQNMTDVCRPDDAATSSFWRSIWSVPVCHSEADWMRDVERVCEPIPTMEPILITPLDIARAVRPLPNWKSPGPDGLHNFWLKWFSSSHTCLASQFQSSLESGSLPQFLTTGVTHLLHKSGSPAEPKNYRPITCLSTVYKLLTSILRMKINTHVDSNSIMSASQNGCRNGSRGTKELLLIDVAISQQVRRARKDLSICWIDYKKAYDSVPHSWLKRVLELYKIDATLRAFLESCMGQWRTVLRYPGCRQIQGNDEPVWIKRGIFQGDSLSPLWFCLALNPVSTLLENSGLGYRLRKDGQVISHLLYMDDLKLFAPNKLQLMELLKVTETFSSAIGMEFGVDKCAVMYVKRGKIMGSEGLQLSDSIHLRSLSSSESYKYLGMSEALGINVTDMKQSLRERFFGRLKKVLNSLLSGGNKVRAFNGWVMPVLMYSFGILKWTQTELDALDRRVRTLLTENRMHHPRSSVMRLYIPRKCGGRGFLNAKTLHNREVCSLREYFLKADVGMHRDVAAVDKGLTPLSMAKENWRKPVVLTTDDRMKEWQGKELHGRFYRALHGPDVDFLASVSWLRFGDLFGETEGFVCAIMDEVMLTNNYRKYIMKDGTVDVCRACHLPGESIRHIISGCSRLANGEYLHRHNQVARIIHQQLALKFNLVELEVPYYKYVPDPVLVKDHVTLYWDQSIITDRTIVANKPDIVVIDRSARRVMIIDVTIPHDENLVKAEKEKQMKYLDLAHEVRDMWNMDSVIIVPIVVSANGLIAKSLDEHLSKLSLGGWIKGLIQKAVLLDTARIVRRFLSLQP

SEQ ID NO: 29005 - protein, 1200 aa, Xestia c-nigrum
MITRAASRRRARLPSPDSSLSSASPPPDPGSPVSTVAAVASSSSDEYFSPPTSPTPVRRAGRGRPPRSLGLRGQQAPSRVPATGGCVQRMRWTQSMKENAMRAYYGSTEGGTNLTAYRVRMLSLFQDLEPAVNVSAQRLSDQVRVIQRNHMLDDAALDRLRSEVLSNRIILTPAQTAVQASAIDATPPRSNPAVVEEDGRVATVSSQCNDRLRSALEDALREYRSTPTELRPRLPRLPMHKKNRALVCALDSQLKNVFESSEDLVDTHSILFCGAVAACRLANVKFPNCDLATRPKPAVPVWQRRIERRIDGARVLIGKLYCFREGNTRPRVMRFVRRAFSGTEISPQEYMSRVTERIDFLKQKVYAWASRIRRYKRRVDRYSQNRMFQCDERWVYRAWERPDQNVTDVCHPGDAATSSFWRSIWSVPVCHSEADWMRDVERVCEPIPEMAPVVITSLDIARAVRPLPNWKSPGPDGLHNFWLKWLSSSHTCLASQFQSSLESGSLPQFLTTGVTHLLHKSGSPTEPQNYRPITCLSTVYKLLTSILRTKINTHIDNNSIMSASQNGCRNGSRGTKELLLIDMAISQQVRRSRKDLSTCWIDYKKAYDSVPHSWLMRVLELYKIDATLCTFLKSCMGQWRTVLRYPGCRRIQGNDESVWIKRGIFQGDSLSPLWFCLALNPLSTLLENSRLGYQLRKDGQVISHLLYMDDLKLFAPNKLRLMELLKVTETFSNAIRMEFGVDKCAVMYVKRGEIMESEGLQLSDSIHLRSLSSSESYKYLGMSEALGINVTDMKQSLRERFFGRLKKVLNSLLSGGNKVRAFNGWVMPVLMYSFGILKWTQTELDALDRRVRTLLTENRMHHPRSSVMRLYIPRKCGGRGFLNAKTLHNREVCSLREYFLKAEVGMHRDVVAVDKGLTPLSMAKENWRKPVILTTDDRKKEWQGKVLHGRFYRALHGPDVDFLASVSWLRFGDLFGETEGFICAIMDEVMLTNNYRKYIMKDGTVDVCRACHCPGESIRHIISGCSRLANGEYLHRHNQVARIIHQQLALKFKLVESEVPYYKYVPDPVLVKDHITLYWDQSIITDRTIVANKPDIVVIDRSARRVMIIDVTIPHDENLVKAEKEKQMKYLDLAHEVRDMWNMNSVIIVPIVVTANGLIAKSLDEHLSKLSLGGWIKGLIQKAVLLDTARIVRRFLSLQP

SEQ ID NO: 29006 - protein, 1111 aa, Omphaloscelis lunosa
MRWTQSMNENVMRAYYGSTEGGTNLTAYRVRMLSLFQELEPTVNVSAQRLSDQVRVIQRNHRLDDTALDRLRSEVLSNHIVSTRAQTAAQASNIDATPLRFNHGVEEEDDRVATVSSQCNNRLRSALEDAFREYRYTPTELRPRLPRLPMHNKNRALVCALDSQLTNFFESSEDLIDTHSILYCAAVAACRLANVKFPNCDGATRPKPVVPAWQCRIERRIDGARVLIGKLYCFREGNTRPRVMRFVRRAFSGTGISPQDYMSRVTERIDFLKQKVCAWASRIRRYKRRVDRYTQNRVFQSDERWVYRAWERLEQNVTDVCRPDDAATSAFWRSIWSVPVCHTEAGWMQDVERVCETIPVMDAVFITPLDVARAVRPLPNWKSPGPDGLHNFWLKWLSSSHTRLASQFQSSLESGSLPQFLTTGVTHLLHKSGNPAEPKNYRPITCLSTVYKLLTSILRTKINTHIDSNSIMSVSQNGCRNGSRGTKELLLIDMAISQQVRRSRKDLSTCWIDYKKAYDSVPHTWLMRVLELYKVDTTLRTFLMSCMGQWRTVLRYPGCRQTQGNDEPVWIKRGIFQGDSLSPLWFCLALNPLSTLLEDSGLGYRLRRGGQVISHLLYMDDLKLFAPNKLRLMELLKVTETFSGAIRMEFGVDKCAVMHVKRGEIMESEGIQLSDSIHLRSLSSAENYRYLGMSESLGINVADMKQSLKERFFGRLKKVLISFLSGGNKVRAFNGWVMPVLMYSFGILKWTQTELDALDRRVRTLLTANRMHHPHSSVMRLYIPRKCGGRGFLNAKTLHNREVCSLREYFFKADVGMHRDVVAVDNGLTPLSMAKENWRKPVVLTTDDRKEVWQSKALHGRYFRALHEPDVDFLASVSWLRFGDLFGETEGFICAIMDEVILTNNYRRHIMKDGTVDVCRACHRPGESIRHIISGCSRLANGEYLHRHNQVARIIHQQLALKYKLVDSEVPYYKYVPDPVLENDHVTLYWDRSIITDRTIVANKPDIVVIDRLARHAMIVDVTIPHDENLVKAEKEKQIKYLDLAHEVVDMWNVSSAIIVPIVVTANGLMAKSLDQHLSRLSLDGWIKRLIQKAVLLDTARIMRRFLSLQP

SEQ ID NO: 29007 - protein, 1080 aa, Omphaloscelis lunosa
MLSLFQELEPTVNVSAQRLSDQVRVIQRNHRLDDTALDRLRSEVLSNHIVSTRAQTAAEASNIDPTPPRFNHGVEEEDDRVATVSSQCNNRLRSALEDAFREYRYTPTELRPRLPRLPMHKKNRALVCALDSQLTNFFESSEDLIDTHSILYCAAVAACRLANVKFPNCDGATRPKPVVPAWQCRIERRIDGARVLIGKLYCFREGNTRPRVMRFVRRAFSGTEISPQDYMSRVTERIDFLKQKVCAWASRIRRYKRRVDRYTQNRMFQSDERWVYRAWERPEQNVTDVCRPDDAATSAFWRSIWSVPVCHTEAGWMQDVERVCETIPEMDAVFITPLDVARAVRPLPNWKSPGPDGLHNFWLKWLSSSHTCLASQFQSSLESGSLPQFLTTGVTHLLHKSGNPAEPKNYRPITCLSTVYKLLTSILRTKINTHIDSNSIMSVSQNGCRNGSRGTKELLLIDMAISQQVRRSRKDLSTCWIDYKKAYDSVPHTWLMRVLELYKVDTTLRTFLMSCMGQWRTVLRYPGCRRTQGNDEPVWIKRGIFQGDSLSPLWFCLALNPLSTLLEDSGLGYRLRRGGQVISHLLYMDDLKLFAPNKLRLMELLKVTETFSGAIRMEFGVDKCAVMHVKRGEIMESEGIQLSDSIHLRSLSSAENYRYLGMSESLGINVADMKQSLKERFFGRLKKLLISFLSGGNKVRAFNGWVMPVLMYSFGILKWTQTELDTLDRRVRTLLTANRMHHPRSSVMRLYIPRKCGGRGFLNAKTLHNREVCSLREYFFKADVGMHRDVVAVDNGLTPLSMAKENWRKPVVLTTDDRKEIWQSKVLHGRFYRALHEPSVDFLASVSWLRFGDLFGETEGFICAIMDEVILTNNYRRHIMKDGTVDVCRACHRPGESIRHIISGCSRLANGEYLHRHNQVARIIHQQLALKYKLVDSEVPYYKYVPDPVLENDHVTLYWDRSIITDRTIVANKPDIVVIDRLARHAMIVDVTIPHDENLVKAEKEKQIKYLDLAHEVVDMWNVSSAIIVPIVVTVNGLMAKSLDQHLSRLSLGGWIKRLIQKAVLLDTARIVRRFLSLQP

SEQ ID NO: 29008 - protein, 1203 aa, Omphaloscelis lunosa
MLTRSAARLARPPPPDSSLSSASPPPVPSPTMSATTTPAAVVASSSSDEYFSPPTSPTPVRRQGRGRPPKSLGLRGQPAPSRVPAAGGCVQRMRWTQSMNENVMRAYYGSTEGGTNLTAYRVRMLSLFQELEPTVNVSAQRLSDQVRVIQRNHRLDDTALDRLRSEVLSNHIVSTRAQTAAQASNIDATPPRFNHGVEEEDDRVATVSSQCNNRLRSALEDAFREYRYTPTELRPRLPRLPMHNKNRALVCALDSQLTNFFESSEDLIDTHSILYCAAVAACRLANVKFPNCDGATRPKPVVPAWQCRIERRIDGARVLIGKLYCFREGNTRPRVMRFVRRAFSGTGISPQDYMSRVTERIDFLKQKVCAWASRIRRYKRRVDRYTQNRVFQSDERWVYRAWERPEQNVTDVCRLDDAATSAFWRSIWSVPVCHTEAGWMQDVERVCETIPVMDAVFITPLDVARAVRPLPNWKSPGPDGLHNFWLKWLSSSHTRLASQFQSSLESGSLPQFLTTGVTHLLHKSGNPAEPKNYRPITCLSTVYKLLTSILRTKINTHIDNNSIMSVSQNGCRNGSRGTKELLLIDMAISQQVRRSSKDLSTCWIDYKKAYDSVPHTWLMRVLELYKVDTTLRTFLMSCMGQWRTVLRYPGCRQTQGNDEPVWIKRGIFQGDSLSPLWFCLALNPLSTLLEDSGLGYRLRRGGQVISHLLCMDDLKLFAPNKLRLMELLKVTETFSGAIRMEFGVDKCAVMHVKRGEIMESEGIQLLDSIHLRSLSSAENYRYLGMSESLGINVADMKQSLKERFFDRLKKVLISFLSGGNKVRAFNGWVMPVLMYSFGILKWTQTELDALDRRVRTLLTANRMHHPHSSVMRLYIPRKCGGRGFLNAKTLHNREVCSLREYFFKADVGMHRDVVAVDNGLTPLSMAKENWRKPVVLTTDDRKEVWQSKALHGRYFRALHEPDVDFVASVSWLRFGDLVGETEGFICAIMDEVILTNNYRRHIMKDGTVDVCRACHRPGESIRHIISGCSRLANGEYLHRHNQVARIIHQQLALKYKLVDSEVPYYKYVPDPVLENDHVTLYWDRSIITDRTIVANKPDIVVIDRLARHAMIVDVTIPHDENLVKAEKEKQIKYLDLAHEVVDMWNVSSAIIVPIVVTANGLMAKSLDQHLSRLSLDGWIKRLIQKAVLLDTARIVRRFLSLQP

SEQ ID NO: 29009 - protein, 962 aa, Sesamia nonagrioides
MHKKNRALVCALDSLLKNFFESSEDLIDTHSILYCAAVAACRLAKVKFPNCEEAARPKPAVPAWQRRIERRIDGTRVLIGKLYCFRDGNTRPRVMRFVRQAFSGTGISPREYINHLTERIDFLKQKVCAWASRIRRYKRRVDRYTQNRMFQSDERWVYRAWERPEQNEADVCRPDDATTSAFWRGIWSVSVCHTEVNWIQNVEQVCETIPEMDTILITPSDVAAAVRSLPNWKSPGPDGLHNFWLKWLSSSHTCLASQFQSSLESGSLPQFLTTGITHLLHKSGSTAEPKNYRPITCLPTVYKVLTSILKAKINKHLNSNSIMSVSQNGCKNGSRGTKELLLIDMAISQQVRRSRKDLSTCWIDYKKAYDSVPHTWLMRVLELYKVNATLRTFLRSCMGQWKTVLRYPGSRRIQGNDEPVWIKRGIFQGDSLSPLWFCLALNPLSTLLEDSGLGYRLQRGGQVISHLLYMDDLKLFAPNKLHLMKLLNVTETFSSGIKMEFGVDKCAVMHVKRGQIMESEGITLPDSIHLRSLSSFESYKYLGMSEALGINDADMKQSLKERFFGRLKKVLKSLLSGGNKVRAFNGWVMPVLMYSFGILKWTQTELDALDRRVRTLLTANRMHHPRSSVMRLYIPRKCGGRGFLNAKTLHNREVCSLREHFFKTVVGMHHDVVTVDKGLTPLSMAKENWHKPIILTTDDRKMIWQSKELHGRFYRALHEPDVDFLASVSWLRFSDLFGETEGFVCAIMDEVILTNNYRRYIMKDGTIDVCRACHHPGESIRHIISGCSRLANSEYLHRHNQVARIIHQQLALKYKLVDSEVPYYKYVPDPVLENDHVTLYWDRSIITDRTIVANKPDIVVIDRLARLAMIVDVTIPHDGNLVKAEKEKQVKYLDLAHEIVDMWNVNSAVIVPIVVSANGLIAKSLDQHLLRLSLGSWIKGLIQKAVLLDTARIVRRFLSLEP

SEQ ID NO: 29010 - protein, 1204 aa, Apamea monoglypha
MLKMLTRSAARARLLPPDSSLSPAPPPPESSPIESAVTPAVAVASSSSDEYFSPPTSPTPVRRQGRGRPPRSLGLRGHPAPSRVPAAGGCVQRMRWTQSMNENVMRAYYGSTEGGINLTAYRDRLLSLFQELEPTVNVSAQRLSDQVRVIQRNHRLDDIALDRLRSEVLSNQIVSTLAQTAAQASTIDAIPPRSNHVEEEDDDRVDTVSSQCNVRLRSALEDAFREYRSTPTELRPRIPRLPMHKKNRALVCALDSQLKNFFESSEDLVDTHSILYCAAVAACRLANVKFPNCDGATRPKPAVPAWQYRIERRIDGARVLIGKLYCFREGNTRPRVMRFVRQAFSGTGISPREYISNVTERIDFLKQKVCAWASRIRRYKRRVDRYTQNRMFQSDERWVYRAWERPEQNVTDVCRPDDANTNAFWRSIWSVPVYHAEGGWMQDIERVCETIPEMDPVLITPLDVARAVRPLPNWKSPGPDGLHNFWLKWLISSHSRLASQFQSSLESGSLPQFLTTGVTHLLHKSGSPAEPKNYRPITCLSTVYKLLTSILRAKINTHIDNNSIMSASQNGCRNGSRGTKELLLIDMAISQQVRRSRKDLSTCWIDYKKAYDSVPHAWLMRVLELYKIDATLRTFLESCMGQWRTVLRYPGCRQIQGNDEPVWIKRGIFQGDSLSPLWFCLALNPLSTLLEDSGLGYRLKRGGQVISHLLYMDDLKLFAPNKLRLLELLKVTETFSSAIRMEFGVDKCAVMHVKRGEIMESEGIQLSDSIHLRSLSSSESYKYLGMSEALGINVADMKQTLRERFFGRLKKVLVSLLSGGNKVRAFNSWVMPVLMYSFGILKWTQTELDALDRRVRTLLTANRIHHPRSSVMRLYIPRKCGGRGFLNAKTLHNREVCNLREYFIKAEVGMHRDVVAVDKGLTPLSMAKENWRKPVILTTDDRKEVWQSKELHGRFYRALHEPGVDFLASVSWLRFGDLFGETEGFVCAIMDEVVLTNNYRRYIMKDGTVDVCRACHRPGESIRHIISGCSRLANGEYLHRHNQVARIIHQQLALKYKLVDSEVPYYKYVPDPVLENDHVTLYWDRSIITDRTIVANKPDIVVIDRLARRTMIVDVTIPHDGNLVKAEKEKQIKYLDLAHEVVDMWNVSSAIIVPIVVSANGLMAESLDQHLSRLSLGGWIKGLIQKAVLLDTARIVRRFLSLEP

SEQ ID NO: 29011 - protein, 1199 aa, Mamestra configurata
MLTRAASRRARPPSPDPSLSSASPPPDSRSPMSPAVAVASSSSDEYFSPPTSPTPVRRQRRGRPPRGLGPRGQPAPSRVPATGGCVQRMRWTQSMNENVMRAYYGSTEGGTNLTAYRVRMLSLFQDLEPTVNVSAQRLSDQVRVIQRNHRLDDAALDRLRSEVLNNLIISTPTQTAVQAPVNGRITPRPNNVSDEVDDRVVTVSSQCNDRLRSALEDALREYRSTPTELRPRLPRLPMHKKNRALVCALDSLLQNIFESSESLVDTHSILYCGAVAACRIANVKFPGCDEAIRPKPAAPAWQRRIERRIDETRALIGKLYCFREGNTRPRVMRFVRRAFSGTEISPRDFTSRVTERIDFLKQKVCAWASRIRRYKRRVDRYSQNRMFQSDERWVYRAWERPEQSVTDVCRPDDVATSIFWRSIWSVPICHAEGGWMRDVERVCEAIPQMEKITITTLDVAKAVRPLPNWKSPGPDGLHNFWLKWYSSSHALLASQFQSSLDSGSLPQFLTTGVTHLLHKTGSPTEPKNYRPITCLSTVYKLLTSILRAKINEHIESNSIMSASQNGCRKGSRGTKELLLIDMAISQQVRRSRKDLSTCWIDYKKAYDSVPHTWLMKVLELYKIDATLRTFLESCMRQWKTVLRYPGCRPIQGSDEPVWIKRGIFQGDSLSPLWFCLALNPLSTLLEDSGLGYRLRRGGQAISHLLYMDDLKLFAPNNLRLMELLKVTETFSSAIRMEFGVDKCAVMHVKKGEIMESEGIHLSDSIQVRSLSSTETYKYLGMLEALGINGTDMKQSLRERFFGRLKKVLNSLLSGGNKVRAFNGWVMPVLMYTFGILKWTQTELDALDRRVRTLLTANRMHHPRSSVMRLYIPRKCGGRGFLNAKTLHNREMCSLREYFLKADVGMHRDVVAVDKGLTPLSMAKENWRTPVILTTDDRKEVWKGKELHGRFYRALHGSDVDFSASVAWLRFGDLFGETEGFVCAIMDEVILTNNYRRHIMKDGTVDVCRACHRPGESIRHIISGCSRLANGEYLHRHNQVARIIHQQLALKYQLVDSEVPYYKYVPDPVLENDHVTLYWDRSIITDRTIVANKPDIVVIDRLARRTMIIDVTIPHDVNLVKAEKEKQIKYLDLAHEVVDMWNVDSAVIVPIVVTANGLLSKSFDDHLSKLSLRGWVKGLIQKAVLLDTARIVRRFLSLEP

SEQ ID NO: 29012 - protein, 1082 aa, Noctua janthe
MLSLFQVLEPIVNVSAQRLSDQVRVIQRNHMLDDAALDRLRSEVLSNRIVLTPAQTAVQASAIDATPPRSNPAVVEEDDRVAMVSSQCNDRLRSALEDALREYRSTPTKLRPRLPRLPMHNKNRALVCALDSQLKNIFESSENLVDTHSILYCGAVAACRSANVKFPNYDVAITPKPAVPTWQRRIECRIDEARVLIGKLHCFREGNTNTRPRVMRFVRRAFSGTGISPQEYMSRVTERIDFLKQKVYAWANRIRRYKRRVDRYSQNRIFQSDERWVYRAWERPEQNMTDVCRPDDAATSSFWRSIWSVPVCHTEADWMRDVERACEPIPEMEPILITSIDITRAVRPLPNWKSPGPDGLHNFWLKWLSSSHTCLASQFQSSLESGSLPQFLTTGVTHLLHKSGSPAEPKNYRPITCLSTVYKLLTSILRVKINTHIDKNFIMSASQNGCRNRSRGTKELLLIDMAISQQVRRSRKDLSTCWIDYKKAYDSVPHTWLMRVLELYKIDATLRAFLESCMGQWRTVLRYPGCRQIQGNDEPVWIKRGIFQGDSLSPLWFCLALNPLSTLLEDSGLGYRLRRGGQVISHLLYMDDLKLFAPNKLRLMELLKVTETFSNAIRMEFGVDKCAVMYVKRGEIMESEGIQLSDSIHLRSLSSSESYKYLGMSESLGINVTDMKQSLRERFFGRLNKVLNSLLSGGNKVRAFNGWVMPVLMYSFGVLKWTQTELDALDRRVRTLLTANRMHHPRSSVMRLYIPRKCGGRGFLNAKTLHNREICSLREYFLKTEVGMHRDVVAVDKGLTPLSMAKENWRKPVVLTTDDRKEVWQGKELHGRFYRALHGPDVDFLASVSWLRFGDLFGETEGFVCAIMDEVMLTNNYRKYIMKDGTVDVCRACHRPGESIRHIISGCSRLANGEYLHRHNQVARIIHQQLALKYKLVESEVPYYKYVPDPVLEKDHVTLYWDRSIITDRTIVANKPDIVVIDRLARRVMIVDVTIPHDENLVKAEKEKQIKYLDLAHEVVDMWNVNSAIIVPIVVTANGLIAKSLDDHLSRLSLGGWIKGLIQKAVLLDTARIVRRFLSLEP

SEQ ID NO: 29013 - protein, 1204 aa, Noctua janthe
MLTRRRAKLHETHPPSPGSSLSSASHSPGRATSVSAASPVAAVASSSSDEFFSPPSTPPPPRRRGRGRPPASLGPRGQQATNRVPAAGGNVSRIRWTQSMNENVMRAYYGSTEGGTNLTAYRVRMLSLFQVLEPIVNVSAQRLSDQVRVIQRNHMLDDAALDRLRSEVLSNRIVLTPAQTAVQASAIDATPPRSNPAVVEEDDRVAMVSSQCNDRLRSALEDALREYRSTPTKLRPRLPRLPMQNKNRALVCALDSQLKNIFESSENLVDTHSILYCGAVAAYRLANVKFPNDDVAIRPKPAVPTWQRRIECRIDEARVLIGKLHCFREGNTRPRVMRFVRRAFSGTGISPQEYMSRVTERIDFLKQKVYAWANRIRRYKRRVDRYSQNRIFQSDERWVYRAWERPEQNMTDVCRPDDAATSSFWRSIWSVPVCHTEADWIRDVERTCEPIPEMEPILVTPIDIARAVRPLPNWKSPGPDGLHNFWLKWLSSSHTCLASQFQSSLESGSLPQFLTTGVTHLLHKSGSPTEPKNYRPITCLSTVYKLLTSILRVKINTHIDKNFIMSASQNGCRNGSRGTKELLLIDMAISQQVRRSRKDLSTCWIDYKKAYDSVPHTWLMRVLELYKIDATLRAFLKSCMGQWRTVLRYPGCRQIQGNDEPVWIKRGIFQGDSLSPLWFCLALNPLSTLLEDSGLGYRLRRGGQVISHLLYMDDLKLFAPNKLRLMELLKVTETFSNAIRMEFGVDKCAVMYVKRGEIMESEGIQLSDSIHLRSLSSSESYKYLGMSESLGINVTDMKQSLRERFFGRLNKVLNSLLSGGNKVRAFNGWVMPVLMYSFGVLKWTQTELDALDRRVRTLLTANRMHHPRSSVMRQYIPRKCGGRGFLNAKTLHNREICSLREYFLKTEVGMHRDVVAVDKGLTPLSMAKENWRKPVVLTTDDRKEVWQGKELHGRFYRALHGTDVDFLASVSWLRFGDLFGETEGFVCAIMDEVMLTNNYRKYIMKDGTVDVCRACHRPGESIRHIISGCSRLANGEYLHRHNQVARIIHQQLALKYKLVESEVPYYKYVPDPVLEKDHVTLYWDRSIITDRIIVANKPDIVVIDRLARRVMIVDVTIPHDENLVKAEKEKQIKYLDLAHEVVDMWNVNSAIIVPIVVTANGLIAKSLDDHLSRLSLGGWIKGLIQKAVLLDTARIVRRFLSLEP

SEQ ID NO: 29014 - protein, 1200 aa, Mythimna ferrago
MLTRAATRRARHPPPGSSLSSASPPPDPGSPVSPAVAVASSSSDEYFSPPTSPTPVRRPGRGRPPKSMGPRGQPAPSRVPAAGGCVQRMRWTQSMNENVMRAYYGSTEGGTNLTAYRERMLSLFQDLEPTVNVSAQRLSDQVRVIQRNHRLDDAALDRLRSEILSNQIVSTSTQTQTAATPTTNAISPRSDHNNDDTDDRVVTVSSQCNERLRSALEDALCEYMSTPTELRPRLPRLPMHKKNRALVCALDSLLKNIFESSENLIDTHSILYCGAVAACRLANIKFPNIDGTIRPKSAVPAWQCRIERRIDEARVLIGKLHCFREGNTRPRVMRFVRRAFLGTGISPQGYMSRVTERIDFLKQKVCAWASRIRRYKRRVDRYSQNRMFQSDERWVYRAWERPEHSVIDGCRPDDFATITFWQNIWSVPVSHAEGGWMRDVERVCEAIPEMEKVTITPEDVAKAVRPLPNWKSPGPDGLQNFWLKWYSSSHALLASQFQSILESGSLPEYLTTGITHLLHKTGNPVDPKNYRPITCLSTVYKLLTSILRAKINIHIENHQIISPSQNGCRNGSRGTKELLLIDMAISQQTRRSRKDLSTCWIDYKKAYDSVPHTWLMRVLELYKIDITLRTFLESCMRQWKTVLRYPGCRPIQGNDEPIWIKRGIFQGDSLSPLWFCLALNPLSTLLEDSGLGYRLRRGGQVISHLLYMDDLKLFAPSTLQLMELLKVTETFSSAIRMEFGVDKCAGMHVKRGEIMESEGIQLPDSIHLRSLSSTETYKYMGMSEALGINNADMKQSLKERFFGRLKKVLNSLLSGGNKVRAFNGWVMPVLMYSFGILKWTQTELDALDRRVRTLLTANRMHHPRSSVMRLYIPRKCGGRGFLNAKTLHNREVCSLREYFLKTDVGMHRDVVAMDKGLTPLSMAKEDWHKPVIMTTDNRKEIWKGKELHGRFFRALHEPDVDFLASVAWLRFSDLFGETEGFVCAIMDEVILTNNYRRYIMKDGTVDVCRACHRPGESIRHIISGCSRLANGEYLHRHNQVARIIHQQLALKYNLVDLEVPYYKYVPDPVLENDHVTLYWDRSIITDRTIVANKPDIVVIDRSARRAIIVDITIPHDENLVKAEKEKQMKYLDLAHEVVDMWSVDSAVIVPIVVTANGLIAKSFDDHLSKLSLRGWIKGQIQKAVLLDTARIVRKFLSLEP

SEQ ID NO: 29015 - protein, 1014 aa, Mythimna ferrago
MPRPNYGDDEADDRVVTVSSQCNDQLRSALEDALREYRSTPIALRPRLPRLPMHKKNRALVCALDSLLENVFESSVNLVDTHSILYCGAIAACRLANVKLPSCDGATRPKPAVPAWQCRIERRIDGARALIGKLYCFREGNTRPRVMRYVRRAFSGTGVSPREYLAHVTERIDFLKQKVCAWANRIRRYKRRVDRYSQNRMFQSDERWVYRDWERPEQSVTNVLRPDVAATNEFWRSIWSVPVCHTEGGWMRDIERVCEAIPEMEKVFISPIDVARAVRPLTNWKSPGPDGLQNFWLKWYSSSHALLASQFQSSLESGSLPQFLTTGVTHLLHKTGSTAEPKNYRPITCLSTVYKLLTSILRTKINNHIENNSIMSASQNGCRNGSRGTKELLLIDMAISQQVRRSRKDLSTCWIDYKKAYDSVPHTWLMRVLELYKIDATLRTFLESCMGEWNTVLRYPGCRSIWGDDEPIWIKRGIFQGDSLSPLWFCLALNPLSTLLEDSGLGYRLRRGGQVLSHLLYMDDLKLIAPNKLQLMELLKVTETFSSAIRMEFDVDKCAVMHVKRGEIMESEGIQLSDSIHLRSLSSTETYKYLGMSEALGINVTDMKQSLRERFFSRLKKVLNSLLSGGNKVRAFNGWVMPVLMYSFGILKWTQTELDALDRQVRTLLTANRMHHPRSSVMRLYIPRKCGGRGFLNAKTLHNREVCSLREYFQKTDVGMHRDVVAVDKGLTPLSMAKENWRKPVVLTTDDRREVWKNKELHGRFYRALHEPDVDFGASVAWLRFSNLFGETEGFICAIMDEVILTNNYRRYIMKDGTVDVCRACHRPGESIRHIISGCSRLANGEYLHRHNQVARIIHQQLALKYKLMESEVPYYRYVPDPVLENDHVTLYWDRSIITDRTIIANKPDIVVIDRLARRAMIVDVTIPHDENLVKAEKEKKIKYLDLAHEVVDLWNVDSAVIVPIVVSVNGLIAKSFDDHLSKLALRGWIKGLIQKAVLLDTARIVRRFLSLEP

SEQ ID NO: 29016 - protein, 1171 aa, Noctua pronuba
MIKRAAYRRARQPTPDSSLSSASPPPDVGSPVLPAVAVASSSSDEYFSPPTSPTPVRRQGRGRRPRSLGLRGHPAPSRVPATGGCVQRMRWTHPINENVMRAYYGSTEGGTNLTAYRVRMLSLFQGLEPTVNVSAQRLSDQVRVIQRNHMLDDAALDRLRSEVLSNRIVLTPSQTVVQASAIDITPPRSNHAVVEEDDRVATVSSQCNDRLRSALEDALREYRYAPIELRPRLPRLPMHKKNRALVCTLDSQLKNLFESSEDLVDTHSILYCGAVAACRLANVKFTNSDTTTRPKPAVPAWQCRIERRIDGARVLIGKLHCFREGNTRPRVMRFVRRAFSGTGISPQEYMSRVTERIDFLKQKVYAWANRIRQYKRRVDRYSQNRMFQSDERWVYRAWEQPEQNMTDVCRPDDATTSSCWSSIWSVPVCHTEADWMRDVGRMCEPIPEMEPILITPPDIARAVRPLPNWKSPGPDGLHNFWLKWLSSSHTCLASQFQSSLESGSLPQFLTTGVTHLLHKSGSPAEPKNYRPITCLSTVYKLLTSILRAKINTHIDKNSIMSASQNGCRKGSRGTKELLLIDMAISQQVRRSRKDLSTCWIDYKKAYDSVPHTWLMRVLELYKVDATLRAFLESCMGQWRTVLRYPGCRQIQGNNEPVWIKRGIFQGDSLSPLWFCLALNPLSTLLEDSGLGYRLRRGGQVISHLLYMDDLKLFAPNKLRLMELLKVTETFSSAIRMEFGVDKCAVMYVKRGEIMESEGIQLSDSIHLRSLSSSESYKYLGMSEALGINVTDMKQSLRERFFGRLKKVLNSLLSGGNKVRAFNGWVMPVLMYSFGILKWTQTELDALDRRVRTLLTANRMHHPRSSVMRLYIPRKCGGRGFLNAKTLHNREVCSLREYFLKAEVGMHRDVVAVDKGFTPLSMAKENWRKPVVITTDDRKEVWQGKELHGRFYRALHGPDVDFLASVSWLRFGDLFGETEGFVCAIMDEVMLTNNYRKYIMKDGTVDVCRACHRPGESIRHIISGCSRLANGEYLHRHNQVARIIHQQLALKYKLVESEVPYYKYVPDPVLEKDHVTLYWDRSIITDRTIVANKPDIVVIDRSARRVMIVDVTIPHDVNLVKAEKEKQIKYLDLAHEVVDMWNVKSAVIVPIVVNGLMAKSLDDHLSKLSLGG

SEQ ID NO: 29017 - protein, 1202 aa, Noctua pronuba
MLTRAAARRARLSPPDSSLSSASPLPESSPIVSAVTPAVAVASSSSDEYFSPPTSPTPVRRQGRGRPPTSLGLRGQPAPSRVPATGGCVQRMRWTHSINENVMRAYYGSTEGGTNLTTYRVRMLSLFQVLEPTVNVSAQRLSDQVRVIQRNHMLDDAVLDRLRSEVLSNRIVLTPSQTVVQTTAIDVSPPRSNPAVVEEDDRVATVSSQCNDRLRSALEDALREYRYTPTELRPRLPRLPMHKKNRALVCALDSQLKNLFESSEDLVDTHSILYCGAVAACRLANVKFTNSDAATRPKPAVPAWQCRIERRIDGARVLIGKLHCFREGNTRPRVMRFVRRAFSGTGISPQEYMSRVTERIDFLKQKVYAWANRIRRYKRRVDRYSQNRMFQSDERWVYRAWERPEQNMTDVCRPDDATTSSFWSSIWSVPVCHTEGDWMRAVERVCEPIPEMEPILITSLDVARSVRPLPNWKSPGPDGLHNFWLKWLSSSHTCLASQFQSSLESGALPQFLTTGVTHLLHKSGNPAEPKNYRPITCLSTVYKLLTSILRAKINTHIDKNSIMSASQNGCRNGSRGTKELLLIDMAISQQVRRSRKDLSTCWIDYKKAYDSVPHTWLMRVLELYKIDATLRTFLESCMGQWRTVLRYPGCRQIQGNDEPVWIKRGIFQGDSLSPLWFCLALNPLSTLLEDSGLGYRLRRGGQVISHLLYMDDLKLFAPNKLRLMELLKVTETFSSAIRMEFGVDKCAVMYVKRGEIMESEGIQLSDSIHLRSLSSSESYKYLGMSEALGINVTDMKQSLRERFFGRLKKVLNSLLSGGNKVRAFNGWVMPVLMYSFGILKWTQTELDALDRRVRTLLTANRMHHPRSSVMRLYIPRKCGGRGFLNAKTLHNRELCSLREYFLKAEVGMHRDVVAVDKGLTPLSMAKENWRKPVVLTTDDRKEVWQGKELHGRFYRALHGPDVDFLASVSWLRFGDLFGETEGFVCAIMDEVMLTNNYRKYIMKDGTVDVCRACHRPGESIRHIISGCSRLANGEYLHRHNQVARIIHQQLALKYKLVESEVPYYKYVPDPVLEKDHVTLYWDRSIITDRTIVANKPDIVVIDRSARRVMIVDVTIPHDENLVKAEKEKQIKYLDLAHEVVDMWNVNSAIIVPIVVTANGLIAKSLDDHLSRLSLGGWIKGLIQKAVLLDTARIVRRFLSLEP

SEQ ID NO: 29018 - protein, 1207 aa, Ochropleura plecta
MLTRRRAQEQQALPSSPGSSLSSASQPPGRATRVSAVSPVAAVASSSSDEFFSPPSSPPPPPTRQRRGRGRPPAGLGSRGQQAPIRVPAAGGNVSRMRWTSFINANVMRAYYGSTEGGTNLTAYRVRMLSLFQDLEPTINVSAQRLSDQVRVIQRNHLLDDAALDRLRSEVLSNRVILTTPQTAVQASAIDVTQPRSNPAVVEEDDRVATVSSQCNDRLRSALEDALRDYRSTPAELRPRLPRLPMHKKNRALVCALDSQLKNLFESSEDLVDTHSILYCGAVAVCRLANVKFPNCDVATRPKPSVPAWQCRIERRIGEARALIGKLYCFREGNTRPRVMRFVRRAFSGTGISPQEYMSRTTERIDFLKQKVYAWANRIQRYKRRVDRYSQNRMFRSDERWVYRAWERPEQSVTDVCRPDDVATSSFWHSIWSVRVCHTEAGWMRDVERVCETIPEMEPILITSLDIASAVRPLPNWKSPGPDGLHNFWLKWLSSSHTRLASQFQSCLESGSLPQFLTTGVTHLLYKSGSPAEPKNYRPITCLSTVYKLLTSILRAKINSHIVKNSIISASQNGCRNGSRGTKELLLIDMAISQQVRRSRKDLSTCWIDYKKAYDSVPHTWLKRVLELYKIDTTLRTFLESCMGQWRTVLRYPGCRQIQGNDEPVWIKRGIFQGDSLSPLWFCLALNPLSTLLEDSGLGYRLRRGGQVISHLFYMDDLKLFAPNKLRLMELLKVTETFSNAIRMEFGVDKCAVMYVKRGEIMESEGIHLSDSIHLRSLSSSESYKYLGMSEALGINVADMKQLLRERFFGRLKKVLKSLLSGGNKVRAFNSWVMPVLMYSFGILKWTQTELDALDRRVRTLLTANRMHHPRSSVMRLYIPRKCGGRGFLNAKTLHNREVCSLREYFLKTDVGMHRDVVAVDKGLTPLSMAKENWRKPVVLTTDYRKEVWQGKELHGRFYKALHGPDVDFLASVSWLRFGDLFGETEGFVCAIMDEVMLTNNYRKYIMKDGTVDVCRACHRPGESIRHIISGCSRLANGEYLHRHNQVARIIHQQLALKYNLVESEVPYYKYVPDPVLEKDHVTLYWDRSIITDRTIVANKPDIVVIDRSVRRVMIIDVTIPHDENLVKAEKEKQLKYLDLAHEVVDMWNVNSAIIVPIVITANGLIAKSLDEHLSKLSLGGWIKGLIQKAVLLNTARIVRRFLSLEP

SEQ ID NO: 29019 - protein, 962 aa, Ochropleura plecta
MHKKNRALVCALDSQLKNLFESSDNLVDTHSILYCGAVAVCRVANVKFQNSDVATRPKPSVPVWQCRIERRIDEARVLIGKLYCFREGNTRPRVMRFVRRAFSGTGISPQEYLSCTTERIDFLKQKVYAWANRIRRYKRRVDRYSQNRMFRSDERWVYRAWERPEQSVTDVCRPDDVATSSFWHSIWSVPVCHTEADWMRDVERVCETIPEMEPILITSIDIASAVRPLPNWKSPGPDGLHNFWLKWLSSSHTRLASQFQSCLESGSLPQFLTTGITHLLYKSGSPAEPKNYRPITCLSTVYKLLTSILRAKINSHIDKNSIMSVSQNGCRNGSRGTKELLLIDMAISQQVRRSRKDLSTCWIDYKKAYDSVPHTWLKRVLELYKIDATLRAFLESCMGQWRTVLRYPGCRQIQGNDEPVWIKRGIFQGDSLSPLWFCLALNPLSTLLEDSGLGYRLRRGGKVISHLLYMDDLKLFAPNKLRLMELLKVTETFSNAIRMEFGVDKCAVMYVKRGEIMESEGIQLSDSIHLRSLSSSESYKYLGMSEALGINVADMKQLLRERFFGRLKKVLKSLLSGGNKVRAFNSWVMPVLMYSFGILKWTQTELDALDRRVRTLLTGNRMHHPRSSVMRLYIPRKCGGRGFLNAKTLHNREVCSLREYFLKTDVGMHRDVVAVDKGLTPLSMAKENWRKPVVLTTNDRKVVWQGKELHGRFYKALHGPDVDFLASVSWLRFGDLFGETEGFVCAIMDEVMLTNNYRKYIMKDGTVDVCRACHRPGESIRHIISGCSRLANSEYLHRHNQVARVIHQQLALKYNLVESEVPYYKYVPDPVLEKDHVTLYWDRSIITDRTIVANKPDIVVIDRSARRVMIIDVTIPHDENLVKAEKEKQLKYLDLAHEVVDMWNVNSAIIVPIVVTANGLIAKSLDEHLSKLSLGGWIKGLIQKAVLLDTARIVRRFLSLEP

SEQ ID NO: 29020 - protein, 962 aa, Ochropleura plecta
MHKKNRALVCALDSQLKNLFESSEDLVDTHSILYCGAVAVCRLANVKLPNCDVATRPKPSVPAWQCRIERRIDEARALIGKLYCFREGNTRPRVMRFVRRAFSGTGISPQEYMSRTTERIDFLKQKVYAWANRIQRYKRRVDRYSQNRMFRSDERWVYRAWERPEQSVTDVCRPDDVATSSFWHSIWSVRVCHTEAGWMRDVERVCETIPEMEPILITSLDIASAVRPLPNWKSPGPDGLHNFWLKWLSSSHTRLASQFQSCLESGSLPQFLTTGVTHLLYKSGSPAEPKNYRPITCLSTVYKLLTSILRAKINSHIVKNSIISASQNGCRNGSRGTKELLLIDMAISQQVRRSRKDLSTCWIDYKKAYDSVPHTWLKRVLELYKIDTTLRTFLESCMGQWRTVLRYPGCRQIQGNDEPVWIKRGIFQGDSLSPLWFCLALNPLSTLLEDSGLGYRLRRGGQVISHLFYMDDLKLFAPNKLRLMELLKVTETFSNAIRMEFGVDKCAVMYVKRGEIMESEGIHLSDSIHLRSLSSSESYKYLGMSEALGINVADMKQLLRERFFGRLKKVLKSLLSGGNKVRAFNSWVMPVLMYSFGILKWTQTELDALDRRVRTLLTANRMHHPRSSVMRLYIPRKCGGRGFLNAKTLHNREVCSLREYFLKTDVGMHRDVVAVDKGLTPLSMAKENWRKPVVLTTDYRKEVWQGKELHGRFYKALHGPDVDFLASVSWLRFGDLFGETEGFVCAIMDEVMLTNNYRKYIMKDGTVDVCRACHRPGESIRHIISGCSRLANGEYLHRHNQVARIIHQQLALKYNLVESEVPYYKYVPDPVLEKDHVTLYWDRSIITDRTIVANKPDIVVIDRSARRVMIIDVTIPHDENLVKAEKEKQLKYLDLAHEVVDMWNVNSAIIVPIVITANGLIAKSLDEHLSKLSLGGWIKGLIQKAVLLNTARIVRRFLSLEP

SEQ ID NO: 29021 - protein, 1199 aa, Hecatera dysodea
MLTRAATLRARHPPPDSPLSSASPPPDIESQVSPAAAVASSSSDEYFSPPTSPPPVRRQGRGRPPRGLGPRGQPAPSRVPATGGCVQRMRWTQSMNENVMRAYYGSTEGGTNLTAYRLRMLSLFQDLEPTVNVSAQRLSDQVRVIQRSHRLDDAALERLRSEVLNNLIISTQTQTAVQAPVSGANTPQANNDSDEVDDRVVTVSSQYNNRLRSALEDALREYRSTPTELRPRLPRLPMHKKNRALVCALDSLLQNTFVSSENLVDTHSILYCGAVAACRLANVKFPSGDEAIRPKPAAPARQCRIERRIDEARALIGKLYCFREGNTRPRVMRFVRRAFAGTGISPHEYTSRITERIDFLKQKVCAWANRIRRYKRRADRYSQNRMFQSDERWVYRTWERPEQSVTDECRPDDIATTTFWRSIWSVPVRHTEGDWMRDVERVCEAIPQMEKITITPTDIATAVRPLPNWKSPGPDGLHNFWLKWYSSSHAVLASQFQSSLESGSLPQFLTTGITHLLHKTGSPAEPKNYRPITCLSTVYKLLTSILRVKINEHIESNSIMSSSQNGCRKGSRGTKELLLIDMAISQQVRRSRKDLSTCWIDYKKAYDSVPHTWLMKVLELYKIDATLRTFLESCMRQWKTVLRYPGCRPIQGSDEPIWIKRGIFQGDSLSPLWFCLALNPLSTLLEDSGLGYRLRRGGQAISHLLYMDDLKLFAPNNLRLMELLKVTETFSSAIRMEFGVDKCAVMHVKKGEIMESEGIQLSDSIQVRSLSSTETYKYLGMSEALGINGADMKQSLKERFFGRLKKVLNSLLSGGNKVRAFNGWVMPVLMYSFGILKWTQTELDALDRRVRTLLTANRMHHPRSSVMRLYIPRKCGGRGFLNAKTLHNREMCSLREYFLETDVGMHRDVVAVDKGLTPLSMAKENWRKPVIHTTDDRKEVWKGKELHGRFYRALYGSDVDFSASVAWLRFGDLFGETEGFVCAIMDEVILTNNYRRHIMKDGTVDVCRACHRPGESIRHIISGCSRLANSEYLHRHNQVARIIHQQLALKYKLVNSEVPYYKYVPDPVLENDHVTLYWDRSIITDRTIVANKPDIVVIDRLARRTMIIDVSIPHDENLVKAEKEKQIKYLDLAHEVVDMWDVDSAVIVPIIVTANGLMAKSFDDHLSKLALRSWVKGLIQKAVLLDTARIVRRFLSLQP

SEQ ID NO: 29022 - protein, 1199 aa, Hecatera dysodea
MLTRAATLRARHPPPGSPLSSASPPPDIESQVSPAAAVASSSSDEYFSPPTSPPPVRRQGRGRPPRGLGPRGQPAPSRVPATGGCVQRMRWTQSMNENVMRAYYGSTEGGTNLTAYRVRMLSLFQDLEPAVNVSAQRLSDQVRVIQRSHRLDDAALERLRSEVLNNLIISTQTQTAVQVPASGASIPRANNDSDEVDERVVTVSSQCNDRLRSALEDALREYRSTPAELRPRLPRLPMHKKNRALVCALDSLLQNTFLSSENLVDTHSILYCGAVAACRLANVKFPSCDEAIRPKPAAPAWQCRIERRIDEARALIGKLYCFREGNTRPRVMRFVRRAFAGTGISPHEYTSRITERIDFLKQKVCAWANRIRRYKRRVDRYSQNRMFQSDERWVYRNWERPEQSVTDVYRPDDIATSTFWRSIWSVPVRHTEGDWMRGVERVCEAIPQMEKIIITSADVATAVRPLPNWKSPGPDGLHNFWLKWYSSSHALLASQFQSSLESGSLPQFLTTGVTHLLHKTGSPAEPKNYRPITCLSTVYKLLTSILRVKINKHIESNSIMSYSQNGCRKGSRGTKELLLIDMAISQQVRRSRKDLSTCWIDYKKAYDSVPHTWLMKVLELYKIDTTLRTFLESCMRQWKTVLRYPGCRPIQGNDEPVWIKRGIFQGDSLSPLWFCLALNPLSTLLEDSGLGYRLKRGGQAISHLLYMDDLKLFAHNKLRLMELLKVTKTFSSAIRMEFGVDKCAVMHVKKGEIVESEGVQLSDSIQVRSLSSTETYKYLGMSEALGINGADMKQSMKERFFGRLKKVLNSLLSGGNKVRAFNGWVMPVLMYSFGILKWTQTELDALDRRVRTLLTANRMHHPRSSVMRLYIPRKCGGRGFLNAKTLHNREMCSLREYFLKADVGMHRDVVAVDKGLTPLSMAKENWRKPVILTTDDRKEVWRGKELHGRFYRALHGSDIDFSASVAWLRFGDLFGETEGFVCAIMDEVILTNNYRRHIMKDGTVDVCRACHCPGESIRHIISGCSRLANGEYLHRHNQVARIIHQQLALKYKLVDSEVPYYKYVPDPVLENDHVTLYWDRSIITDRTIVANKPDIVVIDRLARRTMIIDVTIPHDENLVKAEKEKHIKYLDLAHEVVDMWNVDSAVIVPIVVTANGLMAKSFDDHLSKLALHGWLKGLIQKAVLLDTARIVRRFLSLEP

SEQ ID NO: 29023 - protein, 1111 aa, Phlogophora meticulosa
MRWTQSMNENVMRAYYGSTEGGTNLTAYRARMLSLFQVLEPTVNVSAQRLSDQVRVIQRNHRLDDTALDRLRSEVLNNHIVLTSTQTAVQASIINATPSPSNHVSEEADDRVVTVSSQCNEKLRSALEDALREYRSTPTELRPRLPRLPMHKKNRALVCNLDSLLKDLFESSGDLVDTHSILYCAAVAACRLANVKFPNNDVAIRPKPAVPAWQSRIERRIDGARVLIGKLYCFREGNTRPRVMRFVRRAFAGTGISPREYMSRIVERIDFLKQKVYAWANRIRRYKRRVDRYSQNRMFQSDERWVYRAWERPEQDVADVHRPDDTTTNTFWRNIWSVPVCHTEAHWIRDVERVCETITEMEKIIITPLDVARAVRPLPNWKAPGPDGLHNFWLKWLGSSHTRLASQFQSCLESGSLPQFLTTGITHLLYKSGSTTEPKNYRPITCLSTVYKLLTSILRAKIAEHIVGNSIMSASQNGCRNGSRGTKELLLIDMAISQQVRRCHKDLSTCWIDYKKAYDSVPHAWLMRVLELYKIDATLRTFLESCMGQWRTVLRYPGCRQIQGNDEPIWIKRGIFQGDSLSPLWFCLALNPLSTLLEDSGLGYRLRRGGQVISHLLYMDDLKLFASNNLQLMELLKITESFSSTIRMEFGVDKCAVMHVKRGEIVESEGIQLPDSIQLRSLSSSDNYKYLGMSEALGINVTDMKQSLKERFFGRLKKVLNSLLSGGNKVRAFNGWVMPVLMYSFGILKWTQTELDALDRRVRTLLTANRMHHPRSSVMRLYIPRKCGGRGFLNAKTLYNREVCNLRDYFLKTEVGMHRDVVAVDKGLTPLSMAKENWRKPVVLTTDDRKQVWQSKELHGRFYRALHGPDVDFIASVSWLRFGDLFGETEGFVCAIMDEVILTNNYRKHIMKDGTVDMCRACHRPGESIRHIISGCSRLANGEYLHRHNQVARIIHQQLALRYKLVESEVPYYKYVPDPVLEDDHVTLYWDRSIITDRTIVANKPDIVVIDRLARRAMIVDVTIPHDENLVKAEKEKQIKYLDLAHEVVDMWNVDSAVIVPIVVTANGLLAKSLDDHLSRLSLHGWIKGLIQKAVLLDTARIVRRFLSLQP

SEQ ID NO: 29024 - protein, 888 aa, Xestia xanthographa
MRFVRRAFSGTEISPQEYMFRVTERIDFLKQKVYAWANRIRRYKRRVDRYSQNRMFQSDERWVYRAWERSEQNMTNVCRPDDVATSSFWRSIWSVPVCHTEADWMRDVERVCEPIPEMEPIFITPLDVARAVRPLPNWKSPGPDGLHNFWLKWFSSSHTCLASQFQSSLESGSLPQFLTTGVTHLLHKSGSPAEPKNYRPITCLSTIYKLLTSILRVKINTHIDKNSIMSASQNGCRNGFRGTKELLLIDMAISQQVRRSRKDLSTCWIDYKKAYDSVPHTWLMRVLELYKIDTTLRTFLESCMGQWRTVLRYPGCRQIQGSDEPVWIKRGIFQGDSLSPLWFCLALNPLSTLLENSGLGCRLRKDGHVISHLLYMDDLKLFAPNKLRLMELLKVTETFSSAIRMEFGVDKCAVMYVKRGEIMESEGLQLSDPIHLRSLSSSETYKYLGMSEALGINITDMKQSLKERFFGRLRKVLNSLLSGGNKVRAFNGWVMPVLMYSFGILKWTQTELDALDRRVRTLLTESRMHHPRSSVMRLYIPRKCGGRGFLNAKTLHNREVCSLREYFLKAEVGMHRDVVAVDKGLTPLSMAKENWHKPEVLTTDNRKEVWQGKELHGRFYRALHGPDVDFLASVFWLRFGDLFGETEGFVCAIMDEVMLTNNYRKYIMRDGTVDVCRACHLPGESIRHIISGCSRLANGEYLHRHNQVSRIIHQQLALKYKLVESEVPYYKYVPDPVLEKDHVTLYWDRSIITDRTIVANKPDIVMIDRSARRVMIIDVTIPHDENLVKAEKEKQIKYLDLAHEVRDMWNMNSVIIVPIVVTANGLIAKSFDDHLSKLFRRLDQGPDSEGGTPRYGSHCEEVPVSAALTTGGLDPAPDTGWTSIFLYF

SEQ ID NO: 29025 - protein, 1199 aa, Xestia xanthographa
MITRAAARRARLPTPDSLLSSASPPPDHGSPVSPVAAVASSSSDEYFSPPTSPPPVRRAGRGRPPKGLGLRGQQAPSRVPATGGCVQRMKWTQSMNENVMRAYYGSTEGGTNLTAYRVRMLSLFQDLEPTVNVSAQRLSDQVRVIQRNHRLDDAALDRLRSEVLSNLIILTPTQTAVQVSDINVTLPRSIPAVVEEDDRVATVSSQCNDRLRNALEDALREYRFTPTELRPRLPRLPMHKKNRALVCALDSQLKNIFESSENLVDTHSILFCGAVAACRLANVKFPNCDVATRPKPAVPAWQRRIERRIDGARVLIGKLYCFREGNTRPRVMCFVRRAFSGTEISPQEYMSRATERIDFLKQKVYAWANRIRRYKRRVDRYSQNRMFQSDERWVYRAWERPEQNMTDVCRPDDAATSSFWRSIWSVPVCHTEADWMRDVERVCEPIPEMEPIFITPLDLARAVRPLPNWKSPGPDGLHNFWLKWFSSSHTCLASQFQSSLESGSLPQFLTTGVTHLLHKSGSPAEPKNYRPITCLSTIYKLLTSILRMKINTHIDKNSIMSASQNGCRNGSRGTKELLLIDMAISQQVRRSRKDLSTCWIDYKKAYDSVPHTWLMRVLELYKVDTTLRTFLESCMGQWKTVLRYPGCRQIQGSDEPVWIKRGIFQGDSLSPLWFCLALNPLSTLLENSGLGCRLRKDGQVISHLLYMDDLKLFAPNKLRLMELLKVTETFSSAIRMEFGVDKCAVMYVKRGEIMESEGLQLSDSIHLKSLSSSETYKYLGMSEALGINVTDMKQSLRERFFGRLRKVLNSLLSGGNKVRAFNGWVMPVLMYSFGILKWTQTELDALDRRVRTLLTESRMHHPRSSVMRLYIPRKCGGRGFLNAKTLHNREVCSLREYFLKAEVGMHRDVVAVDKGLTPLSMAKENWHRPEVLTTDDRKEVWQGKELHGRFYRALHGPDVDFLASVSWLRFGDLFGETEGFVCAIMDEVMLTNNYRKYIMKDGTVDVCRACHLPGESIRHIISGCSRLANGEYLHRHNQVARIIHQQLALKYKLVESEVPYYKYVPDPVLEDDHVTLYWDRSIITDRTIVANKPDIVMMDRSARRVMIIDVTIPHDENLVKAEKEKQIKYLDLAHEVRGMWNMNSVIIVPIVVTANGLIAKSFDDHLSKLSLGGLIKGLIQKAVLLDTARIVRRFLSLQP

SEQ ID NO: 29026 - protein, 1201 aa, Xestia xanthographa
MMLTRAAAARRAHLPTPDSSLSSASPPPDPRSPVSPVAAVASSSSDEYFSPPTSPPPVRRAGRGRPPTSLGLRGRQAPSRVPATGGCVQRMKWTQSMNENIMRAYYGSTEGGTNLTAYRVRMLSLFQDLEPTVIVSAQRLSDQVRVIQRSHRLDDAALDRLRSEVLSNLIVLTPTQTAVQVSAIDATPPRLNPAVVEEDDGVATVSSQCNDRLRSALEDALHEYRSTPTELRPRLPRLPMHKKNRALVCALDSQLKNIFESSENLVDTHSILFCGAVAACRIANVKFPNCDVATRPKPAVPAWQRRIERRIDGARVLIGKLYCFREGNTRPRVMRFVRRAFSGTEISPQEYMSRATERIDFLKQKVYAWANRIRRYKRRVDRYSQNRMFQSDERWVYRAWERPEQNMTDVCRPDDAATSSFWRSIWSVPVCHTEADWMRDVERVCKPIPEMEPIFITPLDVARAVRPLPNWKSQGPDGLHNFWLKWFSSSHTCLASQFQSSLESGSLPQFLTTGVTHLLHKSGSPAEPKNYRPITCLSTIYKLLTSILRVKINTHIDKNSIMSASQNGCRNGSRGTKELLLIDMAISQQVRRSRKDLSTCWIDYKKAYDSVPHTWLMRVLELYKVDTTLRTFLESCMGQWKTVLRYPGCRQIQGSDEPVWIKRGIFQGDSLSPLWFCLALNPLSTLLENSGLGCRLRKDGQVISHLLYMDDLKLFAPNKLRLMELLKVTETFSSAIRMEFGVDKCAVMYVKRGEIMESEGLQLSDSIHLKSLSSSETYKYLGMSEALGINVTDMKQSLRERFFGRLRKVLNSLLSGGNKVRAFNGWVMPVLMYSFGILKWTQTELDALDRRVRTLLTESRMHHPRSSVMRLYIPRKCGGRGFLNAMTLHNREVCSLREYFFKAEVGMHRDVVAVDKGLTPLSMAKENWHRPEVLTTDDRKEVWQGKELHGRFYRALHGPDVDFIASVSWLRFGDLFGETEGFVCAIMDEVMLTNNYRKYIMKDGTVDVCRACHLPGESIRHIISGCSRLANGEYLHRHNQVARIIHQQLALKYKLVESEVPYYKYVPDPVLENDHVTLYWDRSIITDRTIVANKPDIVMVDRSARRVMIIDVTIPHDENLVKAEKEKQIKYLDLAHEVRGMWNMNSVIIVPIVVTANGLIAKSFDDHLSKLSLGGWIKGLIQKAVLLDTARIVRRFLSLQP

SEQ ID NO: 29027 - protein, 1199 aa, Xestia xanthographa
MLTRAAARRARLTSPESSLSSASPPPDPGSPVSPVAAVASSSSDEYFSPPTSPPPVRRAGRGRPPKGLGLRGQQAPSRVPATGGCVQRMKWTQSINENVMRAYYGSTEGGTNLTAYRVRMLSLFQDLEPTVNVSAQRLSDQVRVIQRNHRLDDAALDRLRSEVLSNLIILTPTQTAVHTSVNNVTLPRSNPDVVEEDDRVATVSSQCNYRLRSALEDAFREYRSTPTELRPRLPRLPMHKKNRALVSALDSQLKNIFESSENLVDTHSILFCGAVAACRLANVKFPNCDVATRPKPAVPAWQCRIERRIDEARVLIGKLYCFREGNTRPRVMRFVRRAFSGTEISPQEYMSRVTERIDFLKQKVYAWANRIRRYKRRVDRYSQNRMFQSDERWVYRAWERPEQNMTDVCRPDDAATSSFWRSIWSVPVCHTESDWMRDVERVCKPIPEMEPILITPLDIAKAVRPLPNWKSPGPDGLHNFWLKWFSSSHTCLASQFQSSLESGSLPQFLTTGVTHLLHKLGSPTEPKNYRPITCLSTIYKLLTSILRVKINTHIDKNSIMFASQNGCRNGSRGTKELLLIDMAISQQVRRSRKDLSTCWIDYKKAYDSVPHTWLMRVLELYKIDTTLRAFLESCMGQWKTVLRYPGCRQIQGSDEPVWIKRGIFQGDSLSPLWFCLALNPLSTLLENSGLGCRLRKDGQVISHLLYMDDLKLFAPNKLRLMELLKVTETFSSAIRMEFGVDKCAVMYVKRGEIMESEGLQLSESIHLRSLSSSETYKYLGMSEALGINVTDMKQSLKERFFGRLRKVLNSLLSGGNKVRAFNGWVMPVLMYSFGILKWTQTELDALDRRVRTLLTETRMHHPRSSVMRLYIPRKCGGRGFLNAKTLHNREVCSLREYFLKAEVGMHRDVVAVDKGLTPLSMAKENWHKPEVLTTDDRKEVWQGKELHGRFYRALHGPDVDFLASVFWLRFGDLFGETEGFVCAIMDEVMLTNNYRKYIMKDGTVDVCRACHLPGESIRHIISGCSRLANGEYLHRHNQVARIIHQQLALKYKLVESEVPYYKYVPDPVLEKDHVTLYWDRSIITDRTIVANKPDIVMIDRSARRVMIIDVTIPHDENLVKAEKEKQIKYLDLAHEVRDMWNMNSVIIVPIVVTANGLIAKSFDDHISKLSLGGWIKGLIQKAVLLDTARIVRRFLSLQP

SEQ ID NO: 29028 - protein, 1202 aa, Cosmia trapezina
MLTRSAARARPPPPDSSLSSASPPPVSSPTVSAVTTPAAVVASSSSDEYFSPPTSPIPVRRQGRGRPPKSLGLGGQPAPSRVPAAGGCVQRMRWTQSMNENVMRAYYGSTEGGTNFTAYRVRMLSLFQELEPTVNVSAQRLSDQVRVIQRNHRLDDAALDRLRSEILSDRIVSTQAQTAVQDSIIDALPPRSNHVVEEEDDRVATVSSQSNDRLRSALEDAFREYRSTPTELRPRLPRLPMHKKNRALVCALDSHLKDFFESSEDLVDTHSILYCAAVAACRLANVKFPNCDGANRSKPAVPAWQCRIERRIDGARVLIGKLYCFREGNTRPRVMRFVRRAFSGTGISPPEYMSRVTERIDFLKQKVCAWASRIRRYKRRVDRYTQNRMFQSDERWVYRAWERPEQNVTDVCRPDDAATSAFWRSIWSVPVCHAEAGWMQDVERVCETIPEMETVLITPLDVARAVRPFPNWKSPGPDGLHNFWLKWLISSHTCLASQFQSSLESGSLPQFLTTGVTHLLHKSGSPVEPKNYRPITCLSTVYKLLTSILRAKINTHIASNSIISASQNGCRTGSRGTKELLLIDMAISQQVRRSRKDLSTCWIDYKKAYDSVPHTWLLKVLELYKIDATLRTFLESCMGQWRTVLRYPGCRQIRGNDEPVWIKRGIFQGDSLSPLWFCLALNPLSTLLEDSGLGYRLRRGGQVISHLLYMDDLKLFAPNELRLMELLKVTETFSGAIRMEFGVDKCAVMHVKRGEIMESEGIQLTDSIYLRSLSSSETYKYLGMSEALGINVAGVKQSLKERFFGRLKKVLISLLSGGNKVRAFNGWVMPVLMYSFGILKWTQTELDALDRRVRTLLTANRMHHPRSSVMRLYIPRKCGGRGFLNAKTLHNREVCSLREYFLKADVGMHRDVVAVDKGLTPLSMAKENWRKPVLLTTDDRRKVWQSKELHGRFYRALHEPGVDFLASVSWLRFSDLFGETEGFVCAIMDEVILTNNYRRYIMKDGTVDVCRACHRPGESIRHIISGCSRLANGEYLHRHNQVARIIHQQLALKYKLVDSEVPYYKYVPDPVLENDHVTLYWDRSIITDRTIVANKPDIVVIDRLARRAMIVDVTIPHDGNLVKAEKEKEIKYLDLAREVVDMWNVDSAVIVPIVVTANGLIADSLDQHLSRLSLGGWIKGQIQKAVLLDTARIVRRFLSLQP

SEQ ID NO: 29029 - protein, 1202 aa, Cosmia trapezina
MLTRSAARARPPPPDSSLSSASPPPVSSPTVSAVTTPAAVVASSSSDEYFSPPTSPIPVRRQGRGRPPKSLGLGGQPAPSRVPAAGGCVQRMRWTQSMNENVMRAYYGSTEGGTNLTAYRVRMLSLFQELEPTINVSAQRLSDQVRVIQRNHRLDDAALDRLRSEILSDRIVSTQAQTAVQDSIIDALPPRSNHVVEEEDDRVATVSSQSNDRLRSALEDAFREYRSTPTELRPRLPRLPMHKKNRALVCALDSHLKDFFESSEDLVDTHSILYCAAVAACRLANVKFPNCDGANRSKPAVPAWQCRIERRIDGARVLIGKLYCFREGNTRPRVMRFVRRAFSGTGISPPEYMSRVTERIDFLKQKVCAWASRIRRYKRRVDRYTQNRMFQSDERWVYRAWERPEQNVTDVCRPDDAATSAFWRSIWSVPVCHAEAGWMQDVERVCETIPEMETVLITPLDVARAVRPFPNWKSPGPDGLHNFWLKWLISSHTCLASQFQSSLESGSLPQFLTTGVTHLLHKSGSPVEPKNYRPITCLSTVYKLLTSILRAKINTHIASNSIISASQNGCRTGSRGTKELLLIDMAISQQVRRSRKDLSTCWIDYKKAYDSVPHTWLLKVLELYKIDATLRTFLESCMGQWRTVLRYPGCQQIRGSDEPVWIKRGIFQGDSLSPLWFCLALNPLSTLLEDSGLGYRLRRGGQVISHLLYMDDLKLFAPNELRLMELLKVTETFSGAIRMEFGVDKCAVMHVKRGEIMESEGIQLTDSIYLRSLSSSETYKYLGMSEALGINVADVKQSLKERFFGRLKKVLISLLSGGNKVRAFNGWVMPVLMYSFGILKWTQTELDALDRRVRTLLTANRMHHPRSSVMRLYIPWKCGGRGFLNAKTLHNREVCSLREYFLKADVGMHRDVVAVDKGLTPLSMAKENWRKPVLLTTDDRRKVWQSKELHGRFYRALHEPGVDFLASVSWLRFSDLFGETEGFFCAIMDEVILTNNYRRYIMKDGTVDVCRACHRPGESIRHIISGCSRLANGEYLHRHNQVARIIHQQLALKYKLVDSEVPYYKYVPDPVLENDHVTLYWDRSIITDRTIVANKPDIVVIDRLARRAMIVDVTIPHDGNLVKAEKEKQIKYLDLAHEVVDMWNVDSAVIVPIVVTANGLIADSLDQHLSRLSLGGWIKGQIQKAVLLDTARIVRRFLSLQP

SEQ ID NO: 29030 - protein, 962 aa, Cosmia trapezina
MHKKNRALMCALDSLLKDFFESSENLVDTHSILYCAAVAACRLANVKFPNCDGATRPKPAVPAWQCRIERRIDGARVLIGKLYCFRQGNTRPRVMRFVRRAFSGTGISPPEYMSRVTERIDFLKQKVCAWASRIRRYKRRIDRYTQNRMFQSDERWVYRAWERPEQNVTDVCRPDDAATSAFWRSIWSVPVCHAEAGWMKDVDRVCEAIPEMEPVLITPLDVARAVRPLPNWKSPGPDGLHNFWLKWLISSHTRLASQFQSSLESGSLPQFLTTGVTHLLHKSGSPAEPKNYRPITCLSTIYKLLTSILRAKINMHIDSNSIMSTSQNGCRNGSRGTKELLLIDMAISQQVRRSRKDLSTCWIDYKKAYDSVSHAWLMRVLELYKIDATLRTFLESCMGQWRTVLRYPGCRRIRGNDEPVRIKRGIFQGDSLSPLWFCLALNPLSTLLEDSGLGYRLRRGGQVISHLLYMDDLKLFAPNKLRLMELLKVTESFSSAIRMEFGVDKCAVMHVKRGEIMESEGIQLSDSIHLRSLSSSETYKYLGMSEALGINVADMKQSLRERFFGRLKKVLISLLSGGNKVRAFNGWVMPVLMYSFGILKWTQTELDALDRRVRTLLTANRMHHPRSSVMRLYIPRKCGGRGFLNAKTLHNREVCSLREYFLKSVVGMHRDVVAVDKGLTPLSMAKENWRKPVVLTTDDRKKVWQSKELHGRFYRALHGPGVDFLASVSWLRFGDLFGETEGFVCAIMDEVILTNNYRRYIMKDGTVDVCRACHRPGESIRHIISGCSRLANGEYLHRHNQVARIIHQQLALKYKLVDSEVPYYKYVPDPVLENDHVTLYWDRSIITDRTIVANKPHIVVIDRLARRAMIVDVTIPHDGNLVKAEKEKQIKYLDLAHEVVDMWNVDSAVIVPIVVTANDLIADSLDQHLSRLSLGGWIKGQIQKAVLLDTARIVRRFLSLQP

SEQ ID NO: 29031 - protein, 974 aa, Mamestra brassicae
MHTWATSSPTTLPFQCCRCASKLALKVPRPFLEASRRLLIIIIILFCGAVAACRIANVKFPSCDEAIRPKPAAPAWQCRIERRIDEARALIGKLYCFSEGNTRPRVMRFVRRAFSGTGISPREYTFRVTERIDFLKQKVCAWANRIRRYKRRVDRYSQNRMFQSDERWVYRAWERPEQSVTDVYRPDDVATSTFWRSIWSVPICHAEGGWMRDVERVCEAIPQMEKITITTLDIAKAVRPLPNWKSPGPDGLHNFWLKWYSSSHALLASQFQSSLESGSLPQFLTTGITHLLHKTGSPAEPKNYRPITCLSTVYKLLTSILRAKINEHIESNSIMSASQNGCRKGSRGTKELLLVDMAISQQVRRSRKDLSTCWIDYKKAYDSVPHTWLMKVLELYKIDATLRTFLESCMRQWKTVLRYPGCQPIQGSDEPVWIKRGIFQGDSLSPLWFCLALNPLSTLLEDSGLGYRLRRGGQAISHLLYMDDLKLFAPNNLRLMELLKVTETFSSAIRMEFGVDKCTVMHVKKGEIMESEGIQLSDSIQVRSLSSTESYKYLGMSEALGINGTDMKQSLRERFFGRLKKVLNSLLSGGNKVRAFNGWVMPVLMYTFGILKWTQTELDALDRRVRTLLTANRMHHSRSSVMRLYIPRKCGGRGFLNAKTLHNREMCSLREYFLKADVGMHRDVVAVDKGLTPLSMAKENWRKPVILTTDDRKEVWKGKELHGRFYRALYGSDVDFSASVAWLRFGDLFGETEGFVCAIMDEVILTNNYRKHIMKDGTVDVCRACHRPGESIRHIISGCSRLANGEYLHRHNQVARIIHQQLALKYKLVDSEVPYYKYVPDPVLENDHVTLYWDRSIITDRTIVANKPDIVVIDRLARRTMIIDVTIPHDENLVKAEKEKQIKYLDLAHEVVDMWNVDSAVIVPIVITANGLMAKSFDDHLSKLALRGWIKGLIQKAVLLDTARIVRRFLSLEP

SEQ ID NO: 29032 - protein, 1199 aa, Mamestra brassicae
MLTRAALQRARPPPPDPSLSSASPPPDIGSPLSPAVAVASSSSDEYFSPPTSPTPVRRQGRGQPPRGLGPRGQPAPSRVPATGGCVQRMRWTQSMNENVMRAYYGSTEGGTNLTAYRVRMLSLFQDLEPTVNVLAQRLSDQVRVIQRNHRLDDAALDRLRSEVLNNLIISTPTQTAVQAPVNGRITPRPNNVSDEVDDRVVTVSSQCNDRLRSALEDALREYRSTPTELRPRLPRLPMHKKNRALVCALDSLLQNIFESSESLVDTHSILYCGAVAACRIANVKFPGCDEAIRPKPAAPAWQRRIERRIDETRALIGKLYCFREGNTRPRVMRFVRRAFSGTEISPRDFTSRVTERIDFLKQKVCAWASRIRRYKRRVDRYSQNRMFQSDERWVYRAWERPEQSVTDVCRPDDVATSIFWRSIWSVPICHAEGGWMRDVERVCEAIPQMEKITITTLDVAKAVRPLPNWKSPGPDGLHNFWLKWYSSSHALLASQFQSSLDSGSLPQFLTTGVTHLLHKTGSPTEPKNYRPITCLSTVYKLLTSILRAKINEHIESNSIMSASQNGCRKGSRGTKELLLIDMAISQQVRRSRKDLSTCWIDYKKAYDSVPHTWLMKVLELYKIDATLRTFLESCMRQWKTVLRYPGCRPIQGSDEPVWIKRGIFQGDSLSPLWFCLALNPLSTLLEDSGLGYRLRRGGQAISHLLYMDDLKLFAPNNLRLMELLKVTETFSSAIRMEFGVDKCAVMHVKKGEIMESEGIHLSDSIQVRSLSSTETYKYLGMLEALGINGTDMKQSLRERFFGRLKKVLNSLLSGGNKVRVFNGWVMPVLMYTFGILKWTQTELDALDRRVRTLLTANRMHHPRSSVMRLYIPRKCGGRGFLNAKTLHNREMCSLREYFLKADVGMHRDVVAVDKGLTPLSMAKENWRTPVILTTDDRKEVWKGKELHGRFYRALHGSDVDFSASVAWLRFGDLFGETEGFVCAIMDEVILTNNYRRHIMKDGTVDMCRACHRPGESIRHIISGCSRLANGEYLHRHNQVARIIHQQLALKYNLVDSEVPYYKYVPDPVLENDHVTLYWDRSIITDRTIVANKPDILVIDRLARRTMIIDVTIPHDENLVKAEKEKQIKYLDLAHEVVDMWNVESAVIVPIVVTANGLMAKSFDDHLSKLALRSWVKGLIQKAVLLDTARIVRRFLSLEP

SEQ ID NO: 29033 - protein, 1200 aa, Mamestra brassicae
MITRAAARRAHPPPPGSSLSSASPTPDIGSQVSPVVAVASSSSDEYFSPPTSPTPVRRQGRGRPPRSLGSRGQPALSRVPAAGGCVQRMRWTQSMNENVMRAYYGSTEGGELNLTAYRVRMLSLFQDLEPTVNVSAQRLSDQVRVIQHNCRLDDAALERLRSEVLSNLIISTPTQTVVQAPASGAITSRPNNGSDEVDDRVVTVSSQCNDRLRSALEDALREYRLTPTELRPRLPRLPMHKKNRALVCALDSLLQNIFESSESLVDTHSILFCGAVAACRIANVKFPSCDEAIRPKPAAPAWQCRIERRIDEARALIGKLYCFREGNTRPRVMRFVRRAFSGTGISSREYTFRVTERIDFLKQKVCAWANRIRRYKRRVDRYSQNRMFQSDERWVYRDWERPEQSVTDVYRPDDVATSTFWRSIWSVPICHAEGGWMRDVERVCEAIPRMEKITITTLDIAKAVRPLPNWKSPGPDGLHNFWLKWYSSSHALLASQFQSSLESGSLPQFLTTGITHLLHKTGSPAEPKNYRPITCLSTVYKLLTSILRAKINEHIESNSIMSASQNGCRKGSRGTKELLLIDMAISQQVRRSRKDLSTCWIDYKKAYDSVPHTWLMKVLELYKIDATLRTFLESCMRQWKTVLRYPGCQPIQGSDEPVWIKRGIFQGDSLSPLWFCLALNPLSTLLEDSGLGYRLRRGGQAISHLLYMDDLKLFPPNNLRLMELLKVTETFSSAIRMEFGVDKCAVMHVKKGEIMESEGIQLSDSIQVRSLSSTESYKHLGMSEALGINGTDMKQSLRERFFGRLKKVLNSLLSGGNKVRAFNGWVMPVLMYTFGILKWTQTELDALDKRVRTLLTANRMHHPRSSVMRLYIPRKCGGRGFLNAKTLHNREMCSLREYFLKADVGMHRDVVAVDKGLTPLSMAKENWRKPVILTTDDRKEVWKGKELHGRFYRALYGSDVDFSASVAWLRFGDLFGETEGFVCAIMDEVILTNNYRKHIMKDGTVDVCRACHRPGESIRHIISGCARLANGEYLHRHNQVARIIHQQLALKYKLVDSEVPYYKYVPDPVLENDHFTLYWDRSIITDRTIVANKPDIVVIDRLARRTMIIDVTIPHDENLVKAEKEKKIKYLDLAHEVVDMWNVDSAVIVPIVITANGLMAKSFDDHLSKLALRGWIKGLIQKAVLLDTARIVRRFLSLEP

SEQ ID NO: 29034 - protein, 1199 aa, Mamestra brassicae
MITRAAARRAHPPPPGSSLSSASPTPDIGSQVSPVVAVASSSSDEYFSPPTSPTPVRRQGRGRPPRSLGSRGQPALSRVPAAGGCVQRMRWTQSMNENVMRAYYGSTEGGTNLTAYRVRMLSLFQDLEPTVNVSAQRLSDQVRVIQHNCRLDDAALERLRSEVLSNLIISTPTQTVVQAPASGAITPRPNNGSDEVDDRVVTVSSQCNDRLRSALEDALREYRLTPTELRPRLPRLPMHKKNRALVCALDSLLQNIFESSESLVDTHSILFCGAVAACRIANVKFPSCDEAIRPKPAAPAWQCRIERRIDEARALIGKLYCFREGNTRPRVMRFVRRAFSGTEISSREYTFRVTERIDFLKQKVCAWANRIRRYKRRVDRYSQNRMFQSDERWVYRAWERPEQSVTDVYRPDDVATSTFWRSIWSVPICHAEGGWMRDVERVCEAIPQMEKITITTLDIAKAVRPLPNWKSPGPDGLHNFWLKWYSSSHALLASQFQSSLESGSLPQFLTTGITHLLHKTGSPAEPKNYRPITCLSTVYKLLTSILRAKINEHIESNSIMSASQNGCRKGSRGTKELLLIDMAISQQVRRSRKDLSTCWIDYKKAYDSVPHTWLMKVLELYKIDATLRTFLESCMRQWKTVLRYPGCQPIQGSDEPVWIKRGIFQGDSLSPLWFCLALNPLSTLLEDSGLGYRLRRGGQAISHLLYMDDLKLFAPNNLRLMELLKVTETFSSAIRMEFGVDKCAVMHVKKGEIMESEGIQLSDSIQVRSLSSTESYKYLGMSEALGINGTDMKQSLRERFFGRLKKVLNSLLSGGNKVRAFNGWVMPVLMYTFGILKWTQTELDALDRRVRTLLTANRMHHPRSSVMRLYIPRKCGGRGFLNAKTLHNREMCSLREYFLKADVGMHRDVVAVDKGLTPLSMAKENWRKPVILTTDDRKEVWKGKELHGRFYRALYGSDVDFSASVAWLRFGDLFGETEGFVCAIMDEVILTNNYRKHIMKDGTVDVCRACHRPGESIRHIISGCSRLANGEYLHRHNQVARIIHQQLALKYKLVDSEVPYYKYVPDPVLENDHVTLYWDRSIITDRTIVANKPDIVVIDRLARRTMIIDVTIPHDENLVKAEKEKQIKYLDLAHEVVDMWNVDSAVIVPIVITANGLMAKSFDDHLSKLALRGWIKGLIQKAVLLDTARIVRRFLSLEP

SEQ ID NO: 29035 - protein, 1049 aa, Mamestra brassicae
MNENVMRAYYGSTEGGTNLTAYRVRMLSLFQDLEPTVNVSAQRLSDQVRVIQRNHMLDDAALDRLRSEVLNNLIISTPTQTAVQAPVNGRITSRPNNVSDEVDDRVVTVSSQCNDRLRSALEDALREYGSTPTELRPRLPRLPMHKKNRALVCALDSLLQNIFESSESLVDTHSILYCGAVAACRIANVKFPGCDEAIRPKPAAPGWQRRIERRIDETRALIGKLYCFREGNTRPRVMRFVRRTFSGTEISPRDFTSRVTERIDFLKQKVCAWASRIRRYKRRVDRYSQNRMFQSDERWVYRAWERPEQSVTDVCRPDDVATSIFWRSIWSVPICHAEGGWMRDVERVCEAIPQMEKNTITTLDVAKAVRPLPNWKSPGPDGLYNFWLKWYSSSHALLASQFQSSLDSGSLPQFLTTGVTHLLHKTGSPTEPKNYRPITCLSTVYKLLTSILRAKINEHIESNSIMSASQNGCRKGSRGTKELLLIDMAISQQVRRSRKDLSTCWIDYKKAYDSVPHTWLMKVLELYKIDATLRTFFESCMRQWKTVHRYPGCRPIQGSDEPVWIKRGIFQGDSLSPLWFCLALNPLSTLLEDSGLGYRLRRGGQAISHLLYMDDLKLFAPNNLRLMELLKVAETFSSAISMEFGVDKCAVMHVKKGEIMESEGIHLSDSIQVRSLSSTETYKYLGMLEALGINGTDMKQSLRERFFGRLKKVLNSLLSGGNKVRAFNGWVMPVLMYTFGILKWTQTELDALDRRIRTLLTANRMHHPRSSVMRLYIPRKCGGRGFLNAKTLHNREMCSLREYFLKADVGMHRDAVAVDKGLTPLSMAKENWRTPVILTTDDRKEVWKGKELHGRFYRALHGSDVDFSASVAWLRFGDLFGETEGFVCAIMDEVILTNNYRRHIMKDGTVDMCRACHRPGESIRHIISGCSRLANGEYLHRHNQVARIIHQQLALKYNLVDSEVPYYKYVPDPVLENDHVTLYWDRSIITDRTIVANKPDIVVIDRLARRTMIIDVTIPHDQNLVKAEKEKQIKYLDLAHEVVDMWNVE

SEQ ID NO: 29036 - protein, 1111 aa, Noctua fimbriata
MRWTHSINENVMRAYYGSTEGGTNLTAYRVGMLSLFQVLEPTVNVSAQRLSDQVRVIQRNHMLDDAVLDRLRSEVLSNRIVLTPAQTAVQASVIDATPPRFNPAVVEEDDKVAVVSSQCNDRLRSALEDALREYRSTPTELRPRLPRLPMHNKNRALVCALDSQLENIFESSENLVDTHSILYCGAVAACRLANVKFPNCDVATRPKPAVPAWQRRIERRIDGARVLIGKLHCFREGNTRPRVMRFVRRAFSGTGISPQEYMSRATERIDFLKQKVYAWANRIRRYKRRVDRYSQNRMFQSDERWVYRAWERPELNMTDVCRPDDAATSSFWRSIWSVPVCHTEADWMCDVERVCEPIPEMEPILITPLDIARAVRPLPNWKSPGPDGLHNFWLKWLSSSHTCLASQFQSSLESGSLPQFLTTGVTHLLHKSGSPAEPKNYRPITCLSTVYKLLTSILRAKINTHIDKNSIMSASQNGCRNGSRGTKELLLIDMAISQQVRRSRKDLSTCWIDYKKAYDSVPHTWLMRVLELYKIDATLRAFLESCMGQWRTVLRYPGCRQIQGNDEPVWIKRGIFQGDSLSPLWFCLALNPLSTLLEDSGLGYRLRRGGQVISHLLYMDDLKLFAPNELRLMELLKVTETFSSAIRMEFGVDKCAVMYVKQGEIMESEGIQLSDSIHLRTLSSTESYKYLGMSEALGINVTDMKQSLKERFFGRLNKVLHSLLSGGNKVRAFNGWVMPVLMYSFGVLKWTQTELDALDRRVRTLLTANRMHHPRSSVMRLYIPRKCGGRGFLNAKSLHNREMCSLREYFLKVEVGMHRDVVAVDKGLTPLSMAKENWRKPEVLTTDDRKEVWQGKELHGRFYRALHGPDVDFLASVSWLRFGDLFGETEGFVCAIMDEVMLTNNYRKYIMKDGTVDVCRACHRPGESIRHIISGCSRLANGEYLHRHNQVARIIHQQLALKYKLVESEVPYYKYVPDPVLEKDHVTLYWDQSIITDRTIVANKPDIVVIDRSARRVMIVDVTIPHDENLVKAEKEKQIKYLDLAHEVVDMWNVNSAIIVPIVVTANGLIAKSLDDHLSRLSLGGWIKGLIQKAVLLDTARIVRRFLSLEP

SEQ ID NO: 29037 - protein, 1202 aa, Noctua fimbriata
MITRAAYRRARLPPPDPSLSSASPPPESSPIVSAVTPAVAVASSSSDEYFSPPTSPTPVRRQGRGRPPRSLGLRGHPAPSRVPAAGGCVQRMRWTHSINENVMRAYYGSTEGGTNLTAYRVGMLSLFQVLEPTVNFSAQRLSDQVRVIQRNHMLDDAVLDRLRSEVLSNRIVLTPAQTAVQASVIDATPPRFNPAVVEEDDRVAVVSSQCNDRLRSALEDALREYRSTPTELRPRLPRLPMHNKNRALVCALDSQLENIFESSENLVDTHSILYCGAVAACRLANVKFPNCDVATRPKPAVPAWQRRIERRIDGARVLIGKLHCFREGNTRPRVMRFVRRAFSGTGISPQEYMSRVTERIDFLKQKVYAWANRIRRYKRRVDRYSQNRMFQSDERWVYRAWERPELNMTDVCRPDDAATSSFWRSIWSVPVCHTEADWMRDVERVCEPIPEMEPILITRLDIARAVRPLPNWKSPGPDGLHNFWLKWLSSSHTCLASQFQSSLESGSLPQFLTTGVTHLLHKSGSPAEPKNYRPITCLSTVYKLLTSILRAKINTHIDKNSIMSASQNGCRSGSRGTKELLLIDMAISQQVRRSRKDLSTCWIDYKKAYDSVPHTWLMRVLELYKIDATLRAFLESCMGQWRTVLRYPGCGQIQGNDEPVWIKRGIFQGDSLSPLWFCLALNPLSTLLEDSGLGYRLRRGGQVISHLLYMDDLKLFAPNKLQLMELLKVTETFSSAIRMEFGVDKCAVMYVKQGVIMESEGIQLSDSIHLRTLSSTESYKYLGMSEALGINVTDMKQSLKERFFGRLNKVLHSLLSGGNKVRAFNGWVMPVLMYSFGVLKWTQTELDALDRRVRTLLTANRMHHPRSSVMRLYIPRKCGGRGFLNAKSLHNREMCSLREYFLKVEVGMHRDVVAVDKGLIPLSMAKENWRKPEVLTTDDRKEVWQGKELHGRFYRALHGPDVDFLASESWLRFGDLFGETEGFVCAIMDEVMLTNNYRKYIMKDGTVDVCRACHRPGESIRHIISGCSRLANGEYLHRHNQVARIIHQQLALKYKLVESEVPYYKYVPDPVLEKDHVTLYWDQSIITDRTIVANKPDIVVIDRSARRVMIVDVTIPHDENLVKAEKEKQIKYLDLAHEVVDMWNVNSAIIVPIVVTANGLIAKSLDDHLSKLSLGGWIKGLIQKAVLLDTARIVRRFLSLEP

SEQ ID NO: 29038 - protein, 1202 aa, Noctua fimbriata
MITRAAHRRARLPPPDPSLSSASPPSESSPIVSAVTPAVAVASSSSDEYFSPPTSPTTVRRQGRGRPPRSLGLRGHPAPSRVPAAGGCVQRMRWTHSINENVMRAYYGSTEGGTNLTAYRVGMLSLFQVLEPTVNISAQRLSDQVRVIQRNHMLDDAVLDRLRSEVLSNRIVLTPAQTAVQTSVIDATPPRFNPAVVEEDDRVAMVSSQCNDRLRSALEDALREYRSTPTELRPRLPRLPMHNKNRALVCALDSQLKNIFESSENLVDTHSILYCGAVAACRLANVKFPNYDVATRPKPAVPAWQRRIERRIDGARVLIGKLHCFREGNTRPRVMRFVRRAFSGTGISPQECMSRVTERIDFLKQKVYAWANRIRRYKRRVDRYSQNRMFQSDERWVYRAWERPELNMANVCRPDDATTSSFWRSIWSVPVCHTEADWMRDVERVCEPIPEMEPILITPLDIARAVRPLPNWKSPGPDGLHNFWLKWLSSSHTCLAFQFQSSLESGSLPQFLTTGVTHLLHKSGSPAEPKNYRPITCLSTVYKLLTSILRAKINTHIDKNSIMSASQNGCRNGSRGTKELLLIDMAISQQVRRSRKDLSTCWIDYKKAYDSVPHTWLMRVLELYKIDATLRAFLESCMGQWRTVLRYPGCRQIQGNDEPVWIKRGIFQGDSLSPLWFCLALNPLSTLLEDSGLGYRLRRGGQVISHLLYMDDLKLFAPNKLRLMELLKVTETFSSAIRMEFGVDKCAVMYVKQGEIMESEGIQLSDSIHLRTLSSTESYKYLGMSEALGINVTDMKQSLKERFFGRLNKVLHSLLSGGNKVRAFNGWVMPVLMYSFGVLKWTQTELDALDRRVRTLLTANRMHHPRSSVMRLYIPRKCGGRGFLNAKSLHNREICSLREYFLKVEVGMHRDVVAVDKGLTPLSMAKENWRKPEVLTTDDRKEVWQGKELHGRFYRALHGPDVDFLASVSWLRFGDLFGETEGFVCAIMDEVMLTNNYRKYIMKDGTVDVCRACHRPGESIRHIISGCSRLANGEYLHRHNQVARIIHQQLALKYKLVESEVPYYKYVPDPVLEKDHVTLYWDQSIITDRTIVANKPDIVVIDRSARRVMIVDVTIPHDENLVKAEKEKQIKYLDLAHEVVDMWNVNSAIIVPIVVTANGLIAKSLDDHLSKLSLGGWIKGLIQKAVLLDTARIVRRFLSLEP

SEQ ID NO: 29039 - protein, 1218 aa, Noctua fimbriata
MVPLGKTGRQTFGPLTTCNNCHRSTNDIIIIIIISSASQPPRRATSVSTVSPVAAVASSSSDEFFSPPSTPPPSPRRRGRGRPPAGLGPRGQPAPNRVPAAGGNVSRMRWTQSINEQVMRAYYGATEGGTNLTAYRVGMLSLFQVLEPTVNVSAQRLSDQVRVIQRNHMLDDAVLDRLRSEVLSNRIVLTPAQTAVQASVIDATPPRFNPAVIEEDDRVAVVSSQCNDRLRSALEDALREYRSTPTELRPRLPRLPMHNKNRALVCALDSQLENIFESSENLVDTHSILYCGAVAACRLANVKFPNCDVATRPKPAVPAWQRRIERRIDGARVLIGKLHCFREGNTRPRVMRFVRRAFSGTGISPQEYMSRVTERIDFLKQKVYAWANRIRRYKRRVDRYSQNRMFQSDERWVYRAWERPELNMTDVCRPDDAATSSFWRSIWSVPVCHTEADWMRDVERVCEPIPEMEPILITPLDIARAVRPLPNWKSPGPDGLHNFWLKWLSSSHICLASQFQSSLESGSLPQFLTTGVTHLLHKSGSPAEPKNYRPITCLSTVYKLLTSILRAKINTHIDKNSIMSASQNGCRNGSRGTKELLLIDMAISQQVRRSRKDLSTCWIDYKKAYDSVPHTWLMRVLELYKIDATLRAFLESCMGQWRTVLRYPGCRQIQGNDEPVWIKRGIFQGDSLSPLWFCLALNPLSTLLEDSGLGYRLRRGGQVISHLLYMDDLKLFAPNKLRLMELLKVTETFSSAIRMEFGVDKCAVMYVKQGEIMESEGIQLSDSIHLRTLSSTESYKYLGMSEALGINVTDMKQSLKERFFGRLNKVLHSLLSGGNKVRAFNGWVMPVLMYSFGVLKWTQTELDALDRRVRTLLTANRMHHPRSSVMRLYIPRKCGGRGFLNAKSLHNREMCSLREYFLKVEVGMHRDVVAVDKGLTPLSMAKENWRKPEVLTTDDRKEVWQGKELHGRFYRALHGPDVDFLASVSWLRFGDLFGETEGFVCAIMDEVMLTNNYRKYIMKDGTVDVCRACHRPGESIRHIISGCSRLANGEYLHRHNQVARIIHQQLALKYKLVESEVPYYKYVPDPVLEKDHVTLYWDQSIITDRTIVANKPDIVVIDRSARRVMIVDVTIPHDENLVKAEKEKQIKYLDLAHEVVDMWNVNSAIIVPIVVTANGLIAKSLDDHLSRLSLGGWIKGLIQKAVLLDTARIVRRFLSLEP

SEQ ID NO: 29040 - protein, 868 aa, Noctua fimbriata
MRFVRRAFSGTGISPQEYMSRVTERIDFLKQKVYAWANRIRRYKRRVDRYSQNRMFQSDERWVYRAWERPELNMTDVCRPDDAATSSFWRSIWSVPVCHTEADWMRDVERVCEPIPEMEPILITPLDVARAVRPLPNWKSPGPDGLHNFWLKWLSSSHTCLASQFQSSLESGSLPQFLTTGVTHLLHKSGSPAEPKNYRPITCLSTVYKLLTSILRAKINTHIDKNSIMSASQNGCRNGSRGTKELLLIDMAISQQVRRSRKDLSTCWIDYKKAYDSVPHTWLMRVLELYKIDATLRAFLESCMGQWRTVLRYPGCRQIQGNDEPVWIKRGIFQGDSLSPLWFCLALNPLSTLLEDSGLGYRLRRGGQVISHLLYMDDLKLFAPNKLQLMELLKVTETFSSAIRMEFGVDKCAVMYVKRGEIMESEGIQLSDFIHLRSLSSSESYKYLGMSEALGINVTDMKQSLKERFFGRLNKVLHSLLSGGNKVRAFNGWVMPVLMYSFGVLKWTQTELDALDRRVRTLLTANRMHHPRSSVMRLYIPRKCGGRGFLNAKSLHNREMCSLREYFLKVEVGMHRDVVAVDKGLTPLSMAKENWRKPEVLTTDDRKEVWQGKELHGRFYRALHGPDVDFLASVSWLRFGDLFGETEGFVCAIMDEVMLTNNYRKYIMKDGTVDVCRACHRPGESIRHIISGCSRLANGEYLHRHNQVARIIHQQLALKYKLVESEVPYYKYVPDPVLEKNHVTLYWDQSIITDRTIVANKPDIVVIDRSARRVMIVDVTIPHDENLVKAEKEKQIKYLDLAHEVVDMWHVNSAIIVPIVVTANGLIAKSLDDHLSKLSLGGWIKGLIQKAVLLDTARIVRRFLSLEP

SEQ ID NO: 29041 - protein, 1202 aa, Noctua fimbriata
MITIAAYRRARLPPPDPSLSSASPPPESSPIVSAVTPAVAVASSSSDEYFSPPTSPTPVRRQGRGRPPRSLGLRGHPAPSRVPAAGGCVQRMRWTHSINENVMRAYYGSTEGGTNLTAYRVGMLSLFQVLEPTVNVSAQRLSDQVRVIQRNHMLDDAVLDRLRSEVLSNRIVLTPAQTAVQASVIDATPPRFNPAVVEEDDRVAVVSSQCNDRLRSALEDALREYRSTPTELRPRLPRLPMHNKNRALVCALDSQLENIFESSKNLVDTHSILYCGAVAACRLANVKFSNCDVATRPKPAVPAWQRRIERRIDGARVLIGKLHCFREGNTRPRVMRFVRRAFSGTGISPQEYMSRVTERIDFLKQKVYAWANRIRRYKRRVDRYSQNRMFQSDERWVYRAWERPELNMTDVCRPDDAATSSFWRSIWSVPVCHTEADWMRDVERVCEPIPEMEPILITPLDIARAVRPLPNWKSPGPDGLHNFWLKWLSSSHTCLASQFQSSLESGSLPQFLTTGVTHLLHKSGSPAEPKNYRPITCLSTVYKLLTSILRAKINTHIDKNSIMSASQNGCRNGSRGTKELLLIDMAISQQVRRSRKDLSTCWIDYKKAYDSVPHTWLMRVLELYKIDATLRAFLESCMGQWRTVLRYPGCRQIQGNDEPVWIKRGIFQGDSLSPLWFCLALNPLSTLLEDSGLGYRLRRGGQVISHLLYMDDLKLFAPNKLQLMELLKVTEIFSSAIRMEFGVDKCAVMYVKRGEIMESEGIQLSDFIHLRSLSSSESYKYLGMSEALGINVTDMKQSLKERFFGRLNKVLNSLLSGGNKVRAFNGWVMPVLMYSFGVLKWTQTELDALDRRVRTLLTANRMHHPRSSVMRLYIPRKCGGRGFLNAKSLHNREMCSLREYFLKVEVGMHRDVVAVDKGLTPLSMAKENWRKPEVLTTDDRKEVWQGKELHGRFYRALHGPDVDFLASVSWLRFGDLFGETEGFVCAIMDEVMLTNNYRKYIMKDGTVDVCRACHRPGESIRHIISGCSRLANGEYLHRHNQVARIIHQQLALKYKLVESEVPYYKYVPDPVLEKNHVTLYWDQSIITDRTIVANKPDIVVIDRSARRVMIVDVTIPHDENLVKAEKEKQIKYLDLAHEVVDMWHVNSAIIVPIVVTANGLIAKSLDDHLSKLSLGGWIKGLIQKAVLLDTARIVRRFLSLEP

SEQ ID NO: 29042 - protein, 1199 aa, Noctua fimbriata
MITRAAYRRARLTTPDSPLSSASPPPDPGSPVLPAAAVASSSSDEYFSPPTSPTPVRRQGRGRPPRSLGLRGHPAPSRVPAAGGCVQRMRWTHSINENVMRAYYGSTEGGTNLTAYRVRMLSLFQVLEPTVNVSAQRLSDQVRVIQRNHMLDDAVLDRLRSEVLSNRVILTPAQTAVQASVIDATPPRFNPAVVEEDDRVAVVSNQCNDRLRSALEDALREYRSTPTELRPRLPRLPMHNKNRALVCALDSQLKNIFESSENLVDTHSILYCGAVAACRLANVKFPNCDVATRPKPAVPAWQYRIERRIDGARVLIGKLHCFREGNTRPRVMRFVRRAFSGTGISPQEYMSRVTERIDFLKQKVYAWANRIRRYKRRVDRYSQNRMFQSDERWVYRAWERPELNMTDVCRPDDAATSSFWRSIWSVPVCHTEADWMRDVERVCEPIPEMEPILITPLDIARAVRPLPNWKSPGPDGLHNFWLKWLSSSHTCLASQFQSSLESGSLPQFLTTGVTHLLHKSGSPAEPKNYRPITCLSTVYKLLTSILRAKINTHIDKNSIMSASQNGCRNGSRGTKELLLIDMAISQQVRRSRKDLSTCWIDYKKAYDSVPHTWLMRVLELYKIDATLRAFLESCMGQWRTVLRYPGCRQIQGNDEPVWIKRGIFQGDSLSPLWFCLALNPLGTLLEDSGLGYRLRRGGQVISHLLYMDDLKLFAPNKLQLMELLKVTENFSSAIRMEFGVDKCAVMYVKQGEIMESEGIQLSDSIHLRTLSSTESYKYLGMSEALGINVTDMKQSLKERFFGRLNKVLHSLLSGGNKVRAFNGWVMPVLMYSFGVLKWTQTELDALDRRVRTLLTANRMHHPRSSVMRLYIPRKCGGRGFLNAKSLHNREMCSLREYFLKVEVGMHRDVVAVDKGLTPLSMAKENWRKPEVLTTDDRKEVWQGKELHGRFYRALHGPDVDFLASVSWLRFGDLFGETEGFVCAIMDEVMLTNNYRKYIMKDGTVDVCRACHRPGESIRHIISGCSRLANGEYLHRHNQVARIIHQQLALKYKLVESEVPYYKYVPDPVLEKDHVTLYWDQSIITDRTIVANKPDIVVIDRSARRVMIVDVTIPHDENLVKAEKEKQIKYLDLAHEVVDMWNVNSAIIVPIVVTANGLIAKSLDDHLSKLSLGGWIKGLIQKAVLLDTARIVRRFLSLEP

SEQ ID NO: 29043 - protein, 1202 aa, Noctua fimbriata
MLTRAATRRARLPPPDPSLSSASPPPESSPIVSAVTPAVAVASSSSDEYFSPPTSPTPVRRQGRGRPPRSLGLRGHPAPSRVPAAGGCVQRMRWTHSINENVMRAYYGSTEGGTNLTAYRVGMLSLFQVLEPTVNVSAQRLSDQVRVIQRNHMLDDAVLDRLRSEVLSNRIVLTPAQTAVQASVIDATPPRFNPAVVEEDDRVTVVSSQCNDRLRSALEDALREYRSTPTELRPRLPRLPMHNKNRALVCALDSQLENIFESSENLVDTHSILYCGAVAACRLANVKFPNCDVATRPKPAVPAWQRRIERHIDGARVLIGKLHCFREGNTRPRVMRFVRRAFSGTGISPQEYMSRVTERIDFLKQKVYAWANRIRRYKRRVDRYSQNRMFQSDERWVYRAWERPELNMTDVCRPDDAATSSFWRSIWSVPVCHTEADWMRDVERVCEPIPEMEPILITPLDIARAVRPLPNWKSPGPDGLYNFWLKWLSSSHPCLASQFQSSLESGSLPQFLTTGVAHLLHKSGSPVEPKNYRPITCLSTVYKLLTSILRAKINTHIDKNSIMSASQNGCRNGSRGTKELLLIDMAISQQVRRSRKDLSTCWIDYKKAYDSVPHTWLMRVLELYKIDAILRAFLESCMGQWRTVLRYPGCRQIQGNDEPVWIKRGIFQGDSLSPLWFCLALNPLSTLLEDSGLGYRLRRGGQVISHLLYMDDLKLFASNKLQLMELLKVTETFSSAIRMEFGVDKCAVMYVKRGEIMESEGIQLSDFIHLRSLSSSESYKYLGMSEALGINVTDMKQSLKERFFGRLNKVLHSLLSDGNKVRAFNGWVMPVLMYSFGVLKWTQTELDALDRRVRTLLTANRMHHPRSSVMRLYIPRKCGGRGFLNAKSLHNREMCSLREYFLKVEVGMHRDVVAVDKGLTPLSMAKENWRKPEVLTTDDRKEVWQGKELHGRFYRALHGPDVDFLASVSWLRFGDLFGETEGFVCAIMDEVMLTNNYRKYIMKDGTVDVCQACHRPGESIRHIISGCSRLANNEYLHRHNQVARIIHQQLALKYKLVESEVPYYKYVPDPVLEKDHVTLYWDQSIITDRTIVANKPDIVVIDRSARRVMIFDVTIPHDENLVKAEKEKQIKYLDLAHEVVDMWHVNSAVIVPIVVTANGLIAKSLDDHLSKLSLGGWIKGLIQKAVLLDTARIVRRFLSLEP

SEQ ID NO: 29044 - protein, 1111 aa, Noctua fimbriata
MRWTHSINENVMRAYYGSTEGGTNLTAYRVGMLSLFQVLEPTVNVSAQRLSDQVRVIQRNHMLDDAVLDRLRSEVLSNRIVLTPAQTAVQASVIDATPPRFNPAVVEEDDRVAVVSSQCNDRLRSALEDALREYRSTPTELRPRLPRLPMHNKNRALVCALDSQLENIFESSENLVDTHSILYCGAVAACRLANVKFPNFDVATRPKPAVPAWQRRIERRIDEARVLIGKLHCFREGNTRPRVMRFVRRAFSGTGISPQEYMSRVTERIDFLKQKVYAWANRIRRYKRRVDRYSQNRMFQSDERWVYRAWERPELNMTDVCRPDDAATSSFWRSIWSVPVCHTEADWMRDVERVCEPIPEMEPILITRLDIARAVRPLPNWKSPGPDGLHNFWLKWLSSSHTCLASQFQSSLESGSLPQFLTTGVTHLLHKSGSPAELKNYRPITCLSTVYKLLTSILRAKINTHIDKNSIMSASQNGCRSGSRGTKELLLIDMAISQQVRRSRKDLSTCWIDYKKAYDSVPHTWLMRVLELYKIDATLRAFLESCMGQWRTVLRYPGCGQIQGNDEPVWIKRGIFQGDSLSPLWFCLALNPLSTLLEDSGLGYRLRRGGQVISHLLYMDDLKLFAPNKLQLMELLKVTETFSSAIRMEFGVDKCAVMYVKQGEIMESEGIQLSDSIHLRTLSSTESYKYLGMSEALGINVTDMKQSLKERFFGRLNKVLHSLLSGGNKVRAFNGWVMPVLMYSFGVLKWTQTELDALDRRVRTLLTANRMHHPRSSVMRLYIPRKCGGRGFLNAKSLHNREMCSLREYFLKVEVGMHRDVVAVDKGLTPLSMAKENWRKPEVLTTDDRKEVWQGKELHGRFYRALHGPDVDFLASVSWLRFGDLFGETEGFVCAIMDEVMLTNNYRKYIMKDGTVDVCRACHRPGESIRHIISGCSRLANGEYLHRHNQVARIIHQQLALKYKLVESEVPYYKYVPDPVLEKDHVTLYWDQSIITDRTIVANKPDIVVIDRSARRVMIVDVTIPHDENLVKAEKEKQIKYLDLTHEVVDMWNVNSAIIVPIVVTANGLIAKSLDDHLSKLSLGGWIKGLIQKAVLLDTARIVRRFLSLEP

SEQ ID NO: 29045 - protein, 1073 aa, Atethmia centrago
MRIFHPGNKKKKKKKVRVIQRNRRLDDAALDRLRSEVLSNYIISTPAQTAVHTPIIDVIPPRSNHGVEEEDDRAATVSSQCNVRLRSALQDAFREYRSTPIELRARLPRLPMHKKNRALMCALDSQLKVFFESSEDLVDTHLILYCAAVAACRLANVKFPNSDGATRPKPAVPAWQCRIERRIDKARVLIGKLYCFREGNTRPRVMRFVRRAFSGTGISPREYMSHITERIDFLKQKVCAWASRIRRYKRRVDRYTQNRMFQSDERWVYRAWERPKQNVTDVCRPDDATTTAFWRSIWSVPVCHVEADWMRDVERVCETIPEMEVVIITPSDIARAVRPLPNWKSPGPDGLHNFWLKWLTSSHTCLASQFQSSLESGSLPQFMTTGITHLLHKSGSPAEPKNYRPITCLSTVYKLLTSILRAKINTHIDSNSIMSASQNGCRNGSRDTKELLLIDMAISQQVRRSRKDLSTSWIDYKKAYDSVPHTWLMRVLELYKIDTTLRTFLESCMGQWRTVLRYPGCRQIQGNDEPVWIKRGIFQGDSLSPLWFCLALNPLSMQLEDSGLGYRLRRGGQVISHLLYMDDMKIFAPNKLQLMKLLKVTETFSSAIRMEFGVDKCAVMHVKRGEIMESEGIQLSDSIHLRSLSSPESYKYLGMSEALGINVTDMKQSLKERFFGRLKKVLISLLSGGNKVRAFNGWVMPVLMCSFGILKWTQTELDALDRRVRTLLTANRMHHPRSSVMRLYIPRKCGGRGFLNAKTLHNREICSLREYFLKTELGMHRDVVAVDKGLTPLSMANENWCKPVVLTTDDRKEIWQSKELHGRFYRALHEPDVDFLASVSWLRFGDLFGETEGFVCAIMDEVILTNNYRRHIMKDGTVDVCRACHRPGESIRHIISGCSRLANGEYLHRHNQVARIIHQQLALKYKLVDSEVPYYKYVPDPVLENDHVTLYWDRSIISDRTIVANKPDIVVIDRLARRAMIVDVTIPHDDNLVKAEKEKQIKYLDLAHEVVDMWNVNSAVIVPIVVTANGLMARSLNHHLSRLALDGWIKGLIQKAVLLDTARIVRRFLSLEP

SEQ ID NO: 29046 - protein, 998 aa, Atethmia centrago
MKQWISIISQNNSDALRIQYNNNNNNELRPRLPRLPMHKKNRALVCALDSLLKDFFESSEDLVDTHSILYCAAVAACRLANVKFPNCDEATRPKPAVPAWQYRIERRIDGARVLISKLYCFREGNTRPRVMRFVRRAFSGTGISPREYMSRVTERIDFLKQKVCAWASRIRRYKRRVDRYTQNRMFQSDERWVYRAWERPEQNETDMCRPDDATTTAFWRSIWSEPVCHAEADWMRDVERVCETIPEMEVVVITPSDIARAVRPLPNWKSPGPDGLHNFWLKWLTSSHTCLASQFQSSLESGSIPQFLTTGITHLLHKSGSPAEPKNYRPITCLSTVYKLLTSILRAKINTHIDSNSIMSASQNGCRNGSRGTKELLLIDMAISQQVRRSRKDLSTCWIDYKKAYDSVPHTWLMKVLELYKIDTTLRTFLESCMGQWRTVLRYPGCRRIQGNDEPVWIKRGIFQGDSLSPLWFCLALNPLSTLLEDSGLGYRLRRGGQVISHLLYMDDLKIFAPNKLRLMELLKVTETFSGAIRMEFGVDKCAVMHVKRGEIMESEVIQLSDSIHLRSLSSPESYKYLGMSEALGINVTDMKQLLKERFFGRLKKVLISLLSGGNKVRAFNGWVMPVLMYSFGILKWTQIELDALDRRVRTLLTANRMHHPRSSVMRLYIPRKCGGRGFLNAKTLHNREICSLREYFLKAEVGMHRDVVAVDKGLTPLSMAKENWCKPVVLTTDDRKEIWQNKELHGRFYRALHEPDVDFLASVAWLRFGDLFGETEGFVCAIMDEVILTNNYRRHIMKDGTVDVCRACHRPGESIRHIISGCSRLANGEYLHRHNQVARIIHQQLALKYKLVNSEVPYYKYVPDPVLENDHVTLYWDRSIITDRTTVANKPDIVVIDRLARRAMIVDVTIPHDDNLVKAEKEKQIKYLDLAHEVVDMWNVNAAVIVPIVVTANGLMAESLNHHLSRLSLGGWIKGLIQKAVLLDTARIVRRFLSLEP

SEQ ID NO: 29047 - protein, 1202 aa, Atethmia centrago
MLTRSAARARPPPPDSSLSSASPPPVPSPTVSAVTTPAAVVASSSSDEYFSPPTSPTPVRRQGRGRPPKSLGLRGQLAPSRVPAAGGCVQRMRWTQSMNENVMRAYYGSTEGGTNLTAYRVRMLSLFQKLEPTVNVSAQRLSDQVRVIQRNHRLDDAALERLRSEVLSNHIVSTPAQTATHAPIINAIPPRSNHDVEEEDDRVATVSSQCNVRLRSALEDAFREYRSTPTELRPRLPRLPMHKKNRALVCTLDSLLKDFFESSEDLVDTHSILYCAAVAACRLANVKFPNCDGATRPKPAIPAWQCRIERRIDGARVLIGKLYCFREGNTRPRVMRFVRRAFSGTGISPREYMSRVTERIDFLKQKVCAWASRIRRYKRRVDRYTQNRMFQSDERWVYRAWERPEQNETDVCRPDDATTTAFWCSIWSVPVCHAEADWMRDVERVCETIPEMEVVIITPSDIARAVRPLPNWKSPGPDGLHNFWLKWLTSSHTCLASQFQSSLESGSLPQFLTTGITHLLHKSGSPAEPKNYRPITCLSTVYKLLTPILRAKINTHIDSNSIMSASQNGCRNGSRGTKELLLIDMAISQQVRRFRKDLSTCWIDYKKAYDSVPHTWLMRVLEFYKIDTTLRTFLESCMGQWRTVLRYPGCRQIQGNDEPVWIKRGIFQGDSLSPLWFCLALNPLSTLLEDSGLGYRLRRGGQVISHLLYMDDLKIFAPNKLQLMELLKVTETFSSAIRMEFGVDKCAVMHVKRGEIMESEGIQLSNSIHLRSLSSPESYKYLGMSEALGINVTDMKQSLKERFFGRLKKVLISPLSGGNKVRAFNGWVMPVLMYSFGILKWTQTELDALDRRVRTLLTTNRMHHPRSSVMRLYIPRKCGGRGILNAKTLHNREICSLREYFLKTEVGMHRDVVAVDKGLTPLSMAKENWCKPVILTTDDRKEIWQNKELHGRFYRALHEPDVDFLASVSWLRFGDLFGETEDFVCAIMDEVILTNNYRRHIMKDGTVDVCRACHRPGESIRHIISGCSRLANGEYLHRHNQVARIIHQQLALKYKLVNSEVPYYKYAPDPVLENDHVTLYWDRSIITDRTIVANKPDIVVIDRLARRAMIVDVTIPHDENLVKAEKEKQIKYLDLAHEVVDMWNVDSAVIVPIVVTANGLMAESLNHHLSRLSLGGWIKGLIQKAVLLDTARIVRRFLSLES

SEQ ID NO: 29048 - protein, 1111 aa, Atethmia centrago
MRWTQSMNENVMRAYYGSTEGGINLTAYRVRMLSLFQELEPTVNVSAQRLSDQVRVIQRNHRLDDAALDRLRSEVLSNHIVSTPAQTATHAPIIDAIPPRSNHDVEEEDDRVATVSSQCNVRLRSALEDAFREYRSTPTELRPRLPRLPMHKKNRALVCALDSLLKDFFESSEDLVDTHSILYCAAVAACRLANVKFPNCDEATRPKPAVPAWQCRIERRIDGARVLISKLYCFREGNTRPRVMRFVRRAFSGTGISPREYMSRVTERIDFLKQKVCAWASRIRRYKRRVDRYTQNRMFQSDERWVYRAWERPEQNETDMCRPDDATTTAFWRSIWSEPVCHAEADWMRDVERVCETIPEMEVVVITPSDIARAVRPLPNWKSPGPDGLHNFWLKWLTSSHTCLASQFQSSLESGSLPQFLTTGITHLLHKSGSPAEPKNYRPITCLSTVYKLLTSILRAKINTHIDSNSIMSASQNGCRNGSRGTKELLLIDMAISQQVRRSRKDLSTCWIDYKKAYDSVPHTWLMKVLELYKIDTTLRTFLESCMGQWRTVLRYPGCRRIQGNDEPVWIKRGIFQGDSLSPLWFCLALNPLSTLLEDSGLGYRLRRGGQVISHLLYMDDLKIFAPNKLRLMELLKVTETFSGTIRMEFGVDKCAVMHVKRGEIMESEGIQLSDSIHLRSLSSPESYKYLGMSEALGINVTDMKQLLKERFFGRLKKVLISLLSGGNKVRAFNGWVMPVLMYSFGILKWTQTELDALDRRVRTLLTANRMHHPRSSVMRLYIPRKCGGRGFLNAKTLHNREICSLREYFLKAEVGMHRDVVAVDKGLTPLSMAKENWCKPVVLTTDDRKEIWQNKELHGRFYRALHEPDVDFLASVSWLRFGDLFGETEGFVCAIMDEVILTNNYRRHIMKDGTVDVCRACHRPGESIRHIISGCSRLANGEYLHRHNQVARIIHQQLALKYKLVNSEVPYYKYVPDPVLENDHVTLYWDRSIITDRTIVANKPDIVVIDRLARRAMIVDVTIPHDDNLVKAEKEKQIKYLDLAHEVVDMWNVNSTVIVPIVVTANGLMAESLNHHLSRLSLGGWIKGLIQKAVLLDTARIVRRFLSLEP

SEQ ID NO: 29049 - protein, 1061 aa, Atethmia centrago
MDSVYERERHARILQVYRGGTNLTAYRVKMLSLFQELEPAVNVSAQRLSDQVRVIQRNRRLDDATLDRLRSEVLSNYIISTPAQTAVHTPIIDVIPPRSNHGVEEEDDRAATVSSQCNVRLRSALEDAHSILYCAAVAACRLANIKFPNSDGATRPKPAVPAWQCRIERRIDKARVLIGKLYCFREGNTRPRVMRFVRRAFSGTGISPREYMSHITERIDFLKQKVCAWASRIRRYKRRVDRYTQNRMFQSDERWVYRAWERPKQNVTDVCRPDDATTTAFWRSIWSVPVCHVEADWMRDVERVCETIPEMEVVIITPSDIARAVRPLPNWKSPGPDGLHNFWLKWLTSSHTCLASQFQSSLESGSLPQFMTTGITHLLHKSGSPAEPKNYRPITCLSTVYKLLTSILRAKINTHIDSNSIMSASQNGCRNGSRGTKELLLIDMAISQQVRRSRKDLSTCWIDYKKAYDSVPHTWLMRVLELYKIDTTLRTFLESCMGQWRTVLRYPGCRQIQGNDEPVWIKRGIFQGDSLSPLWFCLALNPLSMQLEDSGLGYRLRRGGQVISHLLYMDDLKIFAPNKLQLMKLLKVTETFSSAIRMEFGVDKCAVMHVKRGEIMESEGIQLSDSIHLRSLSSPESYKYLGMSEALGINVTDMKQSLKERFFGRLKKVLISLLSGGNKVRAFNGWVMPVLMYSFGILKWTQTELDALDRRVRTLLTANRMHHPRSSVMRLYIPRKCGGQGFLNAKTLHNREICSLREYFLKTEVGMHRDVVAVDKGLTPLSMAKENWCKPVVLTTDDRKEIWQSKELHGRFYRALHEPDVDFLASVSWLRFGDFFGETEGFVCAIMDEVILTNNYRRHIMKDGTVDVCRACHRPGESIRHIISGCSRLANGEYLHRHNQVARIIHQQLALKYKLVNSEVPYYKYVPDPVLENDHVTLYWDRSIITDRTIVANKPDIVVIDRLARRAMIVDVTIPHDDNLVKAEKEKQIKYLDLAHEVVDMWNVNSAVIVPIVVTANGLMARSLNHHLSRLAFDDWIKGLIQKAVLLDTARIVRRFLSLEP

SEQ ID NO: 29050 - protein, 962 aa, Mesoligia furuncula
MHKKNRALVCALDSQLKNFFESSEDLVDTHSILYCAAVAACRLANVKFPSCDGATRPKPAVPAWQRRIERRIDGARVLIGKLYCFREGNTRPRVMRFVRRAFSGTGISPREYMSRLTERIDFLKQKVCAWASRIRRYKRRVDRYTQNRMFQSDERWVYRAWERPEQNVTDVCRPDDAATSAFWCSIWSVPVCHTEAGWMQDVERVCESIPQMEKILITPSDVARAVRPLPNWKSPGPDGLHNFWLKWLISSHTCLASQFQSSLESGSLPQFLTTGVTHLLHKSGSPAEPKNYRPITCLSTVYKLLTSILRAKINMHIERNSIMSASQNGCRNGSRGTKELLLIDMAISQQVRRSRKDLSTCWIDYKKAYDSVPHTWLMRVLELYKIDATLRTFLESCMGQWKTVLRYPGCRQIQGNDEPVWIKRGIFQGDSLSPLWFCLALNPLSTLLEDSGLGYRLRRGGQVISHLLYMDDLKLFAPNKLRLMELLKVTETFSSAIRMQFGVDKCAVMHVKRGEIKESEGIQLSDSISLRSLSSSESYKYLGMSEALGINDADMKQSLKERFFCRLKKVLISLLSGGNKVRAFNGWVMPVLMYSFGILKWTQTELDALDRRVRTLLTANRMHHPRSSVMRLYIPRKCGGRGFLNAKTLHNREVCSLREYFLKAEVGMHRDVVAVDKGLTPLSMAKENWRKPVVLSTDDRKKVWQSKELHGRFYRALHEPGVDFIASVSWLRFGDLFGETEGFVCAIMDEVILTNNYRRHIMKDGTVDVCRACHRPGESIRHIISGCSRLANGEYLHRHNQVARIIHQQLALKYKLVDSEVPYYKYVPDPVLENDHVTLYWDRSIITDRTIVANKPDIVVIDRLARRTMIVDVTIPHDGNLVKAEKEKEIKYQDLAHEVVDMWNVSSAIIVPIVVSANGLMAESLDQHLSRLSLGGWIKGLIQKAVLLDTARIVRRFLSLEP

SEQ ID NO: 29051 - protein, 1201 aa, Mesoligia furuncula
MLTRSAARRAHLPPPDSSLSPAPPPPEPSPIESAVTPAVAVASSSSDEYFSPPTSPTPVRRQGRGRPPNSLGLRGHPAPSRVPATGGCVQRMRWTQSMNENVMRAYYGSTEGGINLTAYRDRMLSLFQELEPTVNVSAQRLSDQVRVIQRNHRLDDIALDRLRSEVLSNHIVSTSAQTAAQVSTVDAIPPRFDRVEEEDDRVDTVSSQCNVRLRSALEDALREYRSTPTELRPRLPRLPMHKKNRALVCALDSQLKNFFESSEDLVDTHSILYCAAVAACRLANVKFSSCDGATRPKPAVPAWQRRIERRIDGARVLIGKLYCFREGNTRPRVMRFVRRAFSGTGISPREYMSRVTERIDFLKQKVCAWASRIRRYKRRVDRYTQNRMFQSDERWVYRAWERPEQNVTDVCRPDDAATSAFWCSIWSVPVCHTEAGWMQDVERVCESVPEMEKVLITPSDVARAVRPLSNWKSPGPDGLHNFWLKWLISSHTCLASQFQSSLESGSLPQFLTTGVTHLLHKSGSPAEPKNYRPITCLSTVYKLLTSILRAKINKHIESNSIMSASQNGCRNGSRGTKELLLIDMAISQQVRRSRKDLSTCWIDYKKAYDSVPHTWLMRVLELYKIDATLRTFLESCMGQWKTVLRYPGCRQIQGNDEPVWIKRGIFQGDSLSPLWFCLALNPLSTLLEDSGLGYRLRRGGQVISHLLYMDDLKLFAPNKLRLMELLEVTKTFSSAIKMEFGVDKCAVMHVKRGEIMESEGIPLSDSISLRSLSSSESYKYLGMSEALGINDADMKQSLKERFFCRLKKVLISLLSGGNKVRAFNGWVMPVLMYSFGILKWTQTELDALDRRVRTLLTANRMHHPRSSVMRLYIPRKCGGRGFLNAKTLHNREVCSLREYFLKAEVGMHRDVVAVDKGLTPLSMAKENWRKPVVLSTDDRKRVWQSKELHGRFYRALHEPGVDFIASVSWLRFGDLFGETEGFVCAIMDEVILTNNYRRHIMKDGTVDVCRACHRPGESIRHIISGCSRLANGEYLHRHNQVARIIHQQLALKYKLVDSEVPYYKYVPDPVLENDHVTLYWDRSIITDRTIVANKPDIVVIDRLARRTMIVDVTIPHDGNLVKAEKEKQIKYLDLAHEVVDMWNVSSAIIVPIVVSANGLMAESLDQHLSRLSLGGWIKGLIQKAVLLDTARIVRRFLSLEP

SEQ ID NO: 29052 - protein, 1200 aa, Xestia c-nigrum
MITRAASRRRARPPTPDSSLSSASPPPDPGSPVPPVAAVASSSSDEYFSPPTSPTPVRRAGRGRPPRSLGLRGQQAPSRVPATGGCVQRMRWTQSMNENVMRAYYGSTEGGINLTAYRDRMLSLFQDLEPAVNVSAQRLSDQVRVIQRSHRLDDATLDRLRSEVLSNLITITPTQTAVHMSVVNATLPRSNPVVIEEDDRVALVSSQCNDRLRSALDNALREYRSISAELRPRLPRLPMHKKNRALVCALDSQLKNIFESSEDLVDTHSILFCGAVAACRLANVKFPNCDIAIRPKPAVPAWQRRIERRIDGARVLIGKLYCFREGKTRPRVMRFVRRAFSGTEISPQEYMSRVTERIDFLKQKVYAWASRIRRYKRRVDRYSQNRMFQSDERWVYRAWERPQQNMTDVCRPDDAATSSFWRSIWSVPVCHSEADWMRDVERVCEPIPTMEPILITPLDIARAVRPLPNWKSPGPDGLHNFWLKWFSSSHTCLASQFQSSLESGSLPQFLTTGVTHLLHKSGSPAEPKNYRPITCLSTVYKLLTSILRMKINTHVDSNSIMSASQNGCRNGSRGTKELLLIDMAISQQVRRARKDLSICWIDYKKAYDSVPHSWLKRVLELYKIDATLRAFLESCMGQWRTVLRYPGCRQIQGNDEPVWIKRGIFQGDSLSPLWFCLALNPVSTLLENSGLGYRLRKDGQVISHLLYMDDLKLFAPNKLQLMELLKVTETFSSAIGMEFGVDKCAVMYVKRGKIMGSEGLQLSDSIHLRSLSSSESYKYLGMSEALGINVTDMKQSLRERFFGRLKKVLNSLLSGGNKVRAFNGWVMPVLMYSFGILKWTQTELDALDRRVRTLLTENRMHHPRSSVMRLYIPRKCGGRGFLNAKTLHNREVCSLREYFLEADVGIHRDVSAVDKGLTPLSMAKENWRKPVVLTTDDRMKEWQGKELHGRFYRALHGPDVDFLASVSWLRFGDLFGETEGFVCAIMDEVMLTNNYRKYIMKDGTVDVCRACHLPGESIRHIISGCSRLANGEYLHRHNQVARIIHQQLALKFNLVELEVPYYKYVPDPVLVKDHVTLYWDQSIITDRTIVANKPDIVVIDRSARRVMIIDVTIPHDENLVKAEKEKQIKYLDLAHEVRDMWNMDSVIIVPIVVSANGLIAKSLDEHLSKLSLGGWIKGLIQKAVLLDTARIVRRFLSLQP

SEQ ID NO: 29053 - protein, 1199 aa, Xestia c-nigrum
MITRAASRRALIPSPDSSLSSASPPPDPGSPVSPVAAVASSSSDEYFSPPTSPTPVRRAGRGRPPKGLGLRGQQAPSRVPATGGCVQRMKWTQLMNENVMRAYYGSTEGGTNLTAYRVRMLSLFQDLEPTVNASAQRLSDQVRVIQRNHLLDGAALDRLRSEVLSNRIILTPAQTAVQASSIDANPPRSNPAVVEEDDRVATVSSQCNDRLRSALEDALHEYRSTSAELRPRLPRLPMHKKNRALVCALDSQLKNVFESSEDLVDTHSILFCGAVAACRLANVKFPNYDLATRPKPAVPAWQRRIERRIDGARVLIGKLHCFREGNTRPRVMRFVRRAFSGTEISPQEYMSRVTERIDFLKQKVYAWASRIRRYKRRVDRYSQNRMFQSDERWVYRAWERPQQNMTDVCRPDDAATSSFWRSIWSVPVCHSEADWMRDVERVCEPIPTMEPILITPLDIARAVRPLPNWKSPGPDGLHNFWLKWFSSSHTCLASQFQSSLESGSLPQFLTTGITHLLHKSGSPAEPKNYRPITCLSTVYKLLTSILRTKINTHVDSNSIMSASQNGCRNGSRGTKELLLIDMAISQQVRRARKDLSTCWIDYKKAYDSVPHSWLRRVLELYKIDATLRTFLESCMGQWRTVLRYPGCRQIQGNDEPVWIKRGIFQGDSLSPLWFCLALNPVSTLLENSGLGYRLRKDGQVISHLLYMDDLKLFAPNKLQLMELLKVTETFSSAIGMEFGVDKCAVMYVKRGKIMGSEGLELSDSIHLRSLSSSESYKYLGMSEALGINVTDMKQSLKERFFGRLKKVLNSLLSGGNKVRAFNGWVMPVLMYSFGILKWTQTELDALDRRVRTLLTENRMHHPRSSVMRLYIPRKCGGRGFLNAKTLHNREVCSLREYFLKADVGMHRDVVAVDKGLTPLSMAKENWRKPVVLTTDDRKKEWQGKELHGRFYRALHGPDVDFLASVSWLRFGDLFGETEGFVCAIMDEVMLTNNYRKYIMKDGTVDVCRACHCPGESIRHIISGCSRLANGEYLHRHNQVARIIHQQLALKFKLVESEVPYYKYVPDPVLVKDHVTLYWDQSIITDRTIVANKPDIVVIDRSARRVMIIDVTIPHDENLVKAEKEKQMKYLDLAHEVRDMWNMNSVIIVPIVVTANGLIAKSLDEHLSKLSLGGWIKGLIQKAVLLDTARIVRRFLSLQP

SEQ ID NO: 29054 - protein, 868 aa, Xestia c-nigrum
MRFVRRAFLGTEISPQEYMSRVTERIDFLKQKVYAWANRIRRYKRRVDRYSQNRMFQSDERWVYRTWEQPQQNMTDVCRPDDAATSSFWRNIWSVPVCHTEADWMRDVERVCEPIPEMEPVFITPLDIANAVRPLPNWKSPGPDGLHNFWLKWLSSSHTCLASQFQSSLESGSLPQFLTAGVTHLLHKSGSAAEPKNYRPITCLSTVYKLLTSILRTKINIHIDKNSIMSASQNGCRNGSRGTKELLLIDMAISQQVRRSRKDLSTCWIDYKKAYDSVPHSWLMRVLELYKIDATLRTFLESCMGQWRTVLRYPGCRQIQGNDESVWIKRGIFQGDSLSPLWFCLALNPLSTLLENSGLGYRLRKDGQVISHLLYMDDLKLFAPNKLQLMELLKVTETFSSAIRMEFGVDKCAVMYVKRGEIMRSEGLQLSDSIHLRSLSSSESYKYLGMSEALGINVTDMKQSLRERFFGRLKKVFNSLLSGGNKVRAFNGWVMPVLMYSFGILKWTQTELDALDRRVRTLLTENRMHHPRSSVMRLYIPRKCGGRGFLNAKTLHNREVCSLREYFLKADVGMHRDVVAVDKGLTPLSMAKENWRKPVVLTTDDRKKEWQGKELHGRFYRALHGPDVDFLASVSWLRFGDLFGETEGFVCAIMDEVMLTNNYRKYIMKDGTVDVCRACHLPGESIRHIISGSSRLANGEYLHRHNQVARIIHQQLALKFNLVELEVPYYKYVPDPVLVKDHVTLYWDQSIITDRTIFANKPDIVVIDRSARRVMIIDVTIPHDENLVKAEKEKQIKYLDLAHEVRDMWNMDSVIIVPIVVTANGLIAKSLDDHLSKLSLGGWIKNLIQKAVLLDTARIVRRFLSLQP

SEQ ID NO: 29055 - protein, 1203 aa, Omphaloscelis lunosa
MLTRSAARSARLPPPDSPLSSASPPPVPSPIVNAVSTPAAVVASSSSDEYFSPPTSPTPVRRQGRGRPPKSLGLRGQPAPSRVPATGGCVQRMRWTQSMNENVMRAYYGSTEGGTNLTAYRVRMLSLFQELEPTVNVSAQRLSDQVRVIQRNHRLDDTALDRLRSEVLSNHIVSARAQTAAEASNIDHTPPRFNHGVEEEDDRVATVSSQCNNRLRSALEDAFREYRYTPTELRPRLPRLPMHKKNRALMYALDSQLTNFFESSEDLIDTHSILYCAAVAACRLANVKFPNCDGATRPKPAVPAWQCRIERRIDGARVLIGKLYCFREGNTRPRVMRFVRRAFSGTEISPQDYMSRVTERIDFLKQKVCAWASRIRRYKRQVDRYTQNRMFQSDERWVYRAWERPEQNVTDVCRPDDAATSAFWRSIWSVPVCHTEAGWMQDVERVCETIPEMDAVFITPLDVARAVRPLPNWKSPGPDGLHNFWLKWLSSSHTCLASQFQSSLESGSLPQFLTTGVTHLLHKSGNPAEPKNYRPITCLSTVYKLLTSILRTKINTHIDSNSIMSVSQNGCRNGSRGTKELLLIDMAISQQVRRSRKDLSTCWIDYKKAYDSVPHTWLMRVLELYKVDTTLRTFLMSCMGQWRTVLRYPGCRRTQGNDEPVWIKRGIFQGDSLSPLWFCLALNPLSTLLEDSGLGYRLRRGGQVISHLLYMDDLKLFAPNKLRLMELLKVTETFSGAIRMEFGVDKCAVMHVKRGEIMESEGIQLSNSIHLRSLSSAENYRYLGMSESLGINVADMKQSLKERFFGRLKKVLISFLSGGNKVRAFNGWVMPVLMYSFGILKWTQTELDALDRRVRTLLTANRMHHPRSSVMRLYIPRKCGGRGFLNAKTLHNREVCSLREYFFKADVGMHRHVVAVDNGLTPLSMAKENWRKPVVLTTDDRKEIWQSKALHGRFYRALHEPSVDFLASVSWLRFGDLFGETEGFICAIMDEVILTNNYRRHIMKDGTVDVCRACHRPGESIRHIISGCSRLANGEYLHRHNQVARIIHQQLALKYKLVDSEVPYYKYVPDPVLENEHATLYWDRSIITDRTIVANKPDIVVIDRLVRHAMIVDVTIPHDENLVKAEKEKQIKYLDLAHEVVDMWNVSSAIIVPIVVTANGLMAKSLDHHLSRLSLGGWIKRLIQKAVLLDTARIVRRFLSLQP

SEQ ID NO: 29056 - protein, 884 aa, Omphaloscelis lunosa
MFVNFCFREGNTRPRVMRFVRRAFSGTEISPQDYMSRVTERIDFLKQKVCAWASRIRRYKRRVDRYTQNRMFQSDERWVYRAWERPEQNVTDVCRPDDAATSAFWRSIWSVPVCHTEAGWMQDVERVCETIPEMDAVFITPLDVARAVRPLPNWKSPGPDGLHNFWLKWLSSSHTCLASQFQSSLESGSLPQFLTTGVTHLLHKSGNPAEPKNYRPITCLSTVYKLLTSILRTKINTHIDSNSIMSVSQNGCRNGSRGTKELLLIDMAISQQVRRSRKDLSTCWIDYKKAYDSVPHTWLMRVLELYKVDTTLRTFLMSCMGQWRTVLRYPGCRRTQGNDEPVWIKRGIFQGDSLSPLWFCLALNPLSTLLEDSGLGYRLRRGGQVISHLLYMDDLKLFAPNKLRLMELLKVTETFSGAIRMEFGVDKCAVMHVKRGEIMESEGIQLSDSIHLRSLSSAENYRYLGMSESLGINVADMKQSLKERFFGRLKKVLISFLSGGNKVRAFNGWVMPVLMYSFGILKWTQTELDALDRRVRTLLTANRMHHPRSSVMRLYIPRKCGGRGFLNAKTLHNREVCSLREYFFKADVGMHRDVVAVDNGLTPLSMAKENWRKPVVLTTDDRKEIWQSKALHGRFYRALHEPSVDFLASVSWLRFGDLFGETEGFICAIMDEVILTNNYRRHIMKDGTVDVCRACHRPGESIRHIISGCSRLANGEYLHRHNQVARIIHQQLALKYKLVDSEVPYYKYVPDPVLENDHATLYWDRSIITDRTIVANKPDIVVIDRLARHAMIVDVTIPHDENLVKAEKEKQIKYLDLAHEVVGMWNVSSAIIVPIVVTANGLMAKSLDHHLSRLSLGGWIKRLIQKAVLLDTARIVRRFLSLQP

SEQ ID NO: 29057 - protein, 1202 aa, Sesamia nonagrioides
MLTRSATRKARPPPPDSLLSSASPPPVSSPIVNAVTTSAAAVASSSSDEYFSPPTSPTPVRRQGRGRPPKSLGLRGHPAPSRVPAVGGCVQRMRWSQTMNENVMRAYYGATEGGTNLTAYRERMLSLFQALEPTVNVSAQRLSDQVRVIQRNHRLDDTALDRLRSEVLSNQIAPTLTQTAALASIIDAVPPRSNRVEEEDDGVETVSSQYNDRLRSTLEDAFREYRFTPTDLRPRLPRLPMHKKNRALVSALDSQLKNVFESSEDLIDTHSILFCGAVAACRLANIKFPNCDEANRPRPAVPAWQHRIERRIDGARVLIGKLYCFREGNTRPRVMRFVRQAFSGTGISPREYISHVTERIDFLKQKVCAWASRIRRYKRRVDRYTQNRMFQSDERWVYRAWERTEQNEADVCRPDDAATSAFWRSIWSVPVCHAEGDWIQDVEQVCEMIPEMDTILITPIDVATAVRSLPNWKSPGPDGLHNFWLKWLSSSHTCLASQFQSSLESGSLPQFLTTGITHLLHKSGSTAEPNNYRPITCLPTVYKVLTSILKAKINKHLDSNSIMSVSQNGCRSGSRGTKELLLIDMAISQQVRRSRKDLSTCWIDYKKAYDSVPHTWLMRVLELYKVNATLRTFLRSCMGQWKTVLRYPGSRRIQGNDEPVWIKRGIFQGDSLSPLWFCLALNPLSTLLEDSGLGYRLRRGGQVISHLLYMDDLKLFAPNKLHLMKLLNVTETFSSGIKMEFGVDKCAVMHVKRGQIMESEGITLPDSIHLRSLSSVESYKYLGMSEALGINDADMKQSLKERFFGRLKKVLKSLLSGGNKVRAFNGWVMPVLMYSFGILKWTQTELDALDRRVRTLLTANRMHHPRSSVMRLYIPRKCGGRGFLNAKTLHNREVCSLREHFFKTVVGMHQDVVTVDKGLTPLSMAKENWHKPIILTTNDRKMIWQSKELHGRFYRALHEPDVDFLASVSWLRFSDLFGETEGFVCAIMDEVILTNNYRRYIMRDGTIDVCRACHHPGESIRHIISGCSRLANGEYLHRHNQVARIIHQQLALKYKLVDSEVPYYKYVPDPVLENDHATLYWDRSIITDRTIVANKPDIVVIDRLARLAMIVDVTIPHDGNLVKAEKEKQIKYLDLAHEVVDMWNVNSAVIVPIVVSANGLIAKSLDQHLLRLSLGSWIKGLIQKAVLLDTARIVRRFLSLEP

SEQ ID NO: 29058 - protein, 1202 aa, Sesamia nonagrioides
MLTRQAARRARSPPPDSSPSSASPPPVPSANVSAVTTPATVVASSSSDEYFSPPTSPTPVRRQGRGRPPKSLGLRGHPAPSRVPAAGGCVQRMRWTQTMNENVMRAYYRATGGGTNLTAYRERMLSLFQALEPTVNVSAQRLSDQVRVIQRNHRLDDIALDRLRSEVLSNQITPTLTQTAAQASTIDAAPPRSNRVEEEDDRVETVSSQYNDRLRNALEDAFRDYRSTPTNLRPRLPRLPMHKKNRALVCALDSLLKNFFESSEDLIDTHSILYCAAVAACRLAKVKFPNCEEAARPKPAVPAWQRRIERRIDGTRVLIGKLYCFRDGNTRPRVMRFVRQAFSGTGISPREYINHLTERIDFLKQKVCAWASRIRRYKRRVDRYTQNRMFQSDERWVYRAWERPELNEADVCRPDDATTSAFWRGIWSVSVCHTEGDWIQNVEQVCETIPEMDTIFITPSDVATAVRSLPNWKSPGPDGLHNFWLKWLSSSHTCLASQFQSSLESGSLPQFLTTGITHLLHKSGSTAEPKNYRPITCLPTVYKVLTSILKAKINKHLDSNSIMSVSQNGCKSGSRGTKELLLIDMAISQQVRRSRKDLSTCWIDYKKAYDSVPHTWLMRVLELYKINATLRTFLRSCMGQWKTALHYPGSRQIQGNDEPVWIKRGIFQGDSLSPLWFCLALNPLSTLLENSGLGYRLRRGGQVISHLLYMDDLKLFAPNELHLMKLLNVTETFSSGIRMEFGVDKCAVMHVKQGEIMESAGITLPDSIHLRSLSSFESYKYLGMSEALGINDADMKQSLKERFFGRLKKVLNSLLSGGNKVRAFNGWVMPVLMYSFGILKWTQTELDALDRRVRTLLTANRMHHPRSSVMRLYIPRKCGGRGFLNAKTLHNREVCSLREYFLQTVVGMHHDVVTVDKWLTPLSMAKKNWHKPIILTTDDRKKVWQSKELHGRFYRALHEPDVDFLASVSWLRFSDLFGETEGFVCAIMDEVILTNNYRRYIMKDGTIDVCRACHHPGESIRHIISGCSRLANSEYLHRHNQVARIIHQQLALKYKLVDSEVPYYKYVPDPVLENDHVTLYWDRSIITDRTIVANKPDIVVIDRLARLAMIVDVTIPHDGNLVKAEKEKQIKYLDLAHEIVDMWNVNSAVIVPIVVSANGLIAKSLDQHLLRLSLGSWIKGLIQKAVLLDTARIVRRFLSLEP

SEQ ID NO: 29059 - protein, 1202 aa, Sesamia nonagrioides
MLTRQAARRARSPPPDSSPSSASPPPVPSANVSAVTTPAAVVASSSSDEYFSPPTSPRPVRRQGRGRPPKSLGLRGHPAPSRVPAAGGCVQRMRWTQTMNENVMRAYYRATEGGTNLTAYRERMLSLFQALEPTVNVSAQRLSDQVRVIQRNHRLDDIALDRLRSEVLSNQITPTLTQTAAQASIIDAAPPRSNRVEEEDDRVETVSSQYNDRLRNALEDAFRDYRSTRTDLRPRLPRLPMHKKNRALVCALDSLLKNFFESSEDLIDTHSILYCAAVAACRLAKVKFPNCEEAARPKPAVPAWQRRIERRIDGTRVLIGKLYCFRDGNTRPRVMHFVRQAFSGTGISPREYINHLTERIDFLKQKVCAWASRIRRYKRRVDRYTQNRMFQSDERWVYRAWERPEQNEADVCRPDDATTSAFWRGIWSVSVCHTEVNWIQNVEQVCETIPEMDTILITPSDVAAAVRSLPNWKSPGPDGLHNFWLKWLSSSHTCLASQFQSSLESGSLPQFLTTGITHLLHKSGSTAEPKNYRPITCLPTVYKVLTSILKGKINKHLNSNSIMSVSQNGCKNGSRGTKELLLIDMAISQQVRRSRKDLSTCWIDYKKAYDSVPHTWLMRVLELYKVNATLRTFLRSCMGQWKTVLRYPGSRRIQGNDEPVWIKRGIFQGDSLSPLWFCLALNPLSTLLEDSGLGYRLKRGGQVISHLLYMDDLKLFAPNKLHLMKLLNVTETFSSGIKMEFGVDKCAVMHVKRGQIMESEGITLPDSIYLRSLSSFESYKYLGMSEALGINDADMKQSLKERFFGRLKKVLKSLLSGGNKVRAFNGWVMPVLMCSFGILKWTQTELDALDRRVRTLLTANRMHHPRSSVMRLYIPRKCGGRGFLNAKTLHNREVCSLREYFFKTVVGMHHDVVTVDKGLTPLSMAKENWHKPIILTTDDRKMIWQSKELHGRFYRALHEPDVDFLASVSWLRFSDLFGETEGFVCAIMDEVILTNNYRRYIMKDGTIDVCRACHHPGESIRHIISGCSRLANSEYLHRHNQVARIIHQQLALKYKLVDSEVPYYKYVPDPVLENDHVTLYWDRSIITDRTIVANKPDIVVIDRLARLAMIVDVTIPHDGNLVKAEKEKQIKYLDLAHEIVDMWNVNSAVIVPIVVSANGLIAKSLDQHLLRLSLGSWIKGLIQKAVLLDTARIVRRFLSLEP

SEQ ID NO: 29060 - protein, 868 aa, Apamea monoglypha
MRFVRQAFSGTGISPREYISNVTERIDFLKQKVCAWASRIRRYKRRVDRYTQNRMFQSDERWVYRAWERPEQNVTDVCRPDDANTNAFWRSIWSVPVYHAEGGWMQDIERVCETIPEMDPVLITPLDVARAVRPLPNWKSPGPDGLHNFWLKWLISSHSRLASQFQSSLESGSLPQFLTTGVTHLLHKSGSPAEPKNYRPITCLSTVYKLLTSILRAKINTHIDNNSIMSASQNGCRNGSRGTKELLLIDMAISQQVRRSRKDLSTCWIDYKKAYDSVPHAWLMRVLELYKIDATLRTFLESCMGQWRTVLRYPGCRQIQGNDEPVWIKRGIFQGDSLSPLWFCLALNPLSTLLEDSGLGYRLKRGGQVISHLLYMDDLKLFAPNKLRLLELLKVTETFSSAIRMEFGVDKCAVMHVKRGEIMESEGIQLSDSIHLRSLSSSESYKYLGMSEALGINVADMKQTLRERFFGRLKKVLVSLLSGGNKVRAFNSWVMPVLMYSFGILKWTQTELDALDRRVRTLLTANRMHHPRSSVMRLYIPRKCGGRGFLNAKTLHNREVCNLREYFIKAEVGMHRDVVAVDKGLTPLSMAKENWRKPVILTTDDRKEVWQSKELHGRFYRALHEPGVDFLASVSWLRFGDLFGETEGFVCAIMDEVVLTNNYRRHIMKDGTVDVCRACHRPGESIRHIISGCSRLANGEYLHRHNQVARIIHQQLALKYKLVDSEVPYYKYVPDPVLENDHVTLYWDRSIITDRTIVANKPDIVVIDRLARRTMIVDVTIPHDGNLVKAEKEKQIKYLDLAHEVVDMWNVSSAIIVPIVVSANGLMAESLDQHLSRLSLGGWIKGLIQKAVLLDTARIVRRFLSLEP

SEQ ID NO: 29061 - protein, 1198 aa, Spodoptera frugiperda
MITRRAAAILRTRPPSPTSSPSSAPPSSAPPPDAVVSSTVVGASSSSDEYFSPPTSPPPTRRRGRRRPPSGLGPRGPLASGGVPAPGGNVSRMKWTRSINENVMRAYFRATEGGRNLTAYRVRMLALFQELEPTINVSAQRLSDQVRVIQRNRMLDDIVLDRLQSEELRSRVIIPLQQNIEEPTQIEPVVAPNDDRTTEVSTHKCSEELRRALEDAIREYRFISPSLRPRLPRLPMHKKNRALVCALDSELSNYFDSSEDLVDSHSILYCGAIATCRVANVKLLERENNSTRQKPAVPAWQCRIERRIDEARTLIAKLICFREGNTRPRVMRFVRRAFLGMDINPQDYVSHITERLDFLKQRIYAWANRIRRYKKRVERYTQNRTFQRDQRWVYRNWELKEQTRTDTCLPDADVTTSFWRSIWSAPVCHTEGDWIEKVRRKCELVPEMEQISITTEDVSNAAYPLANWKAPGPDGLHNFWLRWFTSSHSRLASQFQSALESGSLPQFFTTGLTHLLHKSGSTAEPKNYRPITCLPTIYKLLTSILREKLNKHIEDNNIMSTSQNGCRNRSRGTKELLLIDMSICQQVRRSHKNLSTCWIDYKKAYDSVPHTWLMRVLELYKVDTALRAFLMSCMRQWRTVLRYPGCRQICENDEPIRIERGIFQGDSLSPLWFCLALNPLSTLLEDSGLGYRLRRGGEIISHLLYMDDLKLFAPNNSHLMKLLNVTETFSNAIRMEFGVDKCAIMHVKRGEIAESDETRNSDTTNFRLLSSTETYKYLGMSEALGIDVAVMKQSLRERFFGRLKKVLNSLLSGGNKVRAYNGWVMPVLMYSFGILKWTQTELDALDRKVRSLLTEHRMHHPRSSVMRLYIPRKCGGRGFLNAKTLHNSEVCSLRKYFFKMEVGMHRDVVSVDKGLTPLSLANKDWREPIILSTKDRKNVWQSKELHGRYYRALHGPDTDFLASVSWLRFGNLFGETEGFVCAIMDEVMLTNNYRKYIIKDGTADICRACHRPGESIRHIVSGCSHLANGEYLHRHNLVARIIHQQLALKYKLVESEVPYYKYLPDPVLENGDVTLYWDRTIITDRTIVANKPDIVVIDRPSRRTMIIDITIPHDENLVKAEKDKASKYLDLAHEVVDMWDVDSAIIVPIVVSANGLIAKSLDQHLSRLTLDGWIKSLMQKAVLLDTARIVRKFLSLEP

SEQ ID NO: 29062 - protein, 868 aa, Mamestra configurata
MRFVRRAFSGTGISPREYTFRVTERIDFLKQKVCAWANRIRRYKRRVDRYSQNRMFQSDERWVYRAWERPEQSVTDVYRPDDVATSTFWRSIWSVPICHAEGGWMRDVERVCEAIPQMEKITITTLDIAKAVRPLPNWKSPGPDGLHNFWLKWYSSSHALLASQFQSSLESGSLPQFLTTGITHLLHKTGSPAEPKNYRPITCLSTVYKLLTSILRAKINEHIESNSIMSASQNGCRKGSRGTKELLLIDMAISQQVRRSRKDLSTCWIDYKKAYDSVPHTWLMKVLELYKIDATLRTFLESCMRQWKTVLRYPGCRPIQGSDEPVWIKRGIFQGDSLSPLWFCLALNPLSTLLEDSGLGYRLRRGGQAISHLLYMDDLKLFAPNNLRLMELLKVTETFSSAIRMEFGVDKCAVMHVKKGEIMESEGIQLSDSIQVRSLSSTETYKYLGMSEALGINGTDMKQSLRERFFGRLKKVLNSLLSGGNKVRAFNGWVMPVLMYTFGILKWTQTELDALDRRVRTLLTANRMHHPRSSVMRLYIPRKCGGRGFLNAKTLHNREMCSLREYFLKADVGMHRDVVAVDKGLTPLSMAKENWRTPVILTTDDRKEVWKGKELHGRFYRALHGSDVDFSASVAWLRFGDLFGETEGFVCAIMDEVILTNNYRRHIMKDGTVDMCRACHRPGESIRHIISGCSRLANGEYLHRHNQVARIIHQQLALKYKLVDSEVPYYKYVPDPVLENDHVTLYWDRSIITDRTIVANKPDIVVIDRLARRTMIIDVTIPHDENLVKAEKEKQIKYLDLAHEVVDMWNVDSAVIVPIVVTANGLMAKSFDDHLSKLALRGWIKGLIQKAILLDTARIVRRFLSLEP

SEQ ID NO: 29063 - protein, 1199 aa, Mamestra configurata
MLTRAASRRARPPSPDPSLSSASPPPDSGSPMSPAVAVASSSSDEYFSPPTSPTPVRWQGRGRPPRGLGPRGQPAPSRVPAAGGCVQRMRWTQSMNENVMRAYYGSTEGGTNLTAYRVRMLSLFQDLEPTVNVSAQRLSDQVRVIQRNHRLDDAALDRLRSEVLNNLIISTPTQTAVQAPVNGRITPRPNNVSDEVDDRVVTVSSQCNDRLRSALEDALREYRSTPTELRPRLPRLPMHKKNRALVCALDSLLQNIFESSESLVDTHSILYCGAVAACRIANVKFPGCDEAIRPKPAAPAWQRRIERRIDETRALIGKLYCFREGNTRPRVMRFVRRAFSGTEISPRDFTSRVTERIDFLKQKVCAWASRIRRYKRRVDRYSQNRMFQSDERWVYRAWERPEQSVTDVCRPDDVATSIFWRSIWSVPICHAEGGWMRDVERVCEAIPQMEKITITTLDVAKAVRPLPNWKSPGPDGLHNFWLKWYSSSHALLASQFQSSLDSGSLPQFLTTGVTHLLHKTGSPTEPKNYRPITCLSTVYKLLTSILRAKINEHIESNSIMSASQNGCRKGSRGTKELLLIDMAISQQVRRSRKDLSTCWIDYKKAYDSVPHTWLMKVLELYKIDATLRTFLESCMRQWKTVLRYPGCRPIQGSDEPVWIKRGIFQGDSLSPLWFCLALNPLSTLLEDSGLGYRLRRGGQAISHLLYMDDLKLFAPNNLRLMELLKVTETFSSAIRMEFGVDKCAVMHVKKGEIMESEGIQLSDSIQVRSLSSTETYKYLGMSEALGINGTDMKQSLRERFFGRLKKVLNSLLSGGNKVRAFNGWVMPVLMYTFGILKWTQTELDALDRRVRTLLTANRMHHPRSSVMRLYIPRKCGGRGFLNAKTLHNREMCSLREYFLKADVGMHRDVVAVDKGLTPLSMAKENWRTPVILTTDDRKEVWKGKELHGRFYRALHGSDVDFSASVAWLRFGDLFGETEGFVCAIMDEVILTNNYRRHIMKDGTVDMCRACHRPGESIRHIISGCSRLANGEYLHRHNQVARIIHQQLALKYKLVDSEVPYYKYVPDPVLENDHVTLYWDRSIITDRTIVANKPDIVVIDRLARRTMIIDVTIPHDENLVKAEKEKQIKYLDLAHEVVDMWNVESAVIVPIVVTANGLMAKSFDDHLSKLALRSWVKGLIQKAVLLDTARIVRRFLSLEP

SEQ ID NO: 29064 - protein, 1199 aa, Mamestra configurata
MLTRAASRRARPPSPDPSLSSASPPPDSGSPMSPAVAVASSSSDEYFSPPTSPTPVRWQGRGRPPRGLGPRGQPAPSRVPATGGCVQRMRWTQSMNENVMRAYYGSTEGGTNLTAYRVRMLSLFQDLEPTVNVSAQRLSDQVRVIQRNHRLDDAALDRLRSEVLNNLIISTPTQTAVQAPVNGRITPRPNNVSDEVDDRVVTVSSQCNDRLRSALEDALREYRSTPTELRPRLPRLPMHKKNRALVCALDSLLQNIFESSESLVDTHSILYCGAVAACRIANVKFPGCDEAIRPKPAAPAWQRRIERRIDETRALIGKLYCFREGNTRPRVMRFVRRAFSGTEISPRDFTSRVTERIDFLKQKVCAWASRIRRYKRRVDRYSQNRMFQSDERWVYRAWERPEQSVTDVCRPDDVATSIFWRSIWSVPICHAEGGWMRDVERVCEAIPQMEKITITTLDVAKAVRPLPNWKSPGPDGLHNFWLKWYSSSHALLASQFQSSLDSGSLPQFLTTGVTHLLHKTGSPTEPKNYRPITCLSTVYKLLTSILRAKINEHIESNSIMSASQNGCRKGSRGTKELLLIDMAISQQVRRSRKDLSTCWIDYKKAYDSVPHTWLMKVLELYKIDATLRTFLESCMRQWKTVLRYPGCRPIQGSDEPVWIKRGIFQGDSLSPLWFCLALNPLSTLLEDSGLGYRLRRGGQAISHLLYMDDLKLFAPNNLRLMELLKVTETFSSAIRMEFGVDKCAVMHVKKGEIMESEGIHLSDSIQVRSLSSTETYKYLGMLEALGINGTDMKQSLRERFFGRLKKVLNSLLSGGNKVRAFNGWVMPVLMYTFGILKWTQTELDALDRRVRTLLTANRMHHPRSSVMRLYIPRKCGGRGFLNAKTLHNREMCSLREYFLKADVGMHRDVVAVDKGLTPLSMAKENWRTPVILTTDDRKEVWKGKELHGRFYRALHGSDVDFSASVAWLRFGDLFGETEGFVCAIMDEVILTNNYRRHIMKDGTVDMCRACHRPGESIRHIISGCSRLANGEYLHRHNQVARIIHQQLALKYKLVDSEVPYYKYVPDPVLENDHVTLYWDRSIITDRTIVANKPDIVVIDRLARRTMIIDVTIPHDENLVKAEKEKQIKYLDLAHEVVDMWNVESAVIVPIVVTANGLMAKSFDDHLSKLALRSWVKGLIQKAVLLDTARIVRRFLSLEP

SEQ ID NO: 29065 - protein, 1105 aa, Noctua janthe
MNENVMRAYYGSTEGGTNLTAYRVRMLSLFQVLEPIVNVSAQRLSDQVRVIQRNHMLDDAALDRLRSEVLSNRIVLTPAQTAVQASAIDATPPRSNPAVVEEDDRVAMVSSQCNDRLRSALEDALREYRSTPTKLRPRLPRLPMHNKNRALVCALDSQLKNIFESSENLVDTHSILYCGAVAACRLANVKFPNYDVAIRPKPAVPTWQRRIECRIDEARVLIGKLYCFREGNTRPRVMRFVRRAFSGTGISPQEYMSRVTERIDFLKQKVYAWANRIRRYKRRVDRYSQNRIFQSDERWVYRAWERPEQNMTDVCRPDDAATSSFWRSIWSVPVCHTEADWIRDVERTCEPIPEMEPILITPIDIARAVRPLPNSKSPGPDGLHNFWLKWLSSSHTCLASQFQSSLESGSLPQFLTTGVTHLLHKSGSPTEPKNYRPITCLSTVYKLLTSILRVKINTHIDKNFIMSASQNGCRNRSRGTKELLLIDMAISQQVRRSRKDLSTCWIDYKKAYDSVPHTWLMRVLELYKIDATLRAFLESCMGQWRTVLRYPGCRQIQGNDEPVWIKRGIFQGDSLSPLWFCLALNPLSTLLEDSGLGYRLRRGGQVISHLLYMDDLKLFAPNKLRLMELLKVTETFSNAIRMEFGVDKCAVMYVKRGEIMESEGIQLSDSIHLRSLSSSESYKYLGMSESLGINVTDMKQSLRERFFGRLNKVLNSLLSGGNKVRAFNGWVMPVLMYSFGVLKWTQTELDALDRRVRTLLTANRMHHPRSSVMRLYIPRKCGGRGFLNAKTLHNHEICSLREYFLKIEVGMHRDVVAVDKGLTPLSMAKENWRKPVVLTTDDRKEVWQGKELHGRFYRALHGPDVDFLASVSWLRFGDLFGETVGFVCAIMDEVMLTNNYRKYIMKDGTVDVCRACHRPGESIRHFISGCSRLANGEYLHRHNQVARIIHQQLALKYKLVESEVPYYKYVPDPVLEKDHVTLYWDRSIITDRTIVANKPDIVVIDRLARRVMIVDVTIPHDENLVKAEKEKQIKYLDLAHEVVDMWNVNSAIIVPIVVTANGLIAKSLDDHLSRLSLGGWIKGLIQKAVLLDTARIVRRFLSLEP

SEQ ID NO: 29066 - protein, 1199 aa, Noctua janthe
MITRAAYRRARLTTPDSSLSSASPPPDPGSPVSPAAAVASSSSDEYFSPPTSPTPVRRQGRGRPPKSLGLRGHPAPSRVSAAGGCVQRMRWTQTINENVMRAYYGSTEGGTNLTAYRVRMLSLFQVLEPIVNVSAQRLSDQVRVIQRNHMLDDAALDRLRSEVLSNRIVLTPAQTAVQASTIDATPPRSNPAVVEEDDRVAMVSSQCNDRLRSALEDALREYRSTPTKLRPRLPRLPMHNKNRALVCALDSQLKNIFESSENLVDTHSILYCGAVAACRLANVKFPNDDVAIRPKPAVPTWQRRIECRIDEARVLIGKLHCFREGNTRPRVMRFVRRAFSGTGISPQEYMSRVTERIDFLKQKVYAWANRIRRYKRRVDRYSQNRIFQSDERWVYRAWERPEQNMTDVCRPDDAATSSFWRSIWSVPVCHTEADWMRDVERACEPIPEMEPILKTSIDITRAVRPLPNWKSPGPDGLHNFWLKWLSSSHACLASQFQSSLESGSLPQFLTTGVTHLLHKSGSPAEPKNYRPITCLSTVYKLLTSILRVKINTHIDKNFIMSASQNGCRNRSRGTKELLLIDMAISQQVRRSRKDLSTCWIDYKKAYDSVPHTWLMRVLELYKIDATLRAFLESCMGQWRTVLRYPGCRQIQGNDEPVWIKRGIFQGDSLSPLWFCLALNPLSTLLEDSGLGYRLRRGGQVISHLLYMDDLKLFAPNKLRLMELLKVTETFSNAIRMEFGVDKCAVMYVKRGEIMESEGIQLSDSIHLRSLSSSESYKYLGMSESLGINVTDMKQSLRERFFGRLNKVLNSLLSGGNKVRAFNGWVMPVLMYSFGVLKWTQTELDALDRRVRTLLTANRMHHPRSSVMRLYIPRKCGGRGFLNAKTLHNREICSLREYFLKTEVDMHRDVVAVDKGLTPLSMAKENWRKPVVLTTDDRKEVWQGKELHGRFYRALHGPDVDFLASVSWLRFGDLFGETEGFVCAIMDEVMLTNNYRKYIMKDGTVDVCRACHRPGESIRHIISGCSRLANGEYLHRHNQVARIIHQQLALKYKLVESEVPYYKYVPDPVLEKDHVTLYWDRSIITDRTIVANKPDIVVIDRLARRVMIVDVTIPHDENLVKAEKEKQIKYLDLAHEVVDMWNVNSAIIVPIVVTANGLIAKSLDDHLSRLSLGGWIKGLIQKAVLLDTARIVRRFLSLEP

SEQ ID NO: 29067 - protein, 1200 aa, Mythimna ferrago
MLTRSATRRARHPPTGSLLSSASPPPDPGSPVSPVAAVASSSSDEYFSPPTSPTPVRRPGRGRPPNGLGPRGQPALSRVPAAGGCVQRMKWTQSINENVMRAYYRATEGGTNLTAYRVRMLSLFQELEPSVNVTTQRLSDQVRVIQRNHRLDDAALDRLRSEVLSNRIISTPIQTQTAAPRATDTIMLRPNYGDDEADDRVVTVSSQCNDQLRSALEDALREYRSTPIALRPRLPRLPMHKKNRALVCALDSLLENVFESSVNLVDTHSILYCGAIAACRLANVKLPSCDGATRPKPAVPAWQCRIERRIDGARALIGKLYCFREGNTRPRVMRYVRRAFSGTGVSPREYLAHVTERIDFLKQKVCAWANRIRRYKRRVDRYSQNRMFQSDERWVYREWERPEQSVTDVLRPDVAATNEFWRSIWSVPVCHTEGGWMRDIERVCEAIPEMEKVFISPIDVARAVRPLPNWKSPGPDGLQNFWLKWYSSSHALLASQFQSSLESGSLPQFLTTGVTHLLHKTGSTAEPKNYRPITCLSTVYKLLTSILRTKINNHIENNSIMSASQNGCRNGSRGTKELLLIDMAISQQVRRSRKDLSTCWIDYKKAYDSVPHTWLMRVLELYKIDATLRTFLESCMGEWNTVLRYPGCRSIRGDDEPIWIKRGIFQGDSLSPLWFCLALNPLSTLLEDSGLGYRLRRGGQVLSHLLYMDDLKLIAPNKLQLMELLKVTETFSSAIRMEFGVDKCAVMHVKRGEIMESDGIQLSDSIHLRSLSSTETYKYLGMSEALGINVTDMKQSLRERFFSRLKKVLNSLLSGGNKVRAFNGWVMPVLMYSFGILKWTQTELDALDRRVRTLLTANRMHHPRSSVMRLYIPRKCGGRGFLNAKTLHNREVCSLREYFQKTDVGMHRDVVAVDKGLTPLSMAKENWRKPVVLTTDDRREVWKNKELHGRFYRALHEPDVDFGASVAWLRFSNLFGETEGFICAIMDEVILTNNYRRYIMKDGTVDVCRACHRPGESIRHIISGCSRLANGEYLHRHNQVARIIHQQLALKYKLMESEVPYYRYVPDPVLENDHVTLYWDRSIITDRTIIANKPDIVVIDRLARRAMIVDVTIPHDENLVKAEKEKKIKYLDLAHEVVDLWNVDSAVIVPIVVSVNGLIAKSFDDHLSKLALRGWIKGLIQKAVLLDTARIVRRFLSLEP

SEQ ID NO: 29068 - protein, 868 aa, Mythimna ferrago
MRFVRRAFLGTGISPQGYMSRVTERIDFLKQKVCAWASRIRRYKRRVDRYSQNRMFQSDERWVYRAWERPEHSVTDECRPDDLATITFWRNIWSVPVSHTEGGWMRDVERVCEAIPEMEKVTITPEDVARAVRPLPNWKSPGPDGLQNFWLKWYSSSHAPLASQFQSILESGSLPEYLTTGVTHLLHKTGNPVDSKNYRPITCLSTVYKLLTSILRAKINIHIENNQIISPSQNGCRNGSRGTKELLLIDMAISQQTRRSRKDLSTCWIDYKKAYDSVPHTWLMRVLELYKIDITLRTFLESCMRQWKTVLRYPGCRPIQGNDEPIWIKRGIFQGDSLSPLWFCLALNPLSTLLEDSGLGYRLRRGGQVISHLLYMDDLKLFAPSNLQLMELLKVTETFSSAIRMEFGVDKCAGMHVKRGEIMESEGIQLPDSIHLRSLSSTETYRYLGMSEALGINNADMKQSLKERFFGRLKKVLNSLLSGGNKMRAFNGWVMPVLMYSFGILKWTQTELDALDRRVRTLLTANRMHHPRSSVMRLYIPRKCGGRGFLNAKTLHNREVCSLREYFLKTDVGMHRDVVAVDKGLTPLSMAKEDWHKPVIMTTDNRMEIWKGKELHGRFFRALHEPDVDFLASVAWLRFSDLFGETEGFVCAIMDEVILTNNYRRYIMKDGTVDVCRACHRPGESIRHIISGCSRLANGEYLHRHNQVARIIHQQLALKYNLVDLEVPYYKYVPDPVLENDHVTLYWDRSIITDRTIVANKPDIVVIDRLARRAMIVDVTIPHDENLVKAEKEKQIKYLDLAHEVVDMWNVDSAIIVPIVVTVNGLIAKSFDDHLSKLSLRGWIKGLIQKAVLLDTARIVRRFLSLEP

SEQ ID NO: 29069 - protein, 1133 aa, Mythimna ferrago
MGPRGQPAPSRVPAAGGCVQRMRWTQSMNENVMRAYYGSTEGGTNLTAYRERMLSLFQDLEPTVNVSAQRLSDQVRVIQRNHRLDDAALDRLRSEILSNQIVSTSTQTQTAATPTTNAISPRSDHNNDDTDDRVVTVSSQCNERLRSALEDALCEYMSTPTELRPRLPRLPMHKKNRALVCALDSLLKNIFESSENLIDTHSILYCGAVAACRLANIKFPNIDGTIRPKSAVPAWQCRIERRIDEARVLIGKLHCFREGNTRPRVMRFVRRAFLGTGISPQGYMSRVTERIDFLKQKVCAWASRIRRYKRRVDRYSQNRMFQSDERWVYRAWERPEHSVIDGCRPDDFATITFWRNIWSVPVSHAEGGWMRDVERVCEAIPEMEKVTITPEDVAKAVRPLPNWKSPGPDGLQNFWLKWYSSSHALLASQFQSILESGSLPEYLTTGITHLLHKTGNPVDPKNYRPITCLSTVYKLLTSILRAKINIHIENHQIISPSQNGCRNGSRGTKELLLIDMAISQQTRRSRKDLSTCWIDYKKAYDSVPHTWLMRVLELYKIDITLRTFLESCMRQWKTVLRYPGCRPIQGNDEPIWIKRGIFQGDSLSPLWFCLALNPLSTLLEDSGLGYRLRRGGQVISHLLYMDDLKLFAPSTLQLMELLKVTETFSSAIRMEFGVDKCAGMHVKRGEIMESEGIQLPDSIHLRSLSSTETYKYLGMSEALGINNADMKQSLKERFFGRLKKVLNSLLSGGNKVRAFNGWVMPVLMYSFGILKWTQTELDALDRRVRTLLTANRMHHPRSSVMRLYIPRKCGGRGFLNAKTLHNREVCSLREYFLKTDVGMHRDVVAVDKGLTPLSMAKEDWHKPVIMTTDNRKEIWKGKELHGRFFRALHEPDVDFLASVAWLRFSDLFGETEGFVCAIMDEVILTNNYRRYIMKDGTVDVCRACHRPGESIRHIISGCSRLANGEYLHRHNQVAKIIHQQLALKYNLVDLEVPYYKYVPDPVLENDHVTLYWDRSIITDRTIVANKPDIVVIDRSARRAMIVDITIPHDENLVKAEKEKQMKYLDLAHEVVDMWSVDSAVIVPIVVTANGLFAKSFDDHLSKLSLRGWIKGQIQKAVLLDTARIVRKFLSLEP

SEQ ID NO: 29070 - protein, 868 aa, Hydraecia micacea
MRFVKRAFSGTGISPREYISHVTERIDFLKQKVCAWASRIRRYKRRIDRYTQNRMFQSDERWVYRAWERPEQNMTDVCRPDDAATSAFWRSIWSVPVCHTEAGWIQDVERVCETVPEMETVLITPLDVARAVRPLPNWKSPGPDGLHNFWLKWLNSSHTCLASQFQSSLESGSLPQFLTTGVTHLLHKSGSPAEPKNYRPITCLSTVYKLLTSILRAKINTHIENNSIMSASQNGCRNGSRGTKELLLIDMAISQQVRRSRKDLSTCWIDYKKAYDSVPHTWLMRVLELYKIDATLRTFLESCMGQWKTVLRYPGCRQIQGNDEPVWIKRGIFQGDSLSPLWFCLALNPLSTLLEDSSLGYRLRRGGQVISHLLYMDDLKLFAPTRLHLMELLKVTETFSSAIRMEFGVDKCAVMHVKRGEIMESEGIQLSDSINLRSLSSSESYKYLGMSEALGINVTDMKQSLKERFFCRLRKVLISLLSGGNKVRAFNGWVMPVLMYSFGILKWTQTELDALDRRVRTLLTANRMHHPRSSVMRLYIPRKCGGRGFLNAKTLHNREVCSLREYFLKAEVGMHRDVVAVDKGLTPLSMAKENWRKPVVLTTDDRKKVWQSKELHGRFYRALHEPGVDFLASVSWLRFGDLFGETEGFVCAIMDEVILTNNYRRHIMKDGTVDVCRACHRPGESIRHIISGCSRLANGEYLHRHNQVARIIHQQLALKYKLVDSEVPYYKYVPDPVLENDHVTLYWDRSIITDRTIVANKPDIVVIDRLARRTMIVDVTIPHDGNLVKAEKEKQMKYLDLAHEVVDMWNVSSAVIVPIVVTANGLMAEGLDEHLSRLSLGGWIKSLIQKAVLLDTARIVRRFLSLEP

SEQ ID NO: 29071 - protein, 1202 aa, Noctua pronuba
MLTRAAARRARLSPPDSSLSSASPLPESSPIVSAVTPAVAVASSSSDEYFSPPTSPTPVRRQGRGRPPTSLGLRGHPAPSRVPATGGCVQRMRWTHPINENVMRAYYGSTEGGTNLTAYRVRMLSLFQVLEPTVNVSAQRLSDQVRVIQRNHMLDDAVLDRLRSEVLSNRIVLTPSQTVVQTTAIDVSPPRSNPAVVEEDDRVATVSSQCNDRLRSALEDALREYRYTPTELRPRLPRLPMHNKNWALVCALDSQLKNLFESSEDLVDTHSILYCGAVAACRLAKLKFTNSDAATRPKPAVPAWQCRIERRIDGARVLIGKLHCFREGNTRPRVMRFVRRAFSGTGISPQEYMSRVTERIDFLKQKVYAWANRIRRYKRRVDRYSQNRMFQSDERWVYRAWERPEQNMTDVCRPDDATTSSFWSSIWSVPVCHTEGDWMRAVERVCEPIPEMEPILITSLDVARSVRPLPNWKSPGPDGLHNFWLKWLSSSHTCLASQFQSSLESGALPQFLTTGVTHLLHKSGNPAEPKNYRPITCLSTVYKLLTSILRAKINTHIDKNSIMSASQNGCRNGSRGTKELLLIDMAISQQVRRSRKDLSTCWIDYKKAYDSVPHTWLMRVLELYKIDATLRTFLESCMGQWRTVLRYPGCRQIQGNDEPVWIKRGIFQGDSLSPLWFCLALNPLSTLLEDSGLGYRLRRGGQVISHLLYMDDLKLFAPNKLRLMELLKVTETFSSAIRMEFGVDKCAVMYVKRGEIMESEGIQLSDSIHLISLSSSESYKYLGMSEALGINVTDMKQSLRERFFGRLKKVLNSLLSGGNKVRAFNGWVMPVLMYSFGILKWTQTELDALDRRVRTLLTANRMHHPRSSVMRLYIPRKCGGRGFLNAKTLHNRELCSLREYFLKAEVGMHRDVVAVDKGLTPLSMAKENWRKPVVLTTDDRKEVWQGKELHGRFYRALHGPDVDFLASVSWLRFGDLFGETEGFVCAIMDEVMLTNNYRKYIMKDGTVDVCRACHRPGESIRHIISGCSRLANGEYLHRHNQVARIIHQQLALKYKLVESEVPYYKYVPDPVLEKDHVTLYWDRSIITDRTIVANKPDIVVIDRSARRVMIVDVTIPHDENLVKAEKEKQIKYLDLAHEVVDMWNVNSAIIVPIVVTANGLMAKSLDDHLSRLSLGGWIKGLIQKAVLLDTARIVRRFLSLEP

SEQ ID NO: 29072 - protein, 1111 aa, Ochropleura plecta
MRWTSFINANVMRAYYGSTEGGTNLTAYRVRMLSLFQDLEPTINVSAQRLSDQVRVIQRNHLLDDVALDRLRSEVLSNRVILTTPQTAVQASAIDVTQPRSNPAVVEEDDRVATVSSQCNDRLRSALEDALRDYRSTPAELRPRLPRLPMHKKNRALVCALDSQLKNLFESSEDLVDTHSILYCGAVAVCCLANVKFPNCDVATRPKPSVPAWQCRIERRIDEARALIGKLYCFREGNTRPRVMRFVRRAFSGTGISPQEYMSRTTERIDFLKQKVYAWANRIQRYKRRVDRYSQNRMFRSDERWVYRAWERPEQSVTDVCRPDDVATSSFWHSIWSVRVCHTEAGWMRDVERVCETIPEMEPILITSLDIASAVRPLPNWKSPGPDGLHNFWLKWLSSSHTRLASQFQSCLESGSLPQFLTTGVTHLLYKSGSPAEPKNYRPITCLSTVYKLLTSILRAKINSHIVKNSIISASQNGCRNGSRGTKELLLIDMAISQQVRRSRKDLSTCWIDYKKAYDSVPHTWLKRVLELYKIDTTLRTFLESCMGQWRTVLRYPGCRQIQGNDEPVWIKRGIFQGDSLSPLWFCLALNPLSTLLEDSGLGYRLRRGGQVISHLFYMDDLKLFAPNKLRLMELLKVTETFSNAIRMEFGVDKCAVMYVKRGEIMESEGIHLSDSIHLRSLSSSESYKYLGMSEALGINVADMKQLLRERFFGRLKKVLKSLLSGGNKVRAFNSWVMPVLMYSFGILKWTQTELDALDRRVRTLLTANRMHHPRSSVMRLYIPRKCGGRGFLNAKTLHNREVCSLREYFLKTDVGMHRDVVAVDKGLTPLSMAKENWRKPVVLTTDYRKEVWQGKELHGRFYKALHGPDVDFLASVSWLRFGDLFGETEGFVCAIMDEVMLTNNYRKYIMKDGTVDVCRACHRPGESIRHIISGCSRLANGEYLHRHNQVARIIHQQLALKYNLVESEVPYYKYVPDPVLEKDHVTLYWDRSIITDRTIVANKPDIVVIDRSARRVMIIDVTIPHDENLVKAEKEKQLKYLDLAHEVVDMWNVNSAIIVPIVITANGLIAKSLDEHLSKLSLGGWIKGLIQKAVLLNTARIVRRFLSLEP

SEQ ID NO: 29073 - protein, 1206 aa, Ochropleura plecta
MLTRRRAQEQKALPPSPGSPLSSASQPPGRATCVSAVSPVAAVASSSSDEFFSPPSSPPPPTRQRRGRGRPLAGLGSRSQQAPIRVPAAGGNVSRMRWTSSINANVMRAYYGSTEGGTNLTAYRVRMLSLFQDLEPTINVSAQRLSDQVRVIQRNHMLDDAALDRLRSEVLGNRIILTTPQTAMQASVIDGMQPRSDPAVVEEDDRVATVSSQCNERLRSALEDALRDYRSTPAELRPRLPRLPMHKKNRALVCALDSQLKNLFESSEDLVDTHSILYCGAVAVCRLANVKFPSCDVATRPKPSVPAWQCRIERRIDEARVLIGKLYCFREGNTRPRVMRFVRRAFSGTGISPQEYMSRTTERIDFLKQKVYAWANRIRRYKRRVDRYSQNRMFRSDERWVYRAWERPEQSVTDVCRPDDVATSSFWHSIWSVPVCHTEADWMRDVERVCETIPEMEPILITSLDIASAVRPLPNWKSPGPDGLHNFWLKWLSSSHTRLASQFQSCLESGSLPQFLTTGVTHLLYKSGSPAEPKNYRPITCLSTVYKLLTSILRAKINSHIDNNSIMSASQNGCRNGSRGTKELLLIDMAISQQVRRSRKDLSTCWIDYKKAYDSVPHTWLKRVLELYKIDATLRAFLESCMRQWRTVLRYPGCRQIQGNDEPVSIKRGIFQGDSLSPLWFCLALNPLSTLLEDSGLGYRLRRGGQVISHLLYMDDLKLFAPNKLRLMELLKVTETFSNAIRMEFGVDKCAVMYVKRGEIMESEGIQLSDSIHLRSLSSSESYKYLGMSEALGINVADMKQLLRERFFGRLKKVLKSLLSGGNKVRAFNSWVMPVIMYSFGILKWTQTELDALDRRVRTLLTGNRMHHPRSSVMRLYIPRKCGGRGFLNAKTLHNREVCSLREYFLKTDVGMHRDVVAVDKGLTPLSMAKENWRKPVVLTTDDRKVIWQGKELHGRFYKALHGPDVDFLASVSWLRFGDLFGETEGFVCAIMDEVMLTNNYRKYIMKDGTVDVCRACHRPGESIRHIISGCSRLANSEYLHRHNQVARIIHQQLALKYNLVESEVPYYKYVPDPVLEKDHVTLYWDRSIITDRTIVANKPDIVVINRSARRVMIIDVTIPHDENLVKAEKEKQLKYLDLAHEVVDMWNVNSAIIVPIVVTANGLIAKSLDEHLSKLSLGGWIKGLIQKAVLLDTARIVRRFLSLEP

SEQ ID NO: 29074 - protein, 1199 aa, Hecatera dysodea
MITRAASRRARPPSPDPSLSSASPPPDNGSPVSPAAAVASSSSDEYFSPPTSPTPVRRQGRGRPPRSLGSRGQPAPSRVPAAGGCVQRMRWTQSINENVMRAYYGSTEGGTNLTAYRARMLSLFQDLEPTVDVSAQRLSDQVRVIQRNHRLDDAALDRLRSEVLDNPIISTSTQTVVPVPSSGAITSRTTNVCDEVDDRIVTVSNQCNDRLRSALEDALREYRSTPTELRPRLPRLPMHKRNRALVCALDSLLQNIFESSENLIDTHSILYCGAVAACRVANVKFTNSDEATRPKTAAPAWQCRIERRIDEARVLIGKLYCFREGNTRPRVMRFVRRAFSGTEISPQEYMSRVTERIDFLKQKVCAWANRIRRYKRRVDRYSQNRMFQSDERLVYRAWERPEQSVTDVCRPDDIVTSTFWRSIWSVPVRHTEGDWMRGVERVCEAIPQMEKISITPIDVATAVRPLPNWKSPGPDGLHNFWLKWYSSAHAVLASQFQSSLESGSLPQFLTTGITHLLHKTGSPAEPKNYRPITCLSTVYKLLTSILRVKINEHIETNSIMSSSQNGCRKGSRGTKELLLIDMAISQQVRRTRKDLSTCWIDYKKAYDSVPHTWLMKVLELYKIDATLRTFLESCMRQWKTVLCYPGCRPIQGNDEPVWIKRGIFQGDSLSPLWFCLSLNPLSTLLEDSGLGYRLRRGGQAISHLLYMDDLKLFAHNKLRLMELLKVTETFSSAIRMEFGVDKCAVMHVKKGEIMESEGVQLSDSIQVRSLSSTETYKYLGMSEALGINVADMKQSLKERFFGRLKKVLNSLLSGGNKVRAFNGWVMPVLMYSFGILKWTQTELDALDRRVRTLLTANRMHHPRSSVMRLYIPRKCGGRGFLNAKTLHNREMCSLREYFLKVDVGMHRDVVAVDKGLTPLSMANENWRKPVIHTTDDRKEVWKGKELHGRFYRALYGSDVDFSASVAWLRFGDLFGETEGFVCAIMDEVILTNNYRRHIMKDGTVDVCRACHRPGESIRHIISGCSRLANGEYLHRHNQVARIIHQQLALKYKLVDSEVPYYKYVPDPVLENGHVTLYWDRSIITDRTIIANKPDIVVIDRLARRTMIIDVTIPHDENLVKAEKEKQIKYLDLAHEVVDMWNVDSAIIVPIVVTANGLMAKSFDDHLSKLALHGWLKGLIQKAVLLDTARIVRRFLSLEP

SEQ ID NO: 29075 - protein, 1114 aa, Hecatera dysodea
MRWTQSMNENVMRAYYGSTEGGTNLTAYRVRMLSLFQDLEPAVNVSAQRLSDQVRVIQRSHRLDDAALERLRSEVLNNLIIATQTQTAVQAPASGASIPRANNDSDEVDDRVVTVSSQCNDRLRSALEDALREYRSTPTELRPRLPRLPMHKKNRALVCALDSLLQNTFVSSENLVDTHSILYCGAVAACRLANVKFPSCDDAIRPKPAAPAWQCRIERRIDEARALIGKLYCFREGNTRPRVMRFVRRAFAGTGISPHEYTSRITERIDFLKQKVCAWANRIRRYKRRVDRYSQNRMFQSDERWVYRNWERPEQSVTDVCRPDDIATSTFWRSIWSVPVRHTEGDWMRDVERVCEAIPQMEKVIITPTDVATAVRPLPNWKSPGPDGLHNFWLKWYSSSHALLASQFQSSLESGSLPQFLTTGVTHLLHKTGSPAEPKNYRPITCLSTVYKLLTSILRVKINKHIENNSIMSSSQNGCRKGSRGTKELLLIDMAISQQVRRTRKDLSTCWIDYKKAYDSVPHTWLMKVLELYRIDETLRTFLESCMRQWKTVLRYPGCRPIQGNDEPVWIKRGIFQGDSLSPLWFCLALNPLSTLLEDSGLGYRLRRGGQAISHLLYMDDLKLFAHNKLQLMELLKVTENFSSAIRMEFGVDKCAVMHVKKGEIVESEGIQLSDSIHVRSLSSTETYKYLGLSEALGINGADMKQSLKERFFGRLKKVLNSLLSGGNKVRAFNGWVMPVLMYSFGILKWTQTELDALDRRVRTLLTANRMHHPRSSVMRLYIPRKCGGRGFLNAKTLHNREMCSLREYFLKADVGMHRDVVAVDKGLTPLSMAKENWRKPVILTTDDRKEVWRGKELHGRFYRALYGSDVDFSASVAWLRFGDLFGETEGFVCAIMDEVIMTNNYRRHIMRDGTVDVCRACHRPGESIRHIISGCSRLANGEYLHRHNQVARIIHQQLALKYKLVDSEVPYYKYVPDPVLENDHVTLYWDRSIITDRTIVANKPDIVVIDRLVRRTMIIDVTIPHDENLVKAEKEKQIKYLDLAHEVVDMWNVDSAIIVPIVVTANGLMAKSFDDHLSKLALHGWLKGLIQKAVLLNTARIVRRFLSLEPYHR

SEQ ID NO: 29076 - protein, 1198 aa, Mythimna impura
MLTRAAARRARHPSPDLPLSSASPPPDPGSSVTPAVAVASSSSDEYFSPPTSPTPVRRPGRGRPPKGLGSRGQPAPSRVPAAGGCVQRMRWTQSMNENVMRAYYRATEGGTNLTAYRVRMLSLFQDLEPTVDVSAQRLSDQVRVIQHNHRLDDAVLDRLRSEVLNNHIVSTPTQTGVLPATDVIPPRSNVVENELDDRVDTVSSQCNERLRSALEDALREYRSTPAEFRPRLPRLPMCKRNRALVCALDSLLKNVFESSEDLVDTHSILYCGAVAACRLANIKFSSCDVATRPKPAVPAWQCRIEGRIDEARALIGKLYCFREGNTRPRVMRFVRRAFSGTGITPREYMSRVTERIDFLKQKVCAWANRIRRYKRRVDRYSQNRMFQSDERWVYRAWERPEQSVIDAVRPDDAATNAFWRSIWSVPVCHTEGGWMRDVERVCVDVPEMEKVEITPVDVARAVRPLPNWKSPGTDGLHNFWLKWYSSSHALLASQFQSSLESGSLPQFLTTGITHLLHKTGSPTEPKNYRPITCLSTVYKLLTSILRAKIYIHIEKNLIMSASQNGCRNGSRGTKELLLIDMAISQQVRRSRKDLSTCWIDYKKAYDSVPHTWLMRVLELYKIDATLRTFLESCMRQWKTVLRYPGCRPIQGNDEPIWIKRGIFQGDSLSPLWFCLALNPLSTLLEDSGLGYRLRRGGQVLSHLLYMDDLKLFAHNNLQLMELLKVTETFSSAIRMEFGVDKCAVMHVKRGEIVESEGIQLSDSIYLRTLSSTETYKYLGMSEALGINVADMKQTLKERFFNRLKKVLNSLLSGGNKVRAFNGWVMPVLMYSFGILKWTQTELDALDRRVRTLLTANRMHHPRSSVMRLYIPRKCGGRGFLNAKTIHNREVCSLREYFLKTDVGMHRDLVAVDKGLTPLSMAKENWRKPVVLTTDDRKEVWKGKELHGRFYRALHEPDVDFLASVAWLRFSNLFGETEGFVCAIMDEVILTNNYRRHIMKDGTIDVCRACHRPGESIRHIISGCSRLANGEYLHRHNQVARIIHQQLALKYNLVDSEVPYYRYVPDPVLENDHVTLYWDRSIITDRTIVANKPDIVVIDRLARRAVIVDVTIPHDENLVKAEKEKQIKYLDLAHEVVDMWNVDSAIIVPIVVTANGLIAKSFDDHLSKLSLRGWIKGLIQKAVLLDTARIVRRFLSLEP

SEQ ID NO: 29077 - protein, 1199 aa, Phlogophora meticulosa
MITRAATRRARPPSPDSPLSSASPPPDLGSPVTPAVAAASSSSDEYFSPPTSPTPVRRQGRGRPPKSLGSRGQPAPSQVPATGGCVQRMRWTQSMNENVMRAYYGSTEGGTNLTAYRVRMLSLFQGFEPTVNVSAQRLSDQVRVIQRNHRLDDAALDRLRSEMLSNHIVLTSTQTAVQAPAFNAILPRSNHVSNEADDRVDTVCSQYNDRLRSALEDALREYRSTPTELRPRLPRLPMHRKNRALVCALDSLLKNFFESSEDLVDTHSILYCAAVAACRLANVKFPKNDLAIRPKPAVPAWQSRIERRIDGARVLIGKLYCFREGNTRPRVMRFVRRAFSGTGISPREYMSRIVERIDFLKQKVCAWANRIRRYKRRVDRYSQNRMFQSDERWVYRAWERPEQDVAGEHRPDDVATNAFWRSIWSVPAHHVEAHWMSDYESVCETIPEMEKIIITPEDVATAVRPVPNWKSPGPDGLHNFWLKWLSSSHTRLASQFQSCLESGSLPQFLTTGITHLLYKSGSTTEPKNYRPITCLSTVYKLLTSILRAKITEHIVGNSIMSASQNGCRNGSRGTKELLLIDMAISQQVRRSRKDLSTCWIDYKKAYDSVPHAWLTRVLELYKIDATLRTFLASCMGQWKTVLRYPGCRQIQGNDEPIWIKRGIFQGDSLSPLWFCLALNPLSTLLEDSGLGYRLKRGGQVISHLLYMDDLKLFAPNNLRLMELLKITESFSSAIRMEFGVDKCAVMHVKRGEIVESEGIQLSDSIHLRSLSSSENYKYLGMSEALGINATDMKQSLKERFFGRLKKVLNCLLSGGNKVRAFNGWVMPVLMYSFGILKWTQTELDALDRRVRTLLTANRMHHPRSSVMRLYIPRKCGGRGFLNAKTLHNREVCNLRDYFLKTEVGMHRDVVAVDKGLTPLSMAKENWRKPVVLTTDDRKQVWQSKELHGRFYRALHGPDVDFLASVSWLRFGDLFGETEGFVCAIMDEVILTNNYRKHIMKDGTVDMCRACHRPGESIRHIISGCSRLANSEYLHRHNQVARIIHQQLALRYKLVESEVPYYKYVPDPVLEDDHVTLYWDRSIITDRTIVANKPDIVVIDRLARRAMIVDVTIPHDENLVKAEKEKQIKYLDLAHEVVDMWNVDSAVIVPIVVTANGLLAKSLDDHLSRLSLHGWIKGLIQKAVLLDTARIVRRFLSLQP

SEQ ID NO: 29078 - protein, 1201 aa, Xestia xanthographa
MMLTRAAAARRAHLPTPDSSLSSASPPPDPRSPVSPVAAVASSSSDEYFSPPTSPPPVRRAGRGRPPTSLGLRGRQAPSRVPATGGCVQRMKWTQSMNENVMRAYYGSTEGGTNLTAYRVRMLSLFQDLEPTVIVSAQRLSDQVRVIQRSHRLDDAALDRLRSEVLSNLIVLTPTQTAVQVSAIDATPPRLNPDVVEEDDGVATVSSQCNDRLRSALENALHEYRSTPTELRPRLPRLPMHKKNRALVCALDSQLKNIFESSENLVDTHSILFCGAVAACRIANVKFPNCDVATRPKPAVPAWQRRIKRRIDGARVLIGKLYCFREGNTRPRVMRFVRRAFSGTEISPQEYMSRATERIDFLKQKVYAWANRIRRYKRRVDRYSQNRMFQSDERWVYRAWERPEQNMTDVCRPDDAATSSFWRSIWSVPVCHTEADWMRDVERVCEPIPEMEPIFITPVDVARAVRPLPNWKSPGPDGLHNFWLKWFSSSHTCLASQFQSSLESGSLPQFLTTGVTHLLHKSGSPAEPKNYRPITCLSTIYKLLTSILRVKINTHIDKNSIMSASQNGCRNGSRGTKELLLIDMAISQQVRRSRKDLSTCWIDYKKAYDSVPHTWLMRVLELYKVDTTLRTFLESCMGQWKTVLRYPGCRQIQGSDEPVWIKRGIFQGDSLSPLWFCLALNPLSTLLENSGLGCRLRKDGQVISHLLYMDDLKLFAPNKLRLMELLKVTETFSSAIRMEFGVDKCAVMYVKRGEIMESEGLQLSDSIHLKSLSSSETYKYLGMSEALGINVTDMKQSLRERFFGRLRKVLNSLLSGGNKVRAFNGWVMPVLMYSFGILKWTQTELDALDRRVRTLLTESRMHHPRSSVMRLYIPRKCGGRGFLNAKTLHNREVCSLREYFLKAEVGMHRDVVAVDKGLTPLSMAKENWHRPEVLTTDDRKEVWQGKVLHGRFYRALHGPDVDFIASVSWLRFGDLFGETEGFVCAIMDEVMLTNNYRKYIMKDGTVDVCRACHLPGESIRHIISGCSRLANGEYLHRHNQVARIIHQQLALKYKLVESEVPYYKYVPDPVLENDHVTLYWDRSIITDRTIVANKPDIVMMDRSARRVMIIDVTIPHDENLVKAEKEKQIKYLDLAHEVRGMWNMNSVIIVPIVVSANGLIAKSFDDHLSKLSLGGWIKGLIQKAVLLDTARIVRRFLSLQP

SEQ ID NO: 29079 - protein, 1202 aa, Cosmia trapezina
MLTRSAARARPPPPDSSLSSASPPPVSSPTVGAVMTPAAAVASSSSDEYFSPPTSPTPVRRQGRGRPPRSLGLRGQPAPSRVPAAGGCVQRMRWTQSMNENVMRAYYGSTEGGTNLTAYRVRMLSLFQELEPTVNVSAQRISDQVRVIQRNHRLDDAALDRLRSEVLSNHIISNPTQTAVQPSIIDALPPRSNHVVEEVDDRVATVSSQYNDRLRDALEDAFCEYRSTPTELRPRLPRLPMHKKNRALMCALDSLLKDFFESSENLVDTHSILYCAAVAACRLANVKFPNCDGATRPKPAVPAWQCRIERRIDGARVLIGKLYCFRQGNTRPRVMRFVRRAFSGTGISPPEYMSRVTERIDFLKQKVCAWASRIRRYKRRVDRYTQNRMFQSDERWVYRAWERPEQNVTDVCRPDDAATSAFWRSIWSVPVCHAEAGWMKDVERVCEAIPEMEPVLITPLDVARAVRPLPNWKSPGPDGLHNFWLKWLISSHTRLASQFQSSLESGSLPQFLTTGVTHLLHKSGSPAEPKNYRPITCLSTIYKLLTSILRAKINMHIDSNSIMSTSQNGCRNGSRGTKELLLIDMAISQQVRRSRKDLSTCWIDYKKAYDSVSHAWLMRVLELYKIDATLRTFLESCMGQWRTVLRYPGCRRIQGNDEPVRIKRGIFQGDSLSPLWFCLALNPLSTLLEDSGLGYRLRRGGQVISHLLYMDDLKLFAPNKLRLMELLKVTETFSSAIRMEFGVDKCAVMHVKRGEIMESEGIQLSDSIHLRSLSSSETYKYLGMSEALGINVADMKQSLRERFFGRLTKVLISLLSGGNKVRAFNGWVMPVLMYSFGILKWTQTELDALDRRVRTLLTANRMHHPRSSVMRLYIPRKCGGRGFLNAKTLHNREVCSLREYFFKSDVGMHRDVVAVDKGLTPLSMAKENWRKPVVLTTDDRKKVWQSKELHGRFYRALHEPDVDFLASVSWLRFGDLFGETEGFVCAIMDEVILTNNYRRYIMKDGTVDVCRACHRPGESIRHIISGCSRLANGEYLHRHNQVARIIHQQLALKYKLVDSEVPYYKYVPDPVLENDHVTLYWDRSIITDRTIVANKPDIVVIDRLARRAMIVDVTIPHDGNLVKAEKEKQIKYLDLAHEVVDMWNVDSAVIVPIVVTANGLIADSLDQHLSRLSLGGWIKGQIQKAVLLDTARIVRRFLSLQP

SEQ ID NO: 29080 - protein, 1168 aa, Cosmia trapezina
MTPAAAVASSSSDEYFSPPTSPTPVRRQGRGRPPRSLGLRGQPAPSRVPAAGGCVQRMRWTQSMNENVMRAYYGSTEGGTNLTAYRVRMLSLFQELEPTVNVSAQRISDQVRVIQRNHRLDDAALDRLRSEVLSNHIISNPTQTAIQPSIIDALPPRSNHVVEEEDDMVATVSSQCNDRLRSALEDAFREYRSTPTELRPRLPRLPMHKKNRALMCALDSLLKDFFESSENLVDTHSILYCAAVAACRLANVKFPNCDGATRPKPAVPAWQCRIERRIDGARVLIGKLYCFRQGNTRPRVMRFVKRAFLGTGISPPEYMSRVTERIDFLKQKVCAWASRIRRYKRRVDRYAQNRMFQSDERWVYRAWERPEQNVTDLCRPDDAATSTFWRSIWSVPVCHVEAGWMRDVERVCEAIPEMEPVLITPLDVARALRPLPNWKSPGPDGLHNFWLKWLISSHTRLASQFQSSLESGSLPQFLTTGVTHLLHKSGSPAEPKNYRPITCLSTIYKLLTSILRAKINMHIDSNSIMSTSQNGCRNGSRGTKELLLIDMAISQQVRRSRKDLSTCWIDYKKAYDSVSHAWLMRVLELYKIDATLRTFLESCMGQWRTVLRYPGCRRIQGNDEPVRIKRGIFQGDSLSPLWFCLALNPLSTLLEDSGLGYRLRRGGQVISHLLYMDDLKLFAPNKLRLMELLKVTETFSSAIRMEFGVDKCAVMHVKRGEIMESEGIQLSDSIHLRSLSSSETYKYLGMSEALGINVADMKQSLRERFFGRLKKVLISLLSGGNKVRAFNGWVMPVLMYSFGILKWTQTELDALDRRVRTLLTANRMHHPRSSVMRLYIPRKCGGRGFLNAKTLHNREVCSLREYFLKSDVGMHRDVVAVDKGLTPLSMAKENWRKPVVLTTDDRKNVWQSKELHGRFYRALHEPGVDFLASVSWLRFGDLFGETEGFVCAIMDEVILTNNYRRYIMKDGTVDVCRACHRPGESIRHIISGCSRLANGEYLHRHNQVARIIHQQLALKYKLVDSEVPYYKYVPDPVLENDHVTLYWDRSIITDRTIVANKPDIVVIDRLARRAMIVDVTIPHDGNLVKAEKEKQIKYLDLAHEVVDMWNVNSAVIVPIVVTANGLMADSLDQHLSRLSLGGWIKGQIQKAVLLDTARIVRRFLSLQP

SEQ ID NO: 29081 - protein, 1111 aa, Mamestra brassicae
MRWTQSMNENVMRAYYGSTEGGTNLTAYRVRMLSLFQDLEPTVNVSAQRLSDQVRVIQHNCRLDDAALERLRSEVLSNLIISTPTQTVVQAPASGAITPRPNNGSDEVDDRVVTVSSQCNDRLRSALEDALREYRLTPTELRPRLPRLPMHKKNRALVCALDSLLQNIFESSESLVDTHSILFCGAVAACRIANVKFPSCDEAIRPKPAAPAWQCRIERRIDEARALIGKLYCFREGNTRPRVMRFVRRAFSGTGISPREYTFRVTERIDFLKQKVCAWANRIRRYKRRVDRYSQNRMFQSDERWVYRAWERPEQSVTDVYRPDDVATSTFWRSIWSVPIRHAEGGWMRDVERVCEAIPQMEKITITTLDIAKAVRPLPNWKSPGPDGLHNFWLKWYSSSHALLASQFQSSLESGSLPQFLTTGITHLLHKTGSPAEPKNYRPITCLSTVYKLLTSILRAKINEHIESNSIMSASQNGCRKGSRGTKELLLIDMAISQQVRRSRKDLSTCWIDYKKAYDSVPHTWLMKVLELYKIDATLRTFLESCMRQWKTVLRYPGCQPIQGSDEPVWIKRGIFQGDSLSPLWFCLALNPLSTLLEDSGLGYRLRRGGQAISHLLYMDDLKLFAPNNLRLMELLKVTETFSSAIRMEFGVDKCAVMHVKKGEIMESEGIQLSDSIQLRSLSSTESYKYLGMSEALGINGTDMKQSLRERFFGRLKKVLNSLLSGGNKVRAFNGWVMPVLMYTFGILKWTQTELDALDRRVRTLLTANRMHHPRSSVMRLYIPRKCGGRGFLNAKTLHNREMCSLREYFLKADVGMHRDVVAVDKGLTPLSMAKENWRKPVILTTDDRKEVWKGKELHGRFYRALYGSDVDFSASVAWLRFGDLFGETEGFVCAIMDEVILTNNYRRHIMKDGTVDVCRACHRPGESIRHIISGCSRLANGEYLHRHNQVARIIHQQLALKYKLVDSEVPYYKYVPDPVLENDHVTLYWDRSIITDRTIVANKPDIVVIDRLARRTMIIDVTIPYDENLVKAEKEKQIKYLDLAHEVVDMWNVDSAVIVPIVITANGLMAKSFDDHLSKLALRGWIKGLIQKAVLLDTARIVRRFLSLEP

SEQ ID NO: 29082 - protein, 1200 aa, Mamestra brassicae
MLTRAALQRARPPPPDPSLSSASPPPDIGSPLSPAVAVASSSSDEYFSPPTSPTPRHRRQGRGRPPRGLGPRGQPAPSRVPATGGCVQRMRWTQSMNENVMRAYYGSTEGGTNLTAYRVRMLSLFQDLEPTVNVSAQRLSDQVRVIQRNHRLDDAALDRLRSEVLNNLIISTPTQTAVQAPVNGRITPRPNNVSDEVDDRVVTVSSQCNDRLRSALEDALREYRSTPTELRPRLPRLPMHKKNRALVCALDSLLQNIFESSESLVDTHSILYCGAVAACRIANVKFPGCDEAIRPKPAAPAWQRRTERRIDETRALIGKLYCFREGNTRPRVMRFVRRAFSGTEISPRDFTSRVTERIDFLKQKVCAWASRIRRYKRRVDRYSQNRMFQSDERWVYRAWERPEQSVTDVCRPDDVATSIFWRSIWSVPICHAEGGWMRDVERVCEAIPQMEKITITTLDVAKAVRPLPNWKSPGPDGLHNFWLKWYSSSHALLASQFQSSLDSGSLPQFLTTGVTHLLHKTGSPAEPKNYRPITCLSTVYKLLTSILRAKINEHIESNSIMSASQNGCRKGSRGTKELLLIDMAISQQVRRSRKDLSTCGIDYKKAYDSVPHTWLMKVLELYKIDATLRTFLESCMRQWKTVLRYPGCRPIQGSDEPVWIKRGIFQGDSLSPLWFCLALNPLSTLLEDSGLGYRLRRGGQAISHLLYMDDLKLFAPNNLRLMELLKVTETFSSAIRMEFGVDKCAVMHVKKGEIMESEGIHLSDSIQVRSLSSTETYKYLGMLEALGINGTDMKQSLRERFFGRLKKVLNSLLSGGNKVRAFNGWVMPVLMYTFGILKWTQTELDALDRRVRTLLTANRMHHPRSSVMRLYIPRKCGGRGFLNAKTLHNREMCSLREYFLKADVGMHRDVVAVDKGLTPLSMAKENWCTPVILTTDDRKEVWKGKELHGRFYRALHGSDVDFSASVAWLRFGDLFGETEGFVCAIMDEVILTNNYRRHIMKDGTVDMCRACHRPGESIRHIISGCSRLANGEYLHRHNQVARIIHQQLALKYNLVDSEVPYYKYVPDPVLENDHVTLYWDRSIITDRTIVANKPDIVVIDRLARRTMIIDVTIPHDENLVKAEKEKQIKYLDLAHEVVDMWNVESAVIMPIVVTANGLMAKSFDDHLSKLALRSWVKGLIQKAVLLDTARIVRRFLSLEP

SEQ ID NO: 29083 - protein, 1199 aa, Mamestra brassicae
MLTRAALQRARPPPPDPSLSSASPPPDIGSPLSPAVAVASSSSDEYFSPPTSPTPVRRQGRGRPPRGLGPRGQPAPSRVPATGGCVQRMRWTQSMNENVMRAYYGSTEGGTNLTAYRVRMLSLFQDLEPTVNVSAQRLSDQVRVIQRNHRLDDAALDRLRSEILNNLIISTPTQTAVQAPVNGRITPRPNNVSDEVDDRVVKVSSQCNDRLRSALEDALREYRSTPTELRPRLPRLPMHKKNRALVCALDSLLQNIFESSESLVDTHSILYCGAVAACRIANVKFPGCDEAIRPKPFAPAWQRRIERRIDETRALIGKLYCFREGNTRPRVMRFVRRAFSGTEISPRDFTSRVTERIDFLKQKVCAWASRIRRYKRRVDRYSQNRMFQSDERWVYRAWERPEQSVTDVCRPDDVATSIFWRSIWSVPICHAEGGWMRDVERVCEAIPQMEKITITTLDVAKAVRPLPNWKSPGPDGLHNFWLKWYSSSHALLASQFQSSLDSGSLPQFLTTGVTHLLHKTGSPTEPKNYRPITCLSTVYKLLTSILRAKINEHIESNSIMSASQNGCRKGSRGTKELLLIDMAISQQVRRSRKDLSTCCIDYKKAYDSVPHTWLMKVLELYKIDATLRTFLESCMRQWKTVLRYPGCRPIQGSDEPVWIKRGIFQGDSLSPLWFCLALNPLSTLLEDSGLGYRLRRGGQAISHLLYMDDLKLFAPNNLRLMELLKVTETFSSAIRMEFGVDKCAVMHVKKGEIMESEGIHLSDSIQVRSLSSTETYKYLGMLEALGINGTDMKQSLRERFFGRLKKVLNSLLSGGNKVRAFNGWVMPVLMYTFGILKWTQTELDALDRRVRTLLTANRMHHPRSSVMRLYIPRKCGGRGFLNAKTLHNREVCSLREYFLKADVGMHRDVVAVDKGLTPLSMAKENWRTPVILTTDDRKEVWKGKELHGRFYRALHGSDVDFSASVAWLRFGDLFGETEGFVCAIMDEVILTNNYRRHIMKDGTVDMCRACHRPGESIRHIISGCSRLANGEYLHRHNQVARIIHQQLALKYNLVDSEVPYYKYVPDPVLENDHVTLYWDRSIITDRTIVANKPDIVVIDRLARRTMIIDVTIPHDENLVKAEKEKQIKYLDLAHEVVDMWNVESAVIVPIVVTANGLMAKSFDDHLSKLALRSWVKGLIQKAVLLDTARIVRRFLSLEP

SEQ ID NO: 29084 - protein, 1202 aa, Noctua fimbriata
MITRAAYRRARLPPPDPSLSSASPPPESSPIVSAVTPAVAVASSSSDEYFSPPTSPTPVRRQGRGRPPRSLGLRGHPAPSRVPAAGGCVQRMKWTHSINENVMRAYYGSTEGGTNLTAYRVGMLSLFQVLEPTVNVSAQRLSDQVRVIQRNHMLDDAVLDRLRSEVLSNRIVLTPAQTAVQASVIDATPPRFNPAVVEEDDRVTVVSSQCNDRLRSALEDALREYRSTPTELRPRLPRLPMHNKNRALVCALDSQLKNIFESSENLVDTHSILYCGAVAACRLANVKFPNCDVATRPKPAVPAWQRRIERRIDGARVLIGKLHCFREGNTRPRVMRFVRRAFSGTGISPQEYMSRVTERIDFLKQKVYAWANRIRRYKRRVDRYSQNRMFQSDERWVYRAWERPELNMTDVCRPDDAATSSFWRSIWSVPVCHTEADWMRDVERVCEPIPEMEPIMITPLDITRAVRPLPNWKSPGPDGLHNFWLKWLSSSHTCLASQFQSSLESGSLPQFLTTGVTHLLHKSGSPAEPKNYRPITCLSTVYKLLTSILRAKINTHIDKNSIMSASQNGCRNGSRGTKELLLIDMAISQQVRRSRKDLSTCWIDYKKAYDSVPHTWLMRVLELYKIDATLRAFLESCMGQWRTVLRYPGCRQIQGNDEPVWIKRGIFQGDSLSPLWFCLALNPLSTLLEDSGLGYRLRRGGQVISHLLYMDDLKLFAPNKLQLMELLKVTETFSSAIRMEFGVDKCAVMYVKRGEIMESEGIQLSDSIHLRSLSSSESYKYLGMSEALGINVTDMKQSLKERFFGRLNKVLHSLLSGGNKVRAFNGWVMPVLMYSFGVLKWTQTELDALDRRVRTLLTANRMHHPRSSVMRLYIPRKCGGRGFLNAKSLHNREMCSLREYFLKVEVGMHRDVVAVDKGLTPLSMAKENWRKPEVLTTDDRKEVWQGKELHGRFYRALHGPDVDFLASVSWLRFGDLFGETEGFVCAIMDEVMLTNNYRKYIMKDGTVDVCRACHRPGESIRHIISGCSRLANGEYLHRHNQVARIIHQQLALKYKLVESEVPYYKYVPDPVLEKDHVTLYWDQSIITDRTIVANKPDIVVIDRSARRVMIVDVTIPHDENLVKAEKEKQIKYLDLAHEVVDMWHMNSAVIVPIVVTANGLIAKSLDDHLSKLSLGGWIKGLIQKAVLLDTARIVRRFLSLEP

SEQ ID NO: 29085 - protein, 1202 aa, Noctua fimbriata
MITRAASRRARLPPPDQSLSSASPPPESSPIVSAVTPAVAVASSSSDEYFSPPTSPTPVRRQGRGRPPRSLGLRGHLAPSRVPAAGGCVQRMRWTHSINENVMRAYYGSTEGGTNLTAYRVGMLSLFQVLEPTINVSAQRLSDQVRVIQRNHMLDDAVLDRLRSEVLSNRIVFTPAQTAVQASVIDATPPRFNPAVVEEDDRVAVVSSQCNDRLRSALEDALREYRSTPTELRPRLPRLPMHNKNRALVCALDSQLKNLFESSENLVDTHSILYCGAVAACRLANVKFPNCDVATRPKPAVPAWQRRIECRIDGARVLIGKLHCFREGNTRPRVMRFVRRAFSGTGISPQEYMSRVTERIDFLKQKVYAWANRIRRYKRRVDRYSQNRMFQSDERWVYRAWERPDQNMTDMCRPDDAATSSFWRSIWSVPVCHTEADWMRDVEQVCEPIPEMEPILITPLDVARAVRPLPNWKSPGPDGLHNFWLKWLSSSHTCLASQFQSSLESGSLPQFLTTGVTHLLHKSGSPAEPKNYRPITCLSTVYKLLTSILRAKINTHIDKNSIMSASQNGCRNGSRATKELLLIDMAISQQVRRSRKDLSTCWIDYKKAYDSVPHTWLMRVLELYKIDATLRAFLESCMGQWRTVLRYPGCRQIQGNDEPVWIKRGIFQGDSLSPLWFCLALNPLSTLLEDSGLGYRLRRGGQVISHLLYMDDLKLFAPNKLQLMELLKVTETFSSAIRMEFGVDKCAVMYVKQGEIMESEGIQLSDSIHLRTLSSTESYKYLGMSEALGINVTDMKQSLKERFFGRLNKVLHSLLSGGNKVRAFNGWVMPVLMYSFGVLKWTQTELDALDRRVRTLLTANRMHHPRSSVMRLYIPRKCGGRGFLNAKSLHNREMCSLREYFFKVEVGMHRDVVAVDKGLTPLSMAKENWRKPEVLTTDDRKEVWQGKELHGRFYRALHGPDVDFLASVSWLRFGDLFGETEGFVCAIMDEVMLTNNYRKYIMKDGTVDVCRACHRPGESIRHIISGCSRLANGEYLHRHNQVARIIHQQLALKYKLVESEVPYYKYVPDPVLEKDHVTLYWDQSIITDRTIVANKPDIVVIDRSARRVMIVDVTIPHDENLVKAEKEKQIKYLDLAHEVVDMWNVNSAIIVPIVVTANGLIAKSLDDHLSKLSLGGWIKGLIQKAVLLDTARIVRRFLSLEP

SEQ ID NO: 29086 - protein, 1202 aa, Noctua fimbriata
MITRAAYRRARLPPPDPSLSSASPPPESSPIVSAVTPAVAVASSSSDEYFSPPTSPTPVRRQGRGRPPRSLGLRGHPAPSRVPAAGGCVQRMRWTHSINENVMRAYYGSTEGGTNLTAYRVGMLSLFQVLEPTVNVSAQRLSDQVRVIQRNHMLDDAVLDRLRSEVLSNRIVLTPAQTAVQASVIDATPPRFNPAVVEEDDRVAVVSSQCNDRLRSALEDALREYRSTPTELRPRLPRLPMHNKNRALVCALDSQLENIFESSENLVDTHSILYCGAVAACRLANVKFPNCDVATRPKPAVPAWQRRIERRIDGARVLIGKLHCFREGNTRPRVMRFVRRAFSGTGISPQEYMSRVTERIDFLKQKVYAWANRIRRYKRRVDRYSQNRMFQSDERWVYRAWERPDLNMTDVCRPDDAATSSFWRSIWSVPVCHTEADWMRDVERVCEPIPEMEPILITRLDIARAVRPLPNWKSPGPDGLHNFWLKWLSSSHTCLASQFQSSLESGSLPQFLTTGVTHLLHKSGSPAEPKNYRPITCLSTVYKLLTSILRAKINTHIDKNSIMSASQNGCRSGSRGTKELLLIDMAISQQVRRSRKDLSTCWIDYKKAYDSVPHTWLMRVLELYKIDATLRAFLESCMGQWRTVLRYPGCGQIQGNDEPVWIKRGIFQGDSLSPLWFCLALNPLSTLLEDSGLGYRLRRGGQVISHLLYMDDLKLFAPNKLQLMELLKVTETFSSAIRMEFGVDKCAVMYVKQGEIMESEGIQLSDSIHLRTLSSTESYKYLGMSEALGINVTDMKQSLKERFFGRLNKVLHSLLSGGNKVRAFNGWVMPVLMYSFGVLKWTQTELDALDRRVRTLLTANRMHHPRSSVMRLYIPRKCGGRGFLNAKSLHNREMCSLREYFLKVEVGMHRDVVAVDKGLTPLSMAKENWRKPEVLTTDDRKEVWQGKQLHGRFYRALHGPDVDFLASVSWLRFGDLFGETEGFVCAIMDEVMLTNNYRKYIMKDGTVDVCRACHRPGESIRHIISGCSRLANGEYLHRHNQVARIIHQQLALKYKLVESEVPYYKYVPDPVLEKDHVTLYWDQSIITDRTIVANKPDIVVIDRSARRVMIVDVTIPHDENLVKAEKEKQIKYLDLAHEVVDMWHMNSAAIVPIVVTANGLIAKSLDDHLSKLSLGGWIKGLIQKAVLLDTARIVRRFLSLEP

SEQ ID NO: 29087 - protein, 1202 aa, Noctua fimbriata
MITRAAYRRARLPPPDPSLSSASPPPESSPIVSAVTPAVAVASSSSDEYFSPPTSPTPVRRQGRGRPPRSLGLRGHPAPSRVPAAGGCVQRMRWTHSINENVMRAYYGSTEGGTNLTAYRVGMLSLFQVLEPTVNVSAQRLSDQVRVIQRNHMLDDAVLDRLRSEVLSNRIVLTPAQTAVQASVIDATPPRFNPAVVEEDDRVAVVSSQCNDRLRSALEDALREYRSTPTELRPRLPRLPMHNKNRALVCALDSQLENIFESSENLVDTHSILYCGAVAACRLANVKFPNCDVATRPKPAVPAWQRRIERRIDGARVLIGKLHCFREGNTRPRVMRFVRRAFSGTGISPQEYMSRVTERIDFLNQKVYAWANRIRRYKRRVDRYSQNRMFQSDERWVYRAWERPELNMTDVCRPDDAATSSFWRSIWSVPVCHTEADWMRDVERVCEPIPEMEPILITRLDIARAVRPLPNWKSPGPDGLHNFWLKWLSSSHTCLASQFQSSLESGSLPQFLTTGVTHLLHKSGSPAEPKNYRPITCLSTVYKLLTSILRAKINTHIDKNSIMSASQNGCRSGSRGTKELLLIDMAISQQVRRSRKDLSTCWIDYKKAYDSVPHTWLMRVLELYKIDATLRAFLESCMGQWRTVLRYPGCGQIQGNDEPVWIKRGIFQGDSLSPLWFCLALNPLSTLLEDSGLGYRLRRGGQVISHLLYMDDLKLFAPNKLQLMELLKVTETFSSAIRMEFGVDKCAVMYVKQGEIMESEGIQLSDSIHLRTLSSTESYKYLGMSEALGINVTDMKQSLKERFFGRLNKVLHSLLSGGNKVRAFNGWVMPVLMYSFGVLKWTQTELDALDRRVRTLLTANRMHHPRSSVMRLYIPRKCGGRGFLNAKSLHNREMCSLREYFLKVEVGMHRDVVAVDKGLTPLSMAKENWRKPEVLTTDDRKEVWQGKELHGRFYRALHGPDVDFLASVSWLRFGDLFGETEGFVCAIMDEVMLTNNYRKYIMKDGTVDVCRACHRPGESIRHIISGCSRLANGEYLHRHNQVARIIHQQLALKYKLVESEVPYYKYVPDPVLEKDHVTLYWDQSIITDRTIVANKPDIVVIDRSARRVMIVDVTIPHDENLVKAEKEKQIKYLDLAHEVVDMWNVNSAIIVPIVVTANGLIAKSLDDHLSKLSLGGWIKGLIQKAVLLDTARIVRRFLSLEP

SEQ ID NO: 29088 - protein, 1050 aa, Noctua fimbriata
MLDDAVLDRLRSEVLSNRIVLTPAQTAVQASVIDATPPRFNPAVVEEDDRVAVVSRQCNDRLRSALEDALREYRSTPTELRPRLPRLPMHNKNRALVCALDSQLENIFESSENLVDTHSILYCGAIAACRLANVKFPNCDVATRPKPAVPAWQRRIERRIDGARVLIGKLHCFWEGNTRPRVMRFVKRAFSGTGISPQEYMSRVTERIDFLKQKVYAWANRIRRYKRRVDRYSQNRMFQSDERWVYRAWERPELNMTDVCRPDDAATSSFWRSIWSVPVCHTEADWMRDVERVCEPIPEMEPILITPLDIARAVRPLPNWKSPGPDGLHNFWLKWLSSSHTCLASQFQSSLESGSLPQFLTTGVTHLLHKSGSPAEPKNYRPITCLSTVYKLLTSILRAKINTHIDKNSIMSASQNGCRNGSRGTKELLLIDMAISQQVRRSRKDLSTCWIDYKKAYDSVPHTWLMRVLELYKIDATLRAFLESCMGQWRTVLRYPGCRQIQGNDEPVWIKRGIFQGDSLSPLWFCLALNPLSTLLEDSGRGYRLRRGGQVISHLLYMDDLKLFAPNKLQLMELLKVTETFSSAIRMEFGVDKCAVMYVKRGEIMESEGIQLSDFIHLRSLSSSESYKYLGMSEALGINVTDMKQSLKERFFGRLNKVLHSLLSGGNKVRAFNGWVMPVLMYSFGVLKWTQTELDALDRRVRTLLTANRMHHPRSSVMRLYIPRKCGGRGFLNAKSLHNREMCSLREYFLKVEVGMHRDVVAVDKGLTPLSMAKENWCKPEVLTTDDRKEVWQGKELHGRFYRALHGPDVDFLASVSWLRFGDLFGETEGFVCAIMDEVMLTNNYRKYIMKDGTVDVCRACHCPGESIRHIISGCSRLANGEYLHRHNQVARIIHQQLALKYKLVESEVPYYKYVPDPVLEKNHVTLYWDQSIITDRTIVANKPDIVVIDRSARRVMIVDVTIPHDENLVKAEKEKQIKYLDLAHEVVDMWHVNSAVIVPIVVTANGLIAKSLDDHLSKLSLGGWIKGLIQKAVLLDTARIVRRFLSLEP

SEQ ID NO: 29089 - protein, 1200 aa, Noctua fimbriata
MITRAAYRRARLPPPDPSLSSASTPPESSPIVSAVTPAVAVASSSSDEYFSPPTSPTPVRRQGRGRPPRSLGLRGHPAPSRVPAAGGCVQRMRWTHSINENVMRAYYGSTEGGTNLTAYRVGMLSLFQVLEPTVNVSAQRLSDQVRVIQRNHMLDDAVLDRLRSEVLSNRIVLTPAQTAVQASVIDATPPRFNPAVVEEDDRVAVVSSQCNDRLRSALEDALREYRSTPTELRPRLPRLPMHNKNRALVCALDSQLENIFESSENLVDTHSILYCGAVAACRLANVKFPNCDVATRPKPAVPAWQRRIERRIDGARVLIGKLHCFREGNTRPRVMRFVRRAFSGTGISPQEYMSRVTERIDFLKQKVYAWANRIRRYKRRVDRYSQNRMFQSDERWVYRAWERPELNMTDVCRPDDAATSSFWRSIWSVPVCHTEADWMRDVERVCEPIPEMEPILITRLDIARAVRPNWKSPGPDGLHNFWLKWLSSSHTCLASQFQSSLESGSLPQFLTTGVTHLLHKSGSPAEPKNYRPITCLSTVYKLLTSILRAKINTHIDKNSTMSASQNGCRSGSRGTKELLLIDMAISHQVRRSRKDLSTCWIDYKKAYDSVPHTWLMRVLELYKIDATLRAFLESCMGQWRTVLRYPGCGQIQGNDEPVWIKRGIFQGDSLSPLWFCLALNPLSTLLEDSGLGYRLRRGGQVISHLLYMDDLKLFAPNKLQLMELLKVTETFSSAIRMEFGVDKCAVMYVKQGEIMESEGIQLSDSIHLRTLSSTESYKYLGMSEALGINVTDMKQSLKERFFGRLNKVLHSLLSGGNKVRAFNGWVMPVLMYSFGVLKWTQTELDALDRRVRTLLTANRMHHPRSSVMRLYIPRKCGGRGFLNAKSLHNREMCSLREYFLKVEVGMHRDVVAVDKGLTPLSMAKENWRKPEVLTTDDRKEVWQGKELHGRFYRALHGPDVDFLASVSWLRFGDLFGETEGFVCAIMDEVMLTNNYRKYIMKDGTVDVCRACHRPGESIRHIISGCSRLANGEYLHRHNQVARIIHQQLALKYKLVESEVPYYKYVPDPVLEKDHVTLYWDQSIITDRTIVANKTDIVVIDRSARRVMIVDVTIPHDENLVKAEKEKQIKYLDLAHEVVDMWNVNSAIIVPIVVTANGLIAKSLDDHLSKLSLGGWIKGLIQKAVLLDTARIVRRFLSLEP

SEQ ID NO: 29090 - protein, 1202 aa, Noctua fimbriata
MITRAASRRARLPPPDQSLSSASPPPESSPIVSAVTPAVAVASSSSDEYFSPPTSPTPVRRQGRGRPPRSLGLRGHPAPSRVPAAGGCVQRMRWTHSINENVMRAYYGSTEGGINLTAYRVGMLSLFQVLEPTINVSTQRLSDQVRVIQRNHMLDDAVLDRLRSEVLSNRIVFTPAQTAVQASVIDATPPRFNPAVVEEDDRVAVVSSQCNDRLRSALEDALREYRSTPTELRPRLPRLPMHNKNRALVCALDSQLKNLFESSENLVDTHSILYCGAVAACRLANVKFPNCDVATRPKPAVPAWQRRIECRIDGARVLIGKLHCFREGNTRPRVMRFVRRAFSGTGISPQEYMSRVTERIDFLKQKVYAWANRIRRYKRRVDRYSQNRMFQSDERWVYRAWERPDQNMTDMCRPDDAATSSFWRSIWSVRVCHTEADWMRDVEQVCEPIPEMEPILITPLDVARAVRPLPNWKSPGPDGLHNFWLKWLSSSHTCLASQFQSSLESGSLPQFLTTGVTHLLHKSGSPAEPKNYRPITCLSTVYKLLTSILRAKINTHIDKNSIMSASQNGCRNGSRATKELLLIDMAISQQVRRSRKDLSTCWIDYKKAYDSVPHTWLMRVLELYKIDATLRAFLESCMGQWRTVLRYPGCRQIQGNDEPVWIKRGIFQGDSLSPLWFCLALNPLSTLLEDSGLGYRLRRGGQVISHLLYMDDLKLFAPNKLQLMELLKVTETFSSAIRMEFGVDKCAVMYVKQGEIMESEGIQLSDSIHLRTLSSTESYKYLGMSEALGINVTDMKQSLKERFFGRLNKVLHSLLSGGNKVRAFNGWVMPVLMYSFGVLKWTQTELDALDRRVRTLLTANRMHHPRSSVMRLYIPRKCGGRGFLNAKSLHNREMCSLREYFLKVEVGMHRDVVAVDKGLTPLSMAKENWRKPEVLTTDDRKEVWQGKELHGRFYRALHGPDVDFLASVSWLRFGDLFGETEGFVCAIMDEVMLTNNYRKYIMKDGTVDVCRACHRPGESIRHIISGCSRLANGEYLHRHNQVARIIHQQLALKYKLVESEVPYYKYVPDPVLEKDHVTLYWDQSIITDRTIVANKPDIVVIDRSARRVMIVDVTIPHDENLVKAEKEKQIKYLDLAHEVVDMWNVNSAIIVPIVVTANGLIAKSLDDHLSKLSLGGWIKGLIQKAVLLDTARIVRRFLSLEP

SEQ ID NO: 29091 - protein, 1202 aa, Noctua fimbriata
MITRAASRRARLPPPDQSLSSASPPPESSPIVSAVTPAVAVASSSSDEYFSPPTSPTPVRRQGRGRPPRSLGLRGHPAPSRVPAAGGCVQRMRWTHSINENVMRAYYGSTEGGTNLTAYRVGMLSLFQVLEPTINVSAQRLSDQVRVIQRNHMLDDAVLDRLRSEVLSNRIVLTPAQTAVQASVIDATPPRFNPAVVEEDDRVAVVSSQCNDRLRSALEDALREYRSTPTELRPRLPRLPMHNKNRALVCALDSQLKNLFESSENLVDTHSILYCGAVAACRLANVKFPNCDVATRPKPAVPAWQRRIECRIDGARVLIGKLHCFREGNTRPRVMRFVRRAFSGTGISPQEYMSRVTERIDFLKQKVYAWANRIRRYKRRVDRYSQNRMFQSDERWVYRAWERPDQNMTDMCRPDDAATSSFWRSIWSVPVCHTEADWMRDVEQVCEPIPEMEPILITPLDVARAVRPLPNWKSPGPDGLHNFWLKWLSSSHTCLASQFQSSLESGSLPQFLTTGVTHLLHKSGSPAEPKNYRPITCLSTVYKLLTSILRAKINTHIDKNSIMSASQNGCRNGSRGTKELLLIDMAISQQVRRSRKDLSTCWIDYKKAYDSVPHTWLMRVLELYKIDATLRAFLESCMGQWRTVLRYPGCRQIQGNDEPVWIKRGIFQGDSLSPLWFCLALNPLSTLLEDSGLGYRLRRGGQVISHLLYMDDLKLFAPNKLQLMELLKVTETFSSAIRMEFGVDKCAVMYVKQGEIMESEGIQLSDSIHLRTLSSTESYKYLGMSEALGINVTDMKQSLKERFFGRLNKVLHSLLSGGNKVRAFNGWVMPVLMYSFGVLKWTQTELDALDRRVRTLLTANRMHHPRSSVMRLYIPRKCGGRGFLNAKSLHNREMCSLREYFLKVEVGMHRDVVAVDKGLTPLSMAKENWRKPEVLTTDDRKEVWQGKELHGRFYRALHGPDVDFLASVSWLRFGDLFGETEGFVCAIMDEVMLTNNYRKYIMKDGTVDVCRACHRPGESIRHIISGCSRLANGEYLHRHNQVARIIHQQLALKYKLVESEVPYYKYVPDPVLEKDHVTLYWDQSIITDRTIVANKPDIVVIDRSARRVMIVDVTIPHDENLVKAEKEKQIKYLDLAHEVIDMWNVNSAIIVPIVVTANGLIAKSLDDHLSKLSLGGWIKGLIQKAVLLDTARIVRRFLSLEP

SEQ ID NO: 29092 - protein, 1199 aa, Noctua fimbriata
MITRAAYRRARLTTPDSPLSSASPPPDPGSPVLPAAAVASSSSDEYFSPPTSPTPVRRQGRGRPPRSLGLRGHPTPSRVPAAGGCVQRMRWTHSINENVMRAYYGSTEGGTNLTAYRVRMLSLFQVLEPTVNVSAQRLSDQVRVIQRNHMLDDAVLDRLRSEVLSNRVILTPAQTAVQASVIDATPPRFNPAVVEEDDRVAVVSSQCNDRLRSALEDALREYRSTPTELRPRLPRLPMHNKNRALVCALDSQLKNLFENSENLVDTHSILYCGAVAACRLANVKFPNCDVATRPKPAVPAWQRRIECRIDGARVLIGKLHCFREGNTRPRVMHFVRRAFSGTGISPQEYMSRVTERIDFLKQKVYAWANRIRRYKRRVDRYSQNRMFQSDERWVYRAWERPDQNMTDVCRPDDAATSSFWRSIWSVPVCHTEADWMRNVEQVCEPIPEMEPILITPLDVARAVRPLPNWKSPGPDGLHNFWLKWLSSSHTCLASQFQSSLESGSLPQFLTTGVTHLLHKSGSPAEPKNYRPITCLSTVYKLLTSILRAKINSHIDKNSIMSASQNGCRNGSRATKELLLIDMAISQQVRRSRKDLSTCWIDYKKAYDSVPHTWLMRVLELYKIDATLRAFLESCMGQWRTVLRYPGCRQIQGNDEPVWIKRGIFQGDSLSPLWFCLALNPLSTLLEDSGLGYRLRRGGQVISHLLYMDDLKLFAPNKLQLMELLKVTETFSSAIRMEFGVDKCAVMYVKRGEIMESEGIQLSDSIHLRSLSSSESYKYLGMSEALGINVTDMKQSLKERFFGRLNKVLHSLLSGGNKVRAFNGWVMPVLMYSFGVLKWTQTELDALDRRVRTLLTANRMHHPRSSVMRLYIPRKCGGRGFLNAKCLHNREMCSLREYFLKVEVGMHRDVVAVDKGLTPLSMAKENWRKPEVLTTDDRKEVWQGKELHGRFYRALHGPDVDFLASVSWLRFGNLFGETEGFVCAIMDEVMLTNNYRKYIMKDGTVDVCRACHRPGESIRHIISGCSRLANGEYLHRHNQVARIIHQQLALKYKLVESEVPYYKYVPDPVLEKDHVTLYWDQSIITDRTIVANKPDIVVIDRSARRVMIVDVTIPHDENLVKAEKEKQIKYLDLAHEVVDMWNVNSAIIVPIVVTANGLIAKSLDDHLSKLSLGGWIKGLIQKAVLLDTARIVRRFLSLEP

SEQ ID NO: 29093 - protein, 868 aa, Atethmia centrago
MRFVRRAFSGTGISPREYMSRVTERIDFLKQKVCAWASRIRRYKRRVDRYTQNRMFQSDERWVYRAWERPEQNETDMCRPDDATTTAFWRSIWSEPVCHAEADWMRDVERVCETIPEMEVVVITPSDIARAVRPLPNWKSPGPDGLHNFWLKWLTSSHTCLASQFQSSLESGSLPQFLTTGITHLLHKSGSPAEPKNYRPITCLSTVYKLLTSILRAKINTHIDSNSIMSASQNGCRNGSRGTKELLLIDMTISQQVRRSRKDLSTCWIDYKKAYDSVPHTWLMKVLELYKIDTTLRTFLESCMGQWRTVLRYPGCRRIQGNDEPVWIKRGIFQGDSLSPLWFCLALNPLSTLLEDSGLGYRLRRGGQVISHLLYMDDLKIFAPNKLRLMELLKVTETFSGAIRMEFGVDKCAVMHVKRGEIMESEGIQLSDSIHLRSLSSPESYKYLGMSEALGINVTDMKQLLKERFFGRLKKVLISLLSGGNKVRAFNGWVMPVLMYSFGILKWTQTELDALDRRVRTLLTANRMHHPRSSVMRLYIPRKCGGRGFLNAKTLHNREICSLREYFLKAEVGMHRDVVAVDKGLTPLSMAKENWCKPVVLTTDDRKEIWQNKELHGRFYRALHEPDVDFLASVAWLRFGDLFGETEGFVCAIMDEVILTNNYRRHIMKDGTADVCRACHRPGESIRHIISGCSRLANGEYLHRHNQVARIIHQQLALKYKLVNSEVPYYKYVPDPVLENDHVTLYWDRSIITDRTIVANKPDIVVIDRLARRAMIVDVTIPHDDNLVKAEKEKQIKYLDLAHEVVDMWNVNSVVIVPIVVTANGLMAESLNHHLSRLSLGGWIKGLIQKAVLLDTARIVRRFLSLEP

SEQ ID NO: 29094 - protein, 1202 aa, Atethmia centrago
MLTRSAARARPPPPDSSLSSASPPPVPSPTVSAVTTPAAVVASNSSDEYFSPPTSPTPVRRQGRGRPPKSLGLRGHPAPSRVPAAGGCVQRMRWTQSMNENVMRAYYGSTEGGTNLTAYRVRMLSLFQELEPTVNVSAQRLSDQVRVIQRNHRLDDAALDRLRSEVLSNHIVTTPAQTAARAPIIDAIPLRSNHSVEEEDVRVATVSSQCNIRLRSALEDAFREYRSTPTELRPRLPRLTMHKKNRALVCALDSLLKDFFESSEDLVDTHSILYCAAVAACRLANVKFPNFDGATRPKPAVPAWQCRIQRRIDGARVLIGKLYCFREGNTRPRVMRFMRRAFSGTGISPQEYMSRITERIDFLKQKVCAWASRIRRYKRRVDRYLQNRTFQSDERWVYRAWERPEQNVTDMCRPDDAATSSFWRSIWSVPVCHAEADWMRDVERVCGIIPELEVVVITPSDIARAVRPLPNWKSPGPDGLHNFWLKWLTSSHTCLASQFQSSLEAGSLPQFLTTGITHLLHKSGNPAEPKNYRPITCLSTVYKLLTSILRAKINTHIDNNLIMSASQNGCRNGSRGTKELLLIDMAISQQVRRSRKDLSTCWIDYKKAYDSVPHTWLMRVLELYKIDATLRTFLESCMGQWRTVLRYPGYRQIQGNDEPVWIKRGIFQGDSLSPLWFCLALNPLSTLLEDSGLGYRLRRGGQVISHLLYMDDLKLFAPNKFRLMELLKVTETFSGAIRMEFGVDKCAVMHVKRGEIMESEGIELSDSVHLRSLSSSESYKYLGMSEALGINVTDMKQSLKERFFGRLKKVLSSLISGGNKVRAFNGWVMPVLMYSFGILKWTQTELDALDRRVRTLLTANRMHHPRSSMMRLYIPRKCGGRGFLNAKTLHNREICSLREYFLKADVGMHRDVVAVDKGLTPLSMAKENWCKPVVLTTDDRKEIWQSKELHGRFYRALHEPDVDFLASVSWLRFGDLFGETEGFVCAIMDEVILTNNYRRHIMKDGTVDVCRACHRPGESIRHIISGCSRLANGEYLHRHNQAARIIHQQLVLKYKLVNSEVPYYKYVPDPVLENDHVTLYWDRSIITDRTIVANKPDIVVIDRLARRAIIVDVTIPHDENLVKAEKEKQIKYLDLAHEVVDMWNVNSAVIVPIVVTANGLMAESLNEHLSRLSLGGWIKGRIQKAVLLDTARIVRKFLSLEP

SEQ ID NO: 29095 - protein, 1202 aa, Atethmia centrago
MLTRSAARARPPPPDSSLSSASPPPVPSPTVSAVTTPAAVVASSSSDEYFSPPTSPTPVRRQGRGRPPKSLGLRGQLAPSRVPAAGGCVQRMRWTQSMNENVMRAYYGSTEGGTNLTAYRVRMLSLFQKLEPTVNVSAQRLSDQVRVIQRNHRLDDAALDRLRSEVLSNHIVSTPAQTATHAPIINAIPPRSNHDVEEEDDRVATVSSQCNVRLRSALEDAFRECRSTPTELRPRLPRLPMHKKNRALVCTLDSLLKDFFESSEDLVDTHSILYCAAVAACRLANVKFPNCDGATRPKPAVPAWQCRIERRIDGARVLIGKLYCFREGNTRPRVMRFVRRAFSGTGISPREYMSRVTERIDFLKQKVCAWASRIRRYKRRVDRYTQNRMFQSDERWVYRAWERPEQNETDVCRPDDATTTAFWRSIWSVPVCHAEADWMRDVERVCETIPEMDVVIITPSDIARAVRPLPNWKSPGPDGLHNFWLKWLTSSHTCLASQFQSSLESGSLPQFLTTGITHLLHKSGSPAEPKNYRPITCLSTVYKLLTSILRAKINTHIDSNSIMSASQNGCRNGSRGTKELLLIDMAISQQVRRFRKDLSTCWIDYKKAYDSVPHTWLMRVLEFYKIDTTLRTFLESCMGQWRTVLRYPGCRQIQGNDEPVWIKRGIFQGDSLSPLWFCLALNPLSTLLEDSGLGYRLRRGGQVISHLLYMDDLKIFALNKLQLMELLKVTETFSSAIRMEFGVDKCAVMHVKRGEIMESEGIQLSDSIHLRSLSSPESYKYLGMSEALGINVTDMKQSLKERFFGRLKKVLISPLSGGNKVRAFNGWVMPVLMYSFGILKWTQTELDALDRRVRTLLTANRMHHPRSSVMRLYIPRKCGGRGFLNAKTLHNREICSLREYFLKTEVGMHRDVVAVDKGLTPLSMAKENWCKPVILTTDDRKEIWQNKELHGRFYRALHEPDVDFLASVSWLRFGDLFGETEGFVCAIMDEVILTNNYRRHIMKDGTVDVCRACHRPGESIRHIISGCSRLANGEYLHRHNQVARIIHQQLALKYKLVNSEVPYYKYAPDPVLENDHVTLYWDRSIITDRTIVANKPDIVVIDRLARRAMIVDVTIPHDENLVKAEKEKQIKYLDLAHEVVDMWNVDSAVIVPIVVTANGLMAESLNHLLSRLSLGGWIKGLIQKAVLLDTARIVRRFLSLES

SEQ ID NO: 29096 - protein, 1202 aa, Atethmia centrago
MLTRSAARARPPPPDSSLSSASPPPVPSPTVSAVTTPAAVVASSSSDEYFSPPTSPTPVRRQGRGRPPKSLGLRGQLAPSRVPAAGGCVQRMRWTQSMNENVMRAYYGSTEGGINLTAYRARMLSLFQELEPTVNVSAQRLSDQVRVIQRNHRLDDAALDRLRSEVLSNHIVSTPAQTATHAPIIDAIPPRSNHDVEEEDDRVATVSSQCNVRLRSALEDAFREYRSTPTELRPRLPRLPMHKKNRALVCALDSLLKDFFESSEDLVDTHSILYCAAVAACRLANVKFPNCDEATRPKPAVPAWQCRIERRIDGARVLISKLYCFREGNTRPRVMRFVRRAFSGTGISPREYMSRVTERIDFLKQKVCAWASRIRRYKRRVDRYTQNRMFQSDERWVYRAWERPEQNETDMCRPDDATTTAFWRSIWLEPVCHAEADWMRDVERVCETIPEMEVVVITPSDIARAVRPLPNWKSPGPDGLHNFWLKWLTSSHTCLASQFQSSLESGSLPQFLTTGITHLLHKSGSPAEPKNYRPITCLSTVYKLLTSILRAKINTHIDSNSIMSASQNGCRNGSRGTKELLLIDMAISQQVRRSRKDLSTCWIDYKKAYDSVPHTWLMKVLELYKIDTTLRTFLESCMGQWRTVLRYPGCRRIQGNDEPVWIKRGIFQGDSLSPLWFCLALNPLSTLLEDSGLGYRLRRGGQVISHLLYMDDLKIFAPNKLRLMELLKVTETFSGAIRMEFGVDKCAVMHVKRGEIMESEGIQLSDSIHLRSLSSPESYKYLGMSEALGINVTDMKQLLKERFFGRLKKVLISLLSGGNKVRAFNGWVMPVLMYSFGILKWTQTELDALDRRVRTLLTANRMHHPRSSVMRLYIPRKCGGRGFLNAKTLHNREICSLREYFLKAEVGMHRDVVAVDKGLTPLSMAKENWCKPVVLTTDDRKEIWQNKELHGRFYRALHEPDVDFLASVSWLRFGDLFGETEGFVCAIMDEVILTNNYRRHIMKDGTVDVCRACHRPGESIRHIISGCSRLANGEYLHRHNQVARIIHQQLALKYKLVNSEVPYYKYVPDPVLENDHVTLYWDRSIITDRTIVANKPDIVVIDRLARRAMIVDVTIPHDDSLVKAEKEKQIKYLDLAHEIVDMWNVNSAVIVPIVVTANGLMAESLNHHLSRLSLGGWIKGLIQKAVLLDTARIVRRFLSLEP

SEQ ID NO: 29097 - protein, 1203 aa, Atethmia centrago
MLTRAASKRARPPPPDSSLSSASPPPVSSPTVSAVITPTAVVASSSSDEYFSPPTSPTPVRRQGRDRPPKSLGLRGHPAPSRVPAAGGCVQRMRWTQSMNENVMRAYYGSTEGGTNLTAYRVRMLSLFQELEPTVNVSAQGLSDQVRVIQRNRRLDDATLDRLRSEVLSNYIISTPAQTAVHTPIIDVIPPRSNHGVEEEDDRAATVSSQCNVRLRSALEDAFREYRSTPTELRPRLPRLPMHKKNRALMCALDSQLKVFFESSEDLVDTHSILYCAAVAACRLANVKFPNSDGATRPKPAVPAWQCRIERRIDKARVLIGKLYCFREGNTRPRVMRFVRRAFSGTGISPREYMSHITERIDFLKQKVCAWASRIRRYKRRVDRYTQNRMFQSDERWVYRAWERPKQNVTDVCRPDDATTTAFWRSIWSVPVCHVEADWMRDVERVCETIPEMEVVIITPSDIARAVRPLPNWKSPGPDGLHNFWLKWLTSSHTCLASQFQSSLESGSLPQFMTTGITHLLHKSGSPAEPKNYRPITCLSTVYKLLTSILRAKINTHIDSNSIMSASQNGCRNGSRGTKELLLIDMAISQQVRRSRKDLSTCWIDYKKAYDSVPHTWLMRVLELYKIDTTLRTFLESCMGQWRTVLRYPGCRQIQGNDEPVWIKRGIFQGDSLSPLWFCLALNPLSMQLEDSGLGYRLRRGGQIISHLLYMDDLKIFAPNKLQLMKLLKVTETFSSAIRMEFGVDKCAVMHVKRGEIMESEGIQLSDSIHLRSLSSPESYKYLGMSEALGINVTDMKQSLKERFFGRLKKVLISLLSGGNKVRAFNSWVMPVLTYSFGILKWTQTELDALDRRVRTLLTANRMHHPRSSVMRLYIPRKCGGRGFLNAKTLHNREICSLREYFLKTEVGMHRDVVAVDKGLTPLSMAKENWCKPVVLTTDDRKEIWQSKELHGRFYRALHEPDVDLLASVSWLRFGDLFGETEGFVCAIMDEVILTNNYRRHIMKDGTVDVCRACHRPGESIRHIISGCSRLANGEYLHRHNQVARIIHQQLALKYKLVNSEVPYYKYVPDPVLENDHVTLYWDRSIITDRTIVANKPDIVVIDRLARRAMIVDVTIPHDDNLVKAEKEKQIKYLDLAHEVVDMWNVNSAVIVPIVVTANGLMARSLNHHLSRLALDGWIKGLIQTAVLLDTARIVRRFLSLEP

SEQ ID NO: 29098 - protein, 1200 aa, Mesoligia furuncula
MLTRSAARRAHLPPPDSSLSPAPPPPEPSPIESAVTPAAAVASSSSDEYFSPPTSPTPVRRQGRGRPPNCLGLRGHPAPSRVPATGGCVQRMRWTQSMNENVMRAYYGSTEGGINLTAYRDRMLSLFQELEPTVNVSAQRLSDQVRVIQRNHRLDDIALDRLRSEVLSNHIVSTSAQTAAQVSSVDAIPPRFNYVEEDDRVDTVSSQCNVRLRSALEDALREYRSTPTELRPRLPRLPMHKKNRALVCALDSQLKNFFESSVDLVDTHSILYCAAVAACRLANVKFPSCDGATRPKPAVPAWQRRIERRIDGARVLIGKLYCFREGNTRPRVMRFVRRAFSGTGISPREYMSRVTERIDFLKQKVCAWASRIRRYKRRVDRYTQNRMFQSDERWVYRAWERPEQNVTDVCRPDDAATSAFWCSIWSVPVCHTEAGWMQDVERVCESVPEMETVLITPSDVARAVRSLSNWKSPGPDGLHNFWLKWLISSHTCLASQFQSSLESGSLPQFLTTGVTHLLHKSGSPAEPKNYRPITCLSTVYKLLTSILRAKINKHIESNSIMSTSQNGCRNGSRGTKELLLIDMAISQQVRRSRKDLSTCWIDYKKAYDSVPHTWLMRVLELYKIDATLRTFLESCMGQWKTVLRYPGCRQIQGNDEPVWIKRGIFQGDSLSPLWFCLALNPLSTLLEDSGLGYRLRRGGQVISHLLYMDDLKLFAPNKLRLMELLKVTKTFSSAIRMEFGVDKCAVMHVKRGEIMESEGIQLSDSISLRSLSSSESYKYLGMSEALGINDADMKQSLKERFFCRLKKVLISLLSGGNKVRAFNGWVMPVLMYSFGILKWTQTELDALDRRVRTLLTANRMHHPRSSVMRLYIPRKCGGRGFLNAKTFHNREVCSLREYFLKAEVGMHRDVVAVDKGLTPLSMAKENWRKPVVLSTDDRKKVWQNKELHGRFYRALHEPGVDFIASVSWLRFGDLFGETEGFVCAIMDEVILTNNYRRHIMKDGTVDVCRACHRPGESIRHIISGCSRLANGEYLHRHNQVARIIHQQLALKYKLVDSEVPYYKYVPDPVLENDHVTLYWDRSIITDRTIVANKPDIVVIDRLARRTMIVDITIPHDGNLVKAEKEKKIKYLDLAHEVVDMWNVSSAVIVPIVVSANGLMAESLDQHLSRLSLGGWIKGLIQKAVLLDTARIVRRFLSLEP

SEQ ID NO: 29099 - protein, 1050 aa, Xestia c-nigrum
MLDDTVLDRLRSESRSNLVTPASPMIAVQLQTIPCTPLRSDYDSEEDGDEVISVSTQCNAQLRSALEGAFREYRSTPPELRPRLPRLPMHKKNKALVWALDSQLSNCFDSSKDLADTHSILYCGAVAACRVAHVKFPNNDRTTRPKLAVPAWQCRIERRIGEARVLIGKLICFREGNTRPRVMRFVRRAFSGTDVSFREYLARITERIDFLKQKICAWASRIRRYKRRVERYTQNRSFQSDERWVYRAWERPDQGVTDTRLPDDDAMCSFWRSIWSVPVSHTEGDWIRKVEQVCDQIQEMGAIIISPQDVACAVRPLPNWKSPGPDGLHNFWIKWFQRSHARLASQFQSALESGSLPQFMTTGITHLLHKSGSTAEPKNYRLITCLPTVYKVLTSILRAKINKHIESNSIMSTSQNGCRNGSRGTKELLLIDMAISQQVRRSRKNLSTCWIDYKKAYDSVPHTWLMRVLELYKINATLRAFLESCMGQWKTVLRYPGCRQIQGSDEPVWIKRGIFQGDSLSPLWFCLALNPLSTLLENSGLGYRLRKDGQVISHLLYMDDLKLFAPNKLQLLELLKVTETFSNAIRMEFGVDKCAVMYVKRGEIMESEGLQLSDSIHLRSLSSSESYKYLGMSEALGINVTDMKQSLRERFFGRLKKVLNSLLSGGNKVRAFNGWVMPVLMYSFGILKWTQTELDALDRRVRTLLTANRMHHPRSSMMRLYIPRKCGGRGFLNAKNLHNREVCSLREYFLEADVGMHRDVVSVDKGLTPLSLANGNWRKPKVLDTNDRREEWQGKELHGRFYRALHGPDVDFLASVSWLRFGDLFGETEGFVCAIMDEVMMTNNYRKYIVKDGTVDICRACHRPGESIRHIISGCSSLANGEYLHRHNLVARIIHQQLALKYNLVESEVPYYKYAPDPVLVNGNITLYWDRPITTDRTVVANRPDIVVIDRLERRTMIVDITVPHDENLVKAEQDKKNKYLDLAREVVDMWDVSTAIIVPIVVSANGLIAKSLDQHLRRLSLGSWIKGLIQKAVLLDTARIVRRFLSQEP

SEQ ID NO: 29100 - protein, 1199 aa, Xestia c-nigrum
MITRAASRRALIPSPDSSLSSASPPPDPGSPVSPVAAVASSSSDEYFSPSTSPTPVRRAGRGRPPKGLGLRGQQAPSRVPATGGCVQRMKWTQLMNENVMRAYYGSTEGGTNLTAYRVRMLSLFQDLEPTVNASAQRLSDQVRVIQRNHLLDGAALDRLRSEVLSNRIILTPARTAVQASSIDVNPPRSNPAVVEEDDRVATVSSQCNDRLRSALEDALHEYRSTSAELRPRLPRLPMHKKNRALVCALDSQLKNVFESSEDLVDTHSILFCGAVAACRLANVKFPNCDLATRPKPAVPAWQRRIERRIDGARVLIGKLHCFREGNTRPRVMRFVRRAFSGTEISPQEYMSRVTERIDFLKQKVYAWASRIRRYKRRVDRYSQNRMFQSDERWVYRAWERPQQNMTDVCRPDDAATSSFWRSIWSVPVCHSEADWMRDVERVCEPIQTMEPILITPLDIARAVRPLPNWKSPGPDGLHNFWLKWFSSSHTCLASQFQSSLESGSLPQFLTTGITHLLHKSGSPAEPKNYRPITCLSTVYKLLTSILRTKINTHVDSNSIMSASQNGCRNGSRGTKELLLIDMAISQQVRRARKDLSTCWIDYKKAYDSVPHSWLKRVLELYKIDATLRTFLESCMGQWRTVLRYPGCRQIQGNDEPVWIKRGIFQGDSLSPLWFCLALNPVSTLLENSGLGYRLRKDGQVISHLLYMDDLKLFAPNKLQLMELLKVTETFSSAIGMEFGVDKCAVMYVKRGKIMGSEGLQLSDSIHLRSLSSSESYKYLGMSEALGINVTDMKQSLKERFFGRLKKVLISLLSGGNKVRAFNGWVMPVLMYSFGILKWTQTELDALDRRVRTLLTENRMHHPRSSVMRLYIPRKFGGRGFLNAKTLHNREVCSLREYFLKADVGMHRDVVAVDKGLTPLSMAKENWRKPVVLTTDDRKKEWQGKELHGRFYRALHGPDVDFLASVSWLRFGDLFGETEGFVCAIMDEVMLTNNYRKYIMKDGTVDVCRACHCPGESIRHIISGCSRLANGEYLHRHNQVARIIHQQLALKFKLVESEVPYYKYVPDPVLVKDHVTLYWDQSIITDRTIVANKPDIVVIDRSARRVMIIDVTIPHDENLVKAEKEKQMKYLDLAHEVRDMWNMNSVIIVPIVVTANGLIAKSLDEHLSKLSLGGWIKGLIQKAVLLDTARIVRRFLSLQP

SEQ ID NO: 29101 - protein, 1200 aa, Xestia c-nigrum
MITRAASRRRARPPTPDSSLSSASPPPDPGSPVPPVAAVASSSSDEYFSPPTSPTPVRRAGRGRPPRSLGLRGQQAPSRVPATGGCVQRMRWTQSMNENVMRAYYGSTEGGINLTAYRDRMLSLFQDLEPAVNVSAQRLSDQVRVIQRSHRLDDTTLDRLRSEVLSNLITITPTQTAVHMSVVNATLPRSNPVVVEEDDRVALVSSQCNDRLRSALDNALREYRSISAELRPRLPRLPMHKKNRALVCALDSQLKNIFESSEDLVDTHSILFCGAVAACRLANVKFPNCDIAIRPKPAVPAWQRRIERRIDGARVLIGKLYCFREGNTRPRVMRFVRRAFSGTEISPQEYMSRVTERIDFLKQKVYAWASRIRRYKRRVDRYSQNRMFQSDERWVYRAWERSQQNMTDVCRPDDAATSSFWRSIWSVPVCHSEADWMRDVERVCEPIPTMEPILITPLDIARAVRPLPNWKSPGPDGLHNFWLKWFSSSHTCLASQFQSSLESGSLPQFLTTGVTHLLHKSGSPAEPKNYRPITCLSTVYKLLTSILRMKINTHVDSNSIMSASQNGCRNGSRGTKELLLIDMAISQQVRRARKDLSICWIDYKKAYDSVPHSWLKRVLELYKIDATLRAFLESCMGQWRTVLRYPGCRQIQGNDEPVWIKRGIFQGDSLSPLWFCLALNPVSTLLENSGLGYRLRKDGQVISHLLYMDDLKLFAPNKLQLMELLKVTETFSSAIGMEFGVDKCAVMYVKRGKIMGSEGFQLSDSIHLRSLSSSESYKYLGMSEALGINVTDMKQSLRERFFGRLKKVLNSLLSGGNKVRAFNGWVMPVLMYSFGILKWTQTELDALDRRVRTLLTENRMHHPRSSVMRLYIPRKCGGRGFLNAKTLHNREVCSLREYFLKADVGMHRDVAAVDKGLTPLSMAKENWRKPVVLTTDDRMKEWQGKELHGRFYRALHGPDVDFLASVSWLRFGDLFGETEGFVCAIMDEVMLTNNYRKYIMKDGTVDVCRACHLPGESIRHIISGCSRLANGEYLHRHNQVARIIHQQLALKFNLVELEVPYYKYVPDPVLVKDHVTLYWDQSIITDRTIVANKPDIVVIDRSARRVMIIDVTIPHDENLVKAEKEKQIKYLDLAHEVRDMWNMDSVIIVPIVVSANGLIAKSLDEHLSRLSLGGWIKGLIQKAVLLDTARIVRRFLSLQP

SEQ ID NO: 29102 - protein, 1200 aa, Xestia c-nigrum
MITRAASRRRARPPTPDSSLSSASPPPDPGSPVPPVAAVASSSSDEYFSPPTTPTPVRRAGRGRPPRSLGLRGQQAPSRVPATGGCVQRMRWTQSMNENVMRAYYGSTEGGINLTAYRDRMLSLFQDLEPAVNVSAQRLSDQVRVIQRSHRLDDTTLDRLRSEVLSNLITITPTQTAVHMSVVNATLPRSNPVVVEKDDRVALVSSQCNDRLRSALDNALREYRSISAELRPRLPRLPMHKKNRALVCALDSQLKNIFESSEDLVDTHSILFCGAVAACRLANVKFPNCDIAIRPKPAVPAWQRRIEHRIDGARVLIGKLYCFREGNTRPRVMRFVRRAFSGTEISPQEYMSRVTERIDFLKQKVYAWASRIRRYKRRVDRYSQNRMFQSDERWVYRAWERPQQNMMDVCRPDDAATSSFWRSIWSVPVCHSEADWMRDVERVCEPIPTMEPILITPLDIARAVRPLPNWKSPGPDGLHNFWLKWFSSSHTCLASQFQSSLESGSLPQFLTTGVTHLLHKSGSPAEPKNYRPITCLSTVYKLLTSILRTKINTHVDSNSIMSASQNGCRNGSRGTKELLLIDMAISQQVRRARKDLSICWIDYKKAYDSVPHSWLKRVLELYKIDATLRAFLESCMGQWRTVLRYPGCRQIQGNDEPVWIKRGIFQGDSLSPLWFCLALNPVSTLLENSGLGYRLRKDGQVISHLLYMDDLKLFAPNKLQLMELLKVTETFSSAIGMEFGVDKCAVMYVKRGKIMGSEGLQLSDSIHLRSLSSSESYKYLGMSEALGINVTDMKQSLRERFFGRLKKVLNSLLSGGNKVRAFNGWVMPVLMYSFGILKWTQTELDALDRRVRTLLTENRMHHPRSSVMRLYIPRECGGRGFLNAKTLHNREVCSLREYFLKADVGMHRDVAAVDRGLTPLSMANENWRKPVVLTTDDRMKEWQGKELHGRFYWALHGPDVDFLASVSWLRFGDLFGETEGFVCAIMDEVMLTNNYRKYIMKDGTVDVCRACHLPGESIRHIISGCSRLANGEYLHRHNQVARIIHQQLALKFNLVELEVPYYKYVPDPVLVKDHVTLYWDQSIITDRTIVANKPDIVVIDRSARRVMIIDVTIPHDENLVKAEKEKQIKYLDLAHEVRDMWNMDSVIIVPIVVSANGLIAKSLDEHLSKLSLGGWIKGLIQKAVLLDTARIVRRFLSLQP

SEQ ID NO: 29103 - protein, 1202 aa, Omphaloscelis lunosa
MLTRSAARSARLPPPDSPLSSASPPPVPSPIVNAVSTPAAVVASSSSDEYFSPPTSPTPVRRQGRGRPPRSLGLRGQPAPSRVPAAGGCMQRMRWTQLMNENVMRAYYGSTEGGTNLTAYRVRMLSLFQELEPTVNVSAQRLSDQVRVIQRNHRLDDIALDRLRSEVLSNHIVSTRAQTAAQESNIDPTPPRFNHGVEEDDRVATVSSQCNDRLRSALEDAFREYRYTPTELRPRLPRLPMHKKNRALVCALDSQLTNFFESSEDLIDTHSILYCAAVAACRLANVKFPNYDGATRPKPVVPAWQCRIERRIDGARVLIGKLYCFREGNTRPRVMRFVRRAFLGTGISPQEYMSRVTERIDFLKQKVCAWASRIRRYKRRVDRYTQNRMFQSDERWVYRAWERPEQNVTDVCRPDDAATSAFWRSIWSVPVCHTEAGWLQDVERVCETIPEMDAVFITPLDVARAVRPLPNWKSPGPDGLHNFWLKWLSSSHTRLASQFQSSLESGLLPQFLTTGVTHLLHKSGNPAEPKNYRPITCLPTVYKLFTSILRTKINTHIDSNSIMSASQNGCRNGSRGTKELLLIDMAISQQVRRSRKDLSTCWIDYKKAYDSVPHTWLMRVLELYKVHTTLRTFLMSCMGQWRTVLRYPGCRQTQGNDEPVWIKRGIFQGDSLSPLWFCLALNPLSTLLEGSGLGYRLRRGGQVISHLLYMDDLKLFAPNKLRLMELLKVTETFSGAIRMEFGVDKCAVMHVKRGEIMESEGTQLSDSIHLRSLSSAENYRYLGMSESLGINVADMKQSLKERFFGRLKKVLISFLSGGNKVRAFNGWVMPVLMYSFGILKWTQTELDALDRRVRTLLTANRMHHPRSSVMRLYIPRKCGGRGFLNAKTLHNREVCSLREYFFKADVGMHRDVVAVDNGLTPLSMAKENWRKPVVLTTDDRKEVWQSKALHGRFYRALHEPGVDFLASVSWLRFGDLFGETEGFICAIMDEVILTNNYRRHIMKDSTVDVCRACHRPGESIRHIISGCSRLANGEYLHRHNQVARIIHQQLALKYKLVDSEVPYYKYVPDPVLENDHVTLYWDRSIITDRTIIANKPDIVVIDRLARRAMIVDVTIPHDENLVKAEKEKQIKYLDLAHEVVDMWNVSSAIIVPIVVTTNGLMAESLDQHLSRLSLGGWIKRLIQKAVLLDTARIVRRFLSLQP

SEQ ID NO: 29104 - protein, 984 aa, Omphaloscelis lunosa
MYTFREYRYTPTELRPRLPRLPMHKKNRALVCALDSQLTNFFESSEDLIDTHSILYCAAVAACRLANVKFPNYDGATRPKPVVPAWQCRIERRIDGARVLIGKLYCFREGNTRPRVMRFVRRAFLGTGISPQEYMSRVTERIDFLKQKVCAWASRIRRYKRRVDRYTQNRMFQSDERWVYRAWERPEQNVTDVCRPDDAATSAFWRSIWSVPVCHTEAGWMQDVERVCETIPEMDAVFIAPLDVARAVRPLPNWKSPGPDGLHNFWLKWLSSSHTRLASQFQSSLESGLLPQFLTTGVTHLLHKSGNPAEPKNYRPITCLPTVYKLLTSILRTKINTHIDSNSIMSASQNGCRNGSRGTKELLLIDMAISQQVRRSRKDLSTCWIDYKKAYDSVPHTWLMRVLELYKVHTTLRTFLMSCMGQWRTVLRYPGCRQTQGNDEPVWIKRGIFQGDSLSPLWFCLALNPLSTLLEGSGLGYRLRRGGQVISHLLYMDDLKLFAPNKLRLMELLKVTETFCGAIRMEFGVDKCAVMHVKRGEIMESEGTQLSDSIHLRSLSSAENYRYLGMSESLGINVADMKQSLKERFFGRLKKVLISFLSGGNKVRAFNGWVMPVLMYSFGILKWTQTELDALDRRVRTLLTTNRMHHPRSSVMRLYIPRKCGGRGFLNAKTLHNREVCSLREYFFKVDVGMHRDVVAVDNGLTPLSMAKENWRKPVVLTTDDRKEVWQSKALHGRFYRALHEPGVDFLASVSWLRFGDLFGETEGFICAIMDEVILTNNYRRHIMKDGTVDVCRACHRPGESIRHIISGCSRLANGEYLHRHNQVARIIHQQLALKYKLVDSEVPYYKYVPDPVLENDHVTLYWDRSIITDRTIIANKPDIVVIDRLARRAMIVDVTIPHDENLVKAEKEKQIKYLDLAHEVVDMWNVSSAIIVPIVVTANGLMAESLDQHLSRLSLGGWIKRLIQKAVLLDTARIVRRFLSLQP

SEQ ID NO: 29105 - protein, 1202 aa, Sesamia nonagrioides
MLTRAAKRRARPPPPDSLLSTASPPPVSSATVNAVRTPAVVVASSSSDEYFSPPTSPTPVRRQGRGRPPKSLGLRGHPAPSRVPAAGGCVQRMRWTQTMNENVMRAYYGATEGGTNLTAYRERMLSLFQALEPTVNVSAQRLSDQVRVIQRNHRLDDIALDRLRSEVLSNQIAPTLTQTAAQASIIDAVPPRFNRVEEEDDRVETVSSQYNDRLRSALEDAFRDYRSTPTNLIPRLPRLPMHKKNRALVCALDSQLKNFFESSEDLIDTHSILYCAAVAACRLAKVKFPNCEEATRPKLAVPAWQRRIERRIDGTRVLIGKLYCFREGNTRPRVMRFVRQAFSGTGISPREYINNVTERIDFLKQKVCAWASRIRRYKERVDRYTQNRMFQSDERWVYRAWERPEQNEADECRQDDATTSAFWRGIWSVSVCHTEGDWTQDVEQVCETIPEMDNILITPLDVATAVRSLPNWKSPGPDGLHNFWLKWLSSSHTCLAYQFQSSLESGSLPQFLTTGITHLLHKSGSTAEPKNYRPITCLPTVYKVLTSILKAKINNHLDSNSIMSVSQNGCRSGSRGTKELPLIDMAISQQVRRSRKDLSTCWIDYKKAYDSVPHTWLMRVLELYKINATLRTFLRSCMGQWKTVLRYPGSRQIRGNDEPVWIKRGIFQGDSLSPLWFCLALNPLSTLLEDSGLGYRLKRGGQVISHLLYMDDLKLFAPNKLHLMKLLNVTETFSSGIKMEFGVDKCAVMHVKRGQIMESEGITLPDSIHLRSLSSMESYKYLGMSEALGINDADMKQSLKERFFGRLRKVLNSLLSGGNKVRAFNGWVMPVLMYSFGILKWTQTELDALDRRVRTLLTANRMHHPRSSVMRLYIPRKCGGRGFLNAKTLHNREVFSLREYFFKTVVGMHHDVVTVDKGLTPLSMAKENWHKPIILTTDDRKIVWQSKELHGRFYRALHGPDVDFLASVSWLRFGDLFGETEGFVCAIMDEVILTNNYRRYIMKDGTIDVCRACHHPGESIRHIISGCSRLANSEYLHRHNQVARIIHQQLALKYKLVDSEVPYYKYVPDPVLENDHVTLYWDRSIITDRTIVANKPDIVVIDRLARLAMIVDVTIPHDGNLVKAEKEKQMKYLDLAHEVVDMWNVNSVVIVPIVVSANGLIAKSLDQHLLRLSLGSWIKGLIQKAVLLDTARIVRRFLSLEP

SEQ ID NO: 29106 - protein, 1202 aa, Sesamia nonagrioides
MLTRSATRKARPPPPDSLLSSASPPPVSSPIVNAVTTSAAAVESSSSDEYFSPPTSPTPVRRQGRGRPPKSLGLRGHPAPSRVPAAGGCVQRMRWSQTMNENVMRAYYGATEGGTNLTAYRERMRSLFQALEPTVNVSAQRLSDQVRVIQRNHRLDDIALDRLRSEVLSNQIAPTLTQTAALASIIDAVPPRSNRVEEEDDGVETVSSQYNDRLRSTLEDAFREYRFTPTDLRPRLPRLPMHKKNRALVSALDSQLKNVFESSEDLIDTHSILFCGAVAACRLANIKFPNCDEANRPRPAVPAWQHRIERRIEGARVLIGKLYCFREGNTRPRVMRFVRQAFSGTGISPREYISHVTERIDFLKQKVCAWASRIRRYKRRVDRYTQNRMFQSDERWVYRAWERTEQNEADVCRPDDAATSAFWRSIWSVPVCHAEGHWIQDVEQVCEMIPEMDTILITPIDVATAVRSLPNWKSPGPDGLHNFWLKWLSSSHTCLASQFQSSLESGSLPQFLTTGTTHLLHKSGSTAEPNNYRPITCLPTVYKVLTSILKAKINKHLDSNSIMSVSQNGCRSGSRGTKELLLIDMAISQQVRRSRKDLSTCWIDYKKAYDSVPHTWLMRVLELYKVNATLRTFLRSCMGQWKTVLRYPGSRRIQGNDEPVWIKRGIFQGDSLSPLWFCLALNPLSTLLEDSGLGYRLRRGGQVISHLLYMDDLKLFAPNKLHLMKLLNVTETFSSGIKMEFGVDKCAVMHVKRGQIMESEGITLPDSIHLRSLSSVESYKYLGMSEALGINDADMKQSLKERFFGRLKKVLKSLLSGGNKVRAFNGWVMPVLMYSFGILKWTQTELDALDRRVRTLLTANRMHHPRSSVMRLYIPRKCGGRGFLNAKTLHNREVCSLREHFLKTVVGMHHDVVTVDKGLTPLSMAKENWHKPIILSTNDRKMIWQSKELHGRFYRALHEPDVDFLASVSWLRFSDLFGETEGFVCAIMDEVILTNNYRRYIMRDGTIDVCRACHHPGESIRHIISGCSRLANGEYLHRHNQVARIIHQQLALKYKLVDSEVPYYKYVPDPVLENDHATLYWDRSIITDRTIVANKPDIVVIDRLARLAMIVDVTIPHDGNLVKAEKEKQIKYLDLAHEVVDMWNVNSAVIVPIVVSANGLIAKSLDQHLLRLSLGSWIKGLIQKAVLLDTARIVRRFLSLEP

SEQ ID NO: 29107 - protein, 868 aa, Sesamia nonagrioides
MRFVRQAFSGTGISPREYINHLTERIDFLKQKVCAWASRIRRYKRRVDRYTQNRMFQSDERWVYRAWERPEQNEADVCRPDDATTSAFWRGIWSVSVCHTEGNWIRNVEQVCETIPEMDTILITPSDVAAAVRSLPNWKSPGPDGLHNFWLKWLSSSHTCLASQFQSSLESGSLPQFLTTGITHLLHKSGSTAEPKNYRPITCLPTVYKVLTSILKAKINKHLNSNFIMSVSQNGCKSGSRGTKELLLIDMAISQQVRRSRKDLSTCWIDYKKAYDSVPHTWLMRVLELYKINATLRTFLRSCMGQWKTALHYPGSRQIQGNDEPVWIKRGIFQGDSLSPVWFCLALNPLSTLLENSGLGYRLRRGGQVISHLLYMDDLKLFAPNELHLMKLLNVTETFSSGIRMEFGVDKCAVMHVKQGEIMESEGITLPDSIHLRSLSSFESYKYLGMSEALGINDADMTQSLKERFFGRLKKVLNSLLSGGNKVRAFNGWVMPVLMYSFGILKWTQTELDALDRRVRTLLTANRMHHPRSSVMRLYIPRKCGGRGFLNAKTLHNREVCSLREYFLQTVVGMHHDVVKVDKGLTPLSMAKENWHKPIILTTDDRRKVWQSKELHGRFYRALHEPDVDFLASVSWLRFSDLFGETEGFVCAIMDEVILTNNYRRYIMKDGTIDVCRACRHPGESIRHIISGCSRLANSEYLHRHNQVARIIHQQLALKYKLVDSEVPYYKYVPDPVLENDHVTLYWDRSIITDRTIVANKPDIVVIDRLARLAMIVDVTIPHDGNLVKAEKEKKMKYLDLAHEVVDMWNVNSAVIVPIVVSANGLIAKSLDQHLLRLALGSWIKGLIQKAVLLDTARIVRRFLSLEP

SEQ ID NO: 29108 - protein, 1204 aa, Apamea monoglypha
MLKMLTRSAARARLLPPDSSLSPAPPPPESSPIESAVTPAVAVASSSSDEYFSPPTSPTPVRRQGRGRPPRSLGLRGHPAPSRVPAAGGCVQRMRWTQSMNENVMRAYYGSTEGGINLTAYRDRLLSLFQELEPTVNVSAQRLSDQVRVIQRNHRLDDIALDRLRSEVLSNQIVSTLAQTAAQASTIDAIPPRSNHVEEEDDDRVDTVSSQCNVRLRSALEDAFREYRSTPTELRPRIPRLPMHKKNRALVCALDSQLKNFFESSEDLVDTHSILYCAAVAACRLANVKFPNCDGATRPKPAVPAWQYRIERRIDGARVLIGKLYCFREGNTRPRVMRFVRLAFSGTGISPREYISNVTERIDFLKQKVCAWASRIRRYKRRVDRYTQNRMFQSDERWVYRAWERPEQNVTDVCRPDDANTNAFWRSIWSVPVYHAEGGWMQDIERVCETIPEMDPVLITPLDVARAVRPLPNWKSPGPDGLHNFWLKWLISSHSRLASQFQSSLESGSLPQFLTTGVTHLLHKSGSPAEPKNYRPITCLSTVYKLLTSILRAKINTHIDNNSIMSASQNGCRNGSRGTKELLLIDMAISQQVRRSRKDLSTCWIDYKKAYDSVPHAWLMRVLELYKIDATLRTFLESCMGQWRTVLRYPGCRQIQGNDEPVWIKRGIFQGDSLSPLWFCLALNNLSTLLEDSGLGYRLKRGGQVISHLLYMDDLKLFAPNKLRLLELLKVTETFSSAIRMEFGVDKCAVMHVKRGEIMESEGIQLSDSIHLRSLSSSESYKYLGMSEALGINVADMKQTLRERFFGRLKKVLVSLLSGGNKVRAFNSWVMPVLMYSFGILKWTQTEFDALDRRVRTLLTANRMHHPRSSVMRLYIPRKCGGRGFLNAKTLHNREVCNLREYFIKAEVGMHRDVVAVDKGLTPLSMAKENWRKPVILTTDDRKEVWQSKELHGRFYRALHEPGVDFLASVSWLRFGDLFGETEGFVCAIMDEVVLTNNYRRYIMKDGTVDVCRACHRPGESIRHIISGCSRLANGEYLHRHNQVARIIHQQLALKYKLVDSEVPYYKYVPDPVLENDHVTLYWDRSIITDRTIVANKPDIVVIDRLARRTMIVDVTIPHDGNLVKAEKEKQIKYLDLAHEVVDMWNVSSAIIVPIVVSANGLMAESLDQHLSRLSLGGWIKGLIQKAVFLDTARIVRRFLSLEP

SEQ ID NO: 29109 - protein, 868 aa, Mamestra configurata
MRFVRRAFSGTEISPRDFTSRVTERIDFLKQKVCAWASRIRRYKRRVDRYSQNRMFQSDERWVYRAWERPEQSVTDVCRPDDVATSIFWRSIWSVPICHAEGGWMRDVERVCEAIPQMEKITITTLDVAKAVRPLPNWKSPGPDGLHNFWLKWYSSSHALLASQFQSSLDSGSLPQFLTTGVTHLLHKTGSPTEPKNYRPITCLSTVYKLLTSILRAKINEHIESNSIMSASQNGCRKGSRGTKELLLIDMAISQQVRRSRKDLSTCWIDYKKAYDSVPHTWLMKVLELYKIDATLRTFLESCMRQWKTVLRYPGCRPIQGSDEPVWIKRGIFQGDSLSPLWFCLALNPLSTLLEDSGLGYRLRRGGQAISHLLYMDDLKLFAPNNLRLMELLKVTETFSSAIRMEFGVDKCAVMHVKKGEIMESEGIQLSDSIQVRSLSSTETYKYLGMSEALGINGTDMKQSLRERFFGRLKKVLNSLLSGGNKVRAFNGWVMPVLMYTFGILKWTQTELDALDRRVRTLLTANRMHHPRSSVMRLYIPRKCGGRGFLNAKTLHNREMCSLREYFLKADVGMHRDVVAVDKGLTPLSMAKENWRTPVILTTDDRKEVWKGKELHGRFYRALHGSDVDFSASVAWLRFGDLFGETEGFVCAIMDEVILTNNYRRHIMKDGTVDMCRACHRPGESIRHIISGCSRLANGEYLHRHNQVARIIHQQLALKYKLVDSEVPYYKYVPDPVLENDHVTLYWDRSIITDRTIVANKPDIVVIDRLARRTMIIDVTIPHDENLVKAEKEKQIKYLDLAHEVVDMWNVDSAVIVPIVVTANGLMAKSFDDHLSKLALRSWVKGLIQKAVLLDTARIVRRFLSLEP

SEQ ID NO: 29110 - protein, 1199 aa, Mamestra configurata
MLTRAALQRARPPPPDPSLSSASPPPDIGSPLSPAVAVASSSSDEYFSPPTSPTSVRRQGRGRPPRGLGPRGQPAPSRVPATGGCVQRMRWTQSMNENVMRAYYGSTEGGTNLTAYRVRMLSLFQDLEPTVNVSAQRLSDQVRVIQRNHRLDDAALDRLRSEVLNNLIISTPTQTAVHAPVNGRITPRPNNVSDEVDDRVVTVSSQCNDRLRSALEDALREYRSTPTELRPRLPRLPMHKKNRALVCALDSLLQNIFESSESLVDTHSILYCGAVAACRIANVKFPGCDEAIRPKPAAPAWQRRIERRIDETRALIGKLYCFREGNTRPRVMRFVRRAFSGTEISPRDFTSRVTERIDFLKQKVCAWASRIRRYKRRVDRYSQNRMFQSDERWVYRAWERPEQSVTDVCRPDDVATSIFWRSIWSVPICHAEGGWMRDVERVCEAIPQMEKITITTLDVAKAVRPLPNWKSPGPDGLHNFWLKWYSSSHALLASQFQSSLDSGSLPQFLTTGVTHLLHKTGSPTEPKNYRPITCLSTVYKLLTSILRAKINEHIESNSIMSASQNGCRKGSRGTKELLLIDMAISQQVRRSRKDLSTCWIDYKKAYDSVPHTWLMKVLELYKIDATLRTFLESCMRQWKTVLRYPGCRPIQGSDEPVWIKRGIFQGDSLSPLWFCLALNPLSTLLEDSGLGYRLRRGGQAISHLLYMDDLKLFAPNNLRLMELLKVTETFSSAIRMEFGVDKCAVMHVKKGEIMESEGIQLSDSIQVRSLSSTETYKYLGMSEALGINGTDMKQSLRERFFGRLKKVLNSLLSGGNKVRAFNGWVMPVLMYTFGILKWTQTELDALDRRVRTLLTANRMHHPRSSVMRLYIPRKCGGRGFLNAKTLHNREMCSLREYFLKADVGMHRDVVAVDKGLTPLSMAKENWRTPVILTTDDRKEVWKGKELHGRFYRALHGSDVDFSASVAWLRFGDLFGETEGFVCAIMDEVILTNNYRRHIMKDGTVDMCRACHRPGESIRHIISGCSRLANGEYLHRHNQVARIIHQQLALKYKLVDSEVPYYKYVPDPVLENDHVTLYWDRSIITDRTIVANKPDIVVIDRLARRTMIIDVTIPHDENLVKAEKEKQIKYLDLAHEVVDMWNVDSAVIVPIVVTANGLMAKSFDDHLSKLALRSWVKGLIQKAVLLDTARIVRRFLSLEP

SEQ ID NO: 29111 - protein, 1112 aa, Mythimna ferrago
MKWTQSMNENVMRAYYGSTEGGTNLTAYRVRMLSLFQDLEPTVNVSAQRLSDQVRVIQRNHRLDDAALDRLRSQVLSNPIVSTPQQIQTAGPSTSVTTTPRYVHVEDEADDRVDRVSSQCNDRLRSALEDALREYRSTPTELRPRLPRLPMHKKNRALVCALDSLLKNVFESSDSLLDTHSILYCGAVAACRLANVKFPCYGVATRPTPAAPAWQCRIERRIDEARALIGKLYCFREGNTRPRVMRFVRRAFSGTEISPREYMSRVTECIDFLKQKVCAWANRIRRYKRRVDRYSQNRMFQSDERWVYRAWERPGQNVTDGFRPDSVATNTFWRSIWSEPVCHNEGGWMRDVERVCEAIPEMDKVFITPLDVARAVRPLPNWKSPGPDGLQNFWLKWYSSSHAILASQFQSSLESGSLPQILTTGTTHLLHKTGSTADPKNYRPITCLSTVYKLLTSILRVKITLHIEKNSIMFASQNGCRNGSRGTKELLLIDMAISQQVRRSRKDLSTCWIDYKKAYDSVPHTWLMKVLELYKIDATLRTFLKSCMRQWKTVLRYPGCRPIQGNDEPIWIKRGIFQGDSLSPLWFCLALNPLSTLLEDSGLGYRLRRGGQVLSHLLYMDDLKLFAHNNSQLMELLKVTETFSSAIRMEFGVDKCAVMHVRRGEIVESEGIQLSDSIHLRSLSSTETYKYLGMSEALGINVADMKQTLKERFFGRLKKVLNSLLSGGNKVRAFNGWVMPVLMYSFGILKWTQTELDALDRRVRTLLTANRMHHPRSSVMRLYIPRKCGGRGFLNAKTLHNREVCSLREYFLKTDVGMHRDVVAVDKGLTPLSMAKENWRKPVVLTTDDCKEVWKGKELHGRFFRALHEPDVDFSASVAWLRFSNLFGETEGFVCAIMDEVILTNNYRRHIMKDGTVGVCRACHRPGESIRHIISGCSRLANGEYLHRHNQVARILHQQLALKYNLVDSEVPYYRYVPDPVLENDHVTLYWDRSIITDRTIVANKPDIVVIDRLARRAMIVDVTIPHDENLVKAEKEKQIKYLDLAHEVVDMWNVDSAIIVPIVVTANGLIAKSFDDHLSKLSLHGWIKGLIQKAVLLDTARIVRRFLSLEP

SEQ ID NO: 29112 - protein, 1200 aa, Mythimna ferrago
MLTRTAARRARHPPPDSSLSSASPPPDPGSSVSPVAAAASSSSDEYFSPPTSPTPVRRPGRGRPPNSLGPRGQPAPSRVPAAGGCVQRMKWTQCINENVMRAYYGATEGGTNLTAYRVRMLSLFQELEPSVNVTTQRLSDQVRVIQRNHRLDDAALDRLRSEVLSNRIISTPTQTQTAAPRATDAIMPRSNHGDDEADDRVVTVSSQCNDRLRSALEDALREYRSTPIARRPRLPRLPMHKKNRALVCALDSLLENVFESSVNLVDTHSILYCGAIAACRLANVKLLSCDEATRPKPAVPAWQYRIERRIDGARALIGKLYCFREGNTRPRVMRFVRRAFSGTGISPREYSSHVTERIDFLKQKVCAWASRIRRYKRRVDRYSQNRMFQSDERWVYRAWERPVQNVTDVLRPDDAATNAFWRSIWSVPVCHTEGGWMRDVERVCEAIPEMEKVIISSTDVARAVRPLPNWKSPGPDGLQNFWLKWYSSSHALLASQFQSSLESGSLPQFLTTGVTHLLHKTGSTAEPKNYRPITCLSTVYKLLTSILRTKINKHIENNSIMSASQNGCRNGSRGTKELLLIDMAISQQVRRSRKDLSTCWIDYKKAYDSVPHTWLMRVMELYKIDATLRTFLESCMGGWNTVLRYLGCRTIRGDDEPIWIKRGIFQGDSLSPLWFCLALNPLSTLLEDSGLGYRLRRGGQVLSHLLYMDDLKLIAPNKLRLMELLKVTENFSSAIRMEFGVDKCAVMHVKRGEIMESEGVQLSDSIHLRSLSSTETYKYLGMSEALGINVTDMKQSLKERFFGRLKKVLNSLLSGGNKVRAFNGWVMPVLMYSFGILKWTQTELDALDRRVRTLLTANRMHHPRSSVMRLYIPRKCGGRGFLSAKTLHNREVCSLREYFLKTDVGMHRDVVAVDKGLTPLSMAKENWRKPVVLTTDDRKEVWKGKELHGRFFRALHEPDVDFSASVAWLRFSNLFGETEGFVCAIMDEVILTNNYRRHIMKDGTIDVCRACHRPGESIRHIISGCSRLANGEYLHRHNQVARILHQQLALKYNLVDSEVPYYRYVPDPVLENDHVTLYWDRSIITDRTIVANKPDIVVIDRLARRAMIVDVTIPHDENLVKAEKEKQIKYLDLAHEVVDMWNVDSAIIVPIVVTANGLIAKSFDNHLSKLSLHGWIKGLIQKAVLLDTARIVRRFLSLEP

SEQ ID NO: 29113 - protein, 1014 aa, Mythimna ferrago
MPRPNYGDDEADDRVVTVSSQCNDQLRSALEDALREYRSTPIALRPRLPRLPMHKKNRALVCALDSLLENVFESSVNLVDTHSILYCGAIAACRLANVKLPSCDGATRPKPAVPAWQCRIERRIDGARALIGKLYCFREGNTRPRVMRYVRRAFSGTGVSPREYLAHVTERIDFLKQKVCAWANRIRRYKRRVDRYSQNRMFQSDERWVYRDWERPEQSVTDVLRPDVAATNEFWRSIWSVPVCHTEGGWMRDIERVCEAIPEMEKVFISPIDVARAVRPLPNWKSPGPDGLQNFWLKWYSSSHALLASQFQSSLESGSLPQFLTTGVTHLLHKTGSTAEPKNYRPITCLSTVYKLLTSILRTKINNHIENNSIMSASQNGCRNGSRGTKELLLIDMAISQQVRRSRKDLSTCWIDYKKAYDSVPHTWLMRVLELYKIDATLRTFLESCMGEWNTVLRYPGCRSIRGDDEPIWIKRGIFQGDSLSPLWFCLALNPLSTLLEDSGLGYRLRRGGQVLSHLLYMDDLKLIAPNKLQLMELLKVTETFSSAIRMEFGVDKCAVMHVKRGEIMESEGIQLSDSIHLRSLSSTETYKYLGMSEALGINVTDMKQSLRERFFSRLKKVLNSLLSGGNKVRAFNGWVMPVLMYSFGILKWTQTELDALDRRVRTLLTANRMHHPRSSVMRLYIPRKCGGRGFLNAKTLRNREVCSLREYFQKTDVGMHRDVVAVDKGLTPLSMAKENWRKPVVLTTDDRREVWKNKELHGRFYRALHEPDVDFGASVAWLRFSNLFGETEGFICAIMDEVILTNNYRRYIMKDGTVDVCRACHRPGESIRHIISGCSRLANGEYLHRHNQVARIIHQQLALKYKLMESEVPYYRYVPDPVLENDHVTLYWDRSIITVRTIIANKPDIVVIDRLARRAMIVDVTIPHDENLVKAEKEKKIKYLDLAHEVVDLWNVDSAVIVPIVVSVNGLIAKSFDDHLSKLALRGWIKGLIQKAVLLDTARILRRFLSLEP

SEQ ID NO: 29114 - protein, 1199 aa, Noctua pronuba
MITRAASRRARLPTPDSSLSSASPPPDPGSPVLPAAAVASSSSDEYFSPPTSPTPVRRQGRGRPPRSLGLRGHPAPSRVPATGGCVQRMRWTHPINENVMRAYYGSTEGGTNLTAYRVRMLSLFQVLEPTVNVSAQRLSDQVRVIQRNHMLDDAALDRLRSEVLSNPIVLTPSQTVVQASTIDITPPRSNPAVAEEDDRVATVSSQCNDRLRSALEDALREYRYTPTEFRPRLPRLPMHKKNRALVCALDSQLKNLFESSENLVDTHSILYCGAVAACRLANVKFTNSDTATRPKPAVPAWQCRIERRIDEARVLIGKLHCFREGNTRPRVMRFVRRAFSGTGISPQEYMSRVTERIDFLKQKVYAWANRIRRYKRRVDRYSQNRMFQSDERWVYRAWERPEQNMTDVCRPDDATTSSFWSSIWSVPVCHTEADWMRDVERMCEPIPEMEPILITPQDIARAVRPLPNWKSPGPDGLHNFWLKWLSSSHTCLASQFQSSLESGSLPQFLTTGVTHLLHKSGSPAEPKNYRPITCLSTVYKLLTSILRAKINTHIDKNSIMSASQNGCRNGSRGTKELLLIDMAISQQVRRSRKDLSTCWIDYKKAYDSVPHTWLMRVLELYKVDATLRAFLESCMGQWRTVLRYPGCRQIQGNNEPVWIKRGIFQGDSLSPLWFCLALNPLSTLLEDSGLGYRLRRGGQVISHLLYMDDLKLFAPNKLRLMELLKVTETFSSAIRMEFGVDKCAVMYVKRGEIMESEGIQLSDSIHLRSLSSSESYKYLGMLEALGINVTDMKQSLRERFFGRLKKVLNSLLSGGNKVRAFNGWVMPVLMYSFGILKWTQTELDALDRRVRTLLTANRMHHPRSSVMRLYIPRKCGGRGFLNAKTLHNREVCSLREYFLKAEVGMHRDVVAVDKGFTPLSMAKENWRKPVVLTTDDRKEVWQGKELHGRFYRALHGPDVDFLASVSWLRFGDLFGETEGFVCAIMDEVMLTNNYRKYIMKDGTVDVCRACHRPGESIRHIISGCSRLANGEYLHRHNQVARIIHQQLALKYKLVESEVPYYKYVPDPVLEKDHVTLYWDRSIITDRTIVANKPDIVVIDRSARRVMIVDVTIPHDENLVKAEKEKQIKYLDLAHEVVDMWNVNSAVIVPIVVTANGLMAKSFDDHLSKLSLGGWIKGLIQKAVLLDTARIVRRFLSLEP

SEQ ID NO: 29115 - protein, 1202 aa, Noctua pronuba
MLTRAAARRARLSPPDSSLSSASPLPESSPIVSAVTPAVAVASSSSDEYFSPPTSPTPVRRQGRGRPPTSLGLRGHPAPSRVPATGGCVQRMRWTHPINENVMRAYYGSTEGGTNLTAYRVRMLSLFQVLEPTVNVSAQRLSDQVRVIQRNHMLDDAVLDRLRSEVLSNRIVLTPSQTVVQTTAIDVSPPRSNPAVVEEDDRVATVSSQCNDRLRSALEDALREYRYTPTELRPRLPRLPMHKKNRALVCALDSQLKNLFESSEDLVDTHSILYCGAVAACRLAKLKFTNSDAATRPKPAVPAWQCRIERRIDGARVLIGKLHCFREGNTRPRVMRFVRRAFSGTGISPQEYMSRVTERIDFLKQKVYAWANRIRRYKRRVDRYSQNRMFQSDERWVYRAWERPEQNMADVCRPDDATTSSFWSSIWSVPVCHTEGDWMRAVERVCEPIPEMEPILITSLDVARSVRPLPNWKSPGPDGLHNFWLKWLSSSHTCLASQFQSSLESGALPQFLTTGVTHLLHKSGNPAEPKNYRPITCLSTVYKLLTSILRAKINTHIDKNSIMSASQNGCRNGSRGTKELLLIDMAISQQVRRSRKDLSTCWIDYKKAYDSVPHTWLMRVLELYKIDATLRTFLESCMGQWRTVLRYPGCRQIQGNDEPVWIKRGIFQGDSLSPLWFCLALNPLSTLLEDSGLGYRLRRGGQVISHLLYMDDLKLFAPNKLRLMELLKVTETFSSAIRMEFGVDKCAVMYVKRGEIMESEGIQLSDSIHLRSLSSSESYKYLGMSEALGINVTDMKQSLRERFFGRLKKVLNSLLSGGNKVRAFNGWVMPVLMYSFGILKWTQTELDALDRRVRTLLTANRMHHPRSSVMRLYIPRKCGGRGFLNAKTLHNRELCSLREYFLKAEVGMHRDVVAVDKGLTPLSMAKENWRKPVVLTTDDRKEVWQGKELHGRFYRALHGPDVDFLASVSWLRFGDLFGETEGFVCAIMDEVMLTNNYRKYIMKDGTVDVCRACHRPGESIRHIISGCSRLANGEYLHRHNQVARIIHQQLALKYKLVESEVPYYKYVPDPVLEKDHVTLYWDRSIITDRTIVANKPDIVVIDRSARRVMIVDVTIPHDENLVKAEKEKQIKYLDLAHEVVDMWNVNSAIIVPIVVTANGLMAKSLDDHLSRLSLGGWIKGLIQKAVLLDTARIVRRFLSLEP

SEQ ID NO: 29116 - protein, 917 aa, Ochropleura plecta
MVGAGAERLTGALRVRFPHGKKKKRRIDEARVFIGKLYYFREGNTRPRVMRFVRRAFSGTGISPQEYMSRTTERIDFLKQKVYAWANRIRRYKRRVDRYSQNRMFRSDERWVYRAWERPEQSVTDVCRPDDVATSSFWHSIWSVPVCHTEADWMRDVERVCETIPEMEPILITSLDIASAVRPLPNWKSPGPDGLHNFWLKWLSSSHTRLASQFQSCLESGSLPQFLTTGVTHLLYKSGSPAEPKNYRPITCLSTVYKLLTSILRAKINSHIDNNSIMSASQNGCRNGSRGTKELLLIDMAISQQVRRSRKDLSTCWIDYKKAYDSVPHTWLKRVLELYKIDATLRAFLESCMGQWRTVLRYPGCRQIQGNDEPVWIKRGIFQGDSLSPLWFCLALNPLSTLLEDSGLGCRLRRGGQVISHLLYMDDLKLFAPNKLRLMELLKVTETFSNAIRMEFGVDKCAVMYVKRGEIMESEGIQLSDSIHLRSLSSSESYKYLGMSEALGINVADMKQLLRERFFGRLKKVLKSLLSGGNKVRAFNSWVMPVIMYSFGILKWTQTELDALDRRVRTLLTGNRMHHPRSSVMRLYIPRKCGGRGFLNAKTLHNREVCSLREYFLKTDVGMHRDVVAVDKGLTPLSMAKENWRKPVVLTTDDRKVVWQGKELHGRFYKALHGPDVDFLASVSWLRFGDLFGETEGFVCAIMDEVMLTNNYRKYIMKDGTVDVCRACHRPGESIRHIISGCSRLANSEYLHRHNQVARIIHQQLALKYNLVESEVPYYKYVPDPVLEKDHVTLYWDRSIITDRTIVANKPDIVVINRSARRVMIIDVTIPHDENLVKAEKEKQLKYLDLAHEVVDMWNVNSAIIVPIVVTANGLIAKSLDEHLSKLSLGGWIKGLIQKAVLLDTARIVRRFLSLEP

SEQ ID NO: 29117 - protein, 1207 aa, Ochropleura plecta
MLTRRRAQEQQALPSSPGSSLSSASQPPGRATRVSAVSPVAAVASSSSDEFFSPPSSPPPPPTRQRRGRGRPPAGLGSRGQQAPIRVPAAGGNVSRMRWTSFINANVMRAYYGSTEGGTNLTAYRVRMLSLFQDLEPTINVSAQRLSDQVRVIQRNHLLDDAALDRLRSEVLSNRVILTTPQTAVQASAIDVTQPRSNPAVVEEDDRVATVSSQCNDRLRSALEDALRDYRSTPAELRPRLPRLPMHKKNRALVCALDSQLKNLFESSEDLVDTHSILYCGAVAVCRLANVKFPNCDVATRPKPSVPAWQCRIERRIDEARALIGKLYCFREGNTRPRVMRFVRRAFSGTGISPQEYMSRTTERIDFLKQKVYAWANRIQRYKRRVDRYSQNRMFRSDERWVYRAWERPEQSVTDVCRPDDVATSSFWHSIWSVRVCHTEAGWMRDVERVCETIPEMEPILITSLDIASAVRPLPNWKSPGPDGLHNFWLKWLSSSHTRLASQFQSCLESGSLPQFLTTGVTHLLYKSGSPAEPKNYRPITCLSTVYKLLTSILRAKINSHIVKNSIISASQNGCRNGSRGTKELLLIDMAISQQVRRSRKDLSTCWIDYKKAYDSVPHTWLKRVLELYKIDTTLRTFLESCMGQWRTVLRYPGCRQIQGNDEPVWIKRGIFQGDSLSPLWFCLALNPLSTLLEDSGLGYRLRRGGQVISHLFYMDDLKLFAPNKLRLMELLKVTETFSNAIRMEFGVDKCAVMYVKRGEIMESEGIHLSDSIHLRSLSSSESYKYLGMSEALGINVADMKQLLRERFFGRLKKVLKSLLSGGNKVRAFNSWVMPVLMYSFGILKWTQTELDALDRRVRTLLTANRMHHPRSSVMRLYIPRKCGGRGFLNAKTLHNREVCSLREYFLKTDVGMHRDVVAVDKGLTPLSMAKENWRKPVVLTTDYRKEVWQGKELHGRFYKALHGPDVDFLASVSWLRFGDLFGETEGFVCAIMDEVMLTNNYRKYIMKDGTVDVCRACHRPGESIRHIISGCSRLANGEYLHRHNQVARIIHQQLALKYNLVESEVPYYKYVPDPVLEKDHVTLYWDRSIITDRTIVANKPDIVVIDRSARRVMIIDVTIPHDENLVKAEKEKQLKYLDLAHEVVDMWNVNSAIIVPIVITANGLIAKSLDEHLSKLSLGGWIKGLIQKAVLLDTARIVRRFLSLEP

SEQ ID NO: 29118 - protein, 1199 aa, Hecatera dysodea
MLTRAATLRARHPPPGSPLSSASPPPDIESQVSPAAAVASSSSDEYFSPPTSPPPVRRQGRGRPPRGLGPGGQPAPSRVPATGGCVQRMRWTQSMNENVMRAYYGSTEGGTNLTAYRVRMLSLFQDLEPTVTVSAQRLSDQVRVIQRSHRLDDAALDRLRSEVLSSLIISTPPQAAVQAPTIGAIILRPNNVSDEVDDTAVTVSTQCNDRLRSALEDALREYRSTPSELRPRLPRLPMHKKNRALVCALDSLLKNIFESSENLVDTHSILYCGAVAACRVANVKFTNSDGATRPKNAAPAWQCRIERRIDEARVLIGKLYCFREGNTRPRVMRFVRRAFLGTEISPQEYMSRVTERIDFLKQKVCAWANRIRRYKKRVDRYSQNRMFQSDERWVYRAWERPEQSVMDVCRPDDVTTNTFWRSIWSVPVCHAEGGWMRDVERVCEAIPQMEKITITSLDVAKAVRPLPNWKSPGPDGLHNFWLKWYSSSHALLASQFQSSLESGSLPQLLTTGVTHLLHKTGSPAEPKNYRPITCLSTVYKLLTSILRVKINEHIETNSIMSSSQNGCRKGSRGTKELLLIDMAISQQVRRSRKDLSTCWIDYKKAYDSVPHTWLLKVFELYKIDATLRTFLESCMRQWKTVLRYPGCRPIQGSDEPVWIKRGIFQGDSLSPLWFCLALNPLSTLLEDSDLGYRLRRGGQAISHLLYMDDLKLFAPNKLRLMELLKVTETFSSDIRMEFGVDKCAVMHVKKGKIMESEGIQLSDSIQVRSLSSTETYKYLGMSEALGINVADMKQSLKERFFGRLKKVLNSLLSGGNKVRAFNGWVMPVLMYSFGILKWTQTELDALDRRVRTLLTANRMHHPRSSVMRLYIPRKWGGRGFLNAKTLHNREMCSLREYFLETDVGMHRDVVAVDKGLTPLSMANENWRKPVIQTTDDRKEVWKGKELHGRFYRALYGSDVDFSASVAWLRFGDLFGETEGFVCAIMDEVILTNNYRRHIMKDGTVDVCRACHRPGESIRHIISGCSRLANGEYLHRHNQVARIIHQQLALKYKLVDSEVPYYKYVPDPVLENGHVTLYWDRSIITDRTIVANKPDIVVIDRLARRTMIIDVTIPHDENLVKAEKEKQIKYLDLAHEVVDMWNVDSAVIVPIVITANGLMAKSFDDHLSKLALNGWLKGLIQKAVLLDTARIVRRFLSLEP

SEQ ID NO: 29119 - protein, 1199 aa, Hecatera dysodea
MLTRAATLRARHPPPGSPLSSASPPPDIESQVSPAVAVASSSSDEYFSPPTSPPPVRRQGRGRPPRGLGPRGQPAPSRVPATGGCVQRMRWTQSMNENVMRAYYGSTEGGINLTAYRVRMLSLFQDLEPTVNVSAQRLSDQVRVIQRSHRLDEAALDRLRSEVLNNLIISTPTQTAVQAPGSGAIIPRPIHVCDEVGDRVVTVSSQCNDRLKSALEDALREYRSTPTELRPRLPRLPMHKKNRALVCALDSLLKNIFESSENLVDTHSILYCGAVAARRVANVKFSNSDGATRPKNAAPAWQCRIERRIDEARVLIGKLYCFREGNTRPRVMRFVRRAFLGTEISPQEYMSRVTERIDFLKQKVCAWANRIRRYKRRVDRYSQNRIFQSDERWVYRAWERPEQSVTDVCRPDDVTTNTFWRSIWSVPVCHAEGGWMRDVERVCEAIPQMEKITITTVDIATAVRPLPNWKSPGPDGLHNFWLKWYSSSHALLASQFQSSLDSGSLPQFLTTGVTHLLHKTGSPAEPKNYRPITCLSTVYKLLTSILRVKINEHIESNSIMSYSQNGCRKGSRGTKELLLIDMAISQQVRRSRKDLSTCWIDYKKAYDSVPHTWLLKVLELYKVDATLRTFLESCMRQWKTVLRYAGCRPIQGNEEPVWIKRGIFQGDSLSPLWFCLALNPLSTLLEDSGLGYRLRRGGQTISHLLYMDDLKLFAPNNLRLMELLKVTETFSSAIRMEFGVDKCAVMHVKKGEIMESEGIQLSDSIQVRSLSSTETYKYLGMSEALGINGADMKQSLKERFFGRLKKVLNSLLSGGNKVRAFNGWVMPVLMYSFGILKWTQTELDALDRRVRTLLTANRMHHPRSSVMRLYIPRKCGGRGFLNAKTLHNREMCSLREYFLKADVGMHRDVVAVDKGLTPLSMANENWRKPVIHTTDDRKEVWKGKELHGRFYRALYGSDVDFSASVAWLRFGDLFGETEGFVCAIMDEVILTNNYRRHIMKDGTVDVCRACHRPGESIRHIISGCSRLANGEYLHRHNQVARIIHQQLALKYKLVDSEVPYYKYVPDPVLENDHVTLYWDRSIITDRTIIANKPDIVVIDRLARRTMIIDVTIPHDENLVKAEKEKQIKYLDLAHEVVDMWNVDSAVIVPIVVTANGLMAKSFDEHLSKLALHGWLKGLIQKAVLLDTARIVRRFLSLEP

SEQ ID NO: 29120 - protein, 1080 aa, Hecatera dysodea
MLSLFQDLEPTVNVSAQRLSDQVRVIQRSHRLDDAALDRLRSEVLNNLIIPTPTQTMEQVPTISSLTPRSINVCEEVDDRVVTVSSQCNDRLRSALEDALCEYRSTPTELRPRLPRLPMHKKNRALVCALDSLLKNIFESSENLIDTHSILYCGAVAACRIANVKFINSDGAIRPKSVAPAWQCRIERRIDEARVLIGKLYCFREGNTRPRVMRFVRRAFLGTQISPQEYMSRVTERIDFLKQKVCAWANRIRRYKRRVDRYSQNRMFQSDERWVYRAWERPEQSVTDVCRPDDVATNTFWRSIWSVPVCHAEGGWMRDVERMCEAIPQMEKINITSLDVAKAVRPLPNWKSPGPDGLHNFWLKWYSSSHALLASQFQSSLESGSLPQFLTTGVTHLLHKTGSPAEPKNYRPITCLSTVYKLLTSILRMKINEHIETNSIMSSSQNGCRKGSRGTKELLLIDMAISQQVRRSRKDLSTCWIDYKKAYDSVPHTWLLKVLELYKIDATLRTFLESCMRQWKTVLRYPGCRPIQGSDEPVWIKRGIFQGDSLSPLWFCLALNPLSTLLEDSDLGYRLRRGGQAISHLLYMDDLKLFAPNKLRLMELLKVTETFSSDIRMEFGVDKCAVMHVKKGKIMESEGIQLSDSKQVRSLSSTETYKYLGMSEALGINVADMKQSLKERFFGRLKKVLNSLLSGGNKVRAFNGWVMPVLMYSFGILKWTQTELDALDRRVRTLLTANRMHHPRSSVMRLYIPRKCGGRGFLNAKTLHNREMCSLREYFLETDVGMHRDVVAVDKGLTPLSMANENWRKPVIHTTDDRKEVWKSKELHGRFYRALYGSDVDFSASVAWLRFGDLFGETEGFVCAIMDEIILTNNYRRHIMKDGTVDVCRACHRPGESIRHIISGCSRLANGEYLHRHNQVARIIHQQLALKYKLVDSEVPYYKYVPDPVLENGHVTLYWDRSIITDRTIVANKPDIVVIDRLARRTMIIDVTIPHDENLVKAEKEKQIKYLDLAHEVVDMWNVDSAVIVPIVITANGLMAKSFDDHLSKLALHGWLKGLIQKAVLLDTARIVRRFLSLEP

SEQ ID NO: 29121 - protein, 1202 aa, Mythimna impura
MIMLTRAATRRTRPSPLGLSLSSASPPPDLGSPVSPTAAVASSSSDEYFSPPTSPTPVRRPGRGRPPKSLGPRGQPAPSRVPAAGGCVQRMKWTQSMNENVMRAYYGSTEGGTNLTAYRVRMLSLFQELEPTVNVTAQRLSDQVRVIQRNHRLDGAALDRLRSEVLSNRIISTPSQTQTEAPQATDAILPRSNHIDDEADDRVVTVSSQCNDRLRSALEDALREYRSTPIALRPRLPRLPMHKKNRALVCALDSLLENVFESSVNLADTHSILYCGAIAACRLANVKLPSCDGATRPKPAAPAWQCRIERRIDEARALIGKLYCFREGNTRPRVMRYVRRAFSGTEISPREYLSRVTERIDFLKQKVCAWANRIRRYKRRVDRYSQNRMFQSDERWVYRAWERPEQNVTDVTRPDAVATNTFWRNIWSVPVCHTEDGWMREVERVCEAIPEMEKIIISPIDVARAVRPLPNWKSPGPDGLQNFWLKWYSSSHALLASQFQSSLESGSLPQFLTTGVTHLLHKTGSTAEPKNYRPITCLPTVYKLLTSILRTKINKHIDSNSIMSASQNGCRNGSRGTKELLLIDMAISQQVRRSHKDLSTCWIDYKKAYDSVPHTWLMRVLELYKIDATLRTFLESCMGQWNTVLRYPGCRSIRRDDEPIWIKRGIFQGDSLSPLWFCLALNPLSTLLEESGLGYRLRRGGQVLSHLLYMDDLKLIAPNKLRLMELLKVTETFSSAIRMEFGVDKCAVMHVKRGEIMESEGIQLSDSIHFRSLSSTETYKYLGMSEALGINVADMKQSLKERFFGRLKKVLNSLLSGGNKVRAFNGWVMPVLMYSFGILKWTQTELDAVDRRVRTLLTANRMHHPRSSVMRLYIPRKCGGRGFLNTKTLHNREVCSLREYFHKTDVGMHRDVVAVDKGLTPLSMAKENWRKPVVLTTDDRKEVWKSKELHGRFYRALHESDIDFAASVAWLRFSNLFGETEGFICAIMDEVILTNNYRRYIMKDGTVDVCRACHRPGESIRHIISGCSRLANGEYLHRHNQVARIIHQQLALKYNLVDYEVPYYRYVPDPVLENDHVTLYWDRSIITDRTIVANKPDIVVIDRLARRVMIVDVTIPHDENLVKAEKEKQIKYLDLAHEVVDMWNVDSAVIVPIVVTATGLIAKSFDDHLSKLSLRGWINSLIQKAVLLDTARIVRRFLSLEP

SEQ ID NO: 29122 - protein, 868 aa, Xestia xanthographa
MRFVRRAFSGTEISPQEYMSRVTERIDFLKQKVYAWANRIRRYKRRVDRYSQNRMFQSDGRWVYRAWERPEQNMTDVCRPDDAATSSFWRSIWSVPVCHTEADWMRDVERVCEPIPEMEPIFITPLDVARAVRPLPNWKSPGPDGLHNFWLKWFSSSHTCLASQFQSSLESGSLPQFLTTGVTHLLHKSGSPAEPKNYRPITCLSTIYKLLTSILRVKINTHIDKNSIMSASQNGCRNGSRGTKELLLIDMAISQQVRRSRKDLSTCWIDYKKAYDSVPHTWLMRVLELYKIDTTLRTFLESCMGQWRTVLRYPGCRQIQGSDDPVWIKRGIFQGDSLSPLWFCLALNPLSTLLENSGLGCRLRKDGQVISHLLYMDDLKLFASNKLRLMELLKVTETFSNAIRMEFGVDKCAVMYVKRGEIMESEGLQLSDSIQLRSLSSSETYKYLGMSEALGINITDMKQSLKERFFSRLRKVLNSLLSGGNKVRAFNGWVMPVLMYSFGILKWTQTELDALDRRVRTLLTESRMHHPRSSVMRLYIPRKCGGRGFLNAKTLHNREVCSLREYFLKAEVGMHRDVVAVDKGLTPLSMAKENWHKPEVLTTDDRKEVWQGKELHGRFYRALHGPDVDFLASVSWLRFGDLFGETEGFVCAIMDEVMLTNNYRKYIMKDGTVDVCRACHLPGESIRHIISGCSRLANGEYLHRHNQVARIIHQQLALKYKLVESEVPYYKYVPDPVLESDHVTLYWDRSIITDRTIVANKPDIVMIDRSARRVMIIDVIIPHDENLVKAEKEKQIKYLDLAHEVRDMWNMNSVIIVPIVVTANGLIAKSFDDHLSKLSLGGWIKGLIQKAVLLDTARIVRRFLSLQP

SEQ ID NO: 29123 - protein, 1080 aa, Xestia xanthographa
MLSLFQGLEPTVNVSAQRLSDQVRVIQRSHRLDDAALDRLRSEVLSNLIVLTPTQTAVQVSAIDATPPRLNPVVVEEDDGVATVSSQCNDRLRSALENALHEYRSTPTELRPRLPRLPMHKKNRALVCALDSQLKNIFECSENLVDTHSILFCGAVAACRLANVKFPNCDVANRPKPAVPAWQRRIERRIDGARVLIGKLYCFREGNTRPRVMRFVRRAFSGTEISPQEYMSRVTERIDFLKQKVYAWANRIRRYKRRVDRYSQNRMFQSDERWVYRAWERPEQNMTDVCRPDDAATSSFWRSIWSVPVCHTEADWMRDVERVCEPIPEMEPIFITPLDVARTVRPLPNWKSPGPDGLHNFWLKWFSSSHTCLASQFQSSLESGSLPQFLTTGVTHLLHKSGSPAEPKNYRPITCLSTIYKLLTSILRVKMNTHIDKNSIMSASQNGCRNGSRGTKELLLIDMAISQQVRRSRKDLSTCWIDYKKAYDSVPHTWLMRVLELYKIDTTLRTFLESCMGQWRTVLRYPGCRQIQGSDDPVWIKRGIFQGDSLSPLWFCLALNPLSTLLENSGLGCRLRKDGQVISHLLYMDDLKLFASNKLRLMELLKVTETFSNAIRMEFGVDKCAVMYVKRGEIMESEGLQLSDSIQLRSLSSSETYKYLGMSEALGINITDMKQSLKERFFSRLRKVLNSLLSGGNKVRAFNGWVMPVLMYSFGILKWTQTELDALDRRVRTLLTESRMHHPRSSVMRLYIPRKCGGRGFLNAKTLHNREVCSLREYFLKAEVGMHRDVVAVDKGLTPLSMAKENWHKPEVLTTDDRKEVWQGKELHGRFYRALHGPDVDFLASVSWLRFGDLFGETEGFVCAIMDEVMLTNNYRKYIMKDGTVDMCRACHLPGESIRHIISGCSRLANGEYLHRHNQVARIIHQQLALKYKLVESEVPYYKYVPDPVLESDHVTLYWDRSIITDRTIVANKPDIVMIDRSARRVMIIDVTIPHDENLVKAEKEKQIKYLDLAHEVRDMWNMNSVIIVPIVVTANGLIAKSFDDHLSKLSLGGWIKGLIQKAVLLDTARIVRRFLSLQP

SEQ ID NO: 29124 - protein, 1201 aa, Xestia xanthographa
MMLTRAAAARRAHLPTPDSSLSSASPPPDPRSPVSPVAAVASSSSDEYFSPPTSPPPVRRAGRGRPPTSLGLRGRQAPSRVPATGGCVQRMKWTQSMNENVMRAYYGSTEGGTNLTAYRVRMLSLFQDLEPTVIVSAQRLSDQVRVIQRSHRLDDAALDRLRSEVLSNLIVLTPTQTAVQVSAIDATPPRLNPAVVEEDDGVATVSSQCNDRLRSALENALHEYRSTPTELRPRLPRLPMHKKNRALVCALDSQLKNIFESSESLVDTHSILFCGAVAACRIANVKFPNCDVATRPKPAVPAWQRRIERRIDGARVLIGKLYCFTEGNTRPRVMRFVRRAFSGTEISPQEYMSRATERIDFLKQKVYAWANRIRRYKRRVDRYSQNRMFQSDERWVYRAWERPEQNMTDVCRPDDAATSSFWRSIWSVPVCHTEADWMRDVERVCEPIPEMEPIFITPVDVARAVRPLPNWKSPGPDGLHNFWLKWFSSSHTCLASQFQSSLESGSLPQFLTTGVTHLLHKSGSPAEPKNYRPITCLSTIYKLLTSILRVKINTHIDKNSIMSASQNGCRNGSRGTKELLLIDMAISQQVRRSRKDLSTCWIDYKKAYDSVPHTWLMRVLELYKVDTTLRTFLESCMGQWKTVLRYPGCRQIQGSDEPVWIKRGIFQGDSLSPLWFCLALNPLSTLLENSGLGCRLRKDGQVISHLLYMDDLKLFAPNKLRLMELLKVTETFSSAIRMEFGVDKCAVMYVKRGEIMESEGLQLSDSIHLKSLSSSETYKYLGMSEALGINVTDMKQSLRERFFGRLRKVLNSLLSGGNKVRAFNGWVMPVLMYSFGILKWTQTELDALDRRVRTLLTESRMHHPRSSVMRLYIPRKCGGRGFLNAKTLHNREVCSLREYFLKAEVGMHRDVVAVDKGLTPLSMAKENWHRPEVLTTDDRKEVWQGKVLHGRFYRALHGPDVDFIASVSWLRFGDLFGETEGFVCAIMDEVMLTNNYRKYIMKDGTVDVCRACHLPGESIRHIISGCSRLANGEYLHRHNQVARIIHQQLALKYKLVESEVPYYKYVPDPVLENDHVTLYWDRSIITDRTIVANKPDIVMMDRSARRVMIIDVTIPHDENLVKAEKEKQIKYLDLAHEVRGMWNMNSVIIVPIVVSANGLIAKSFDDHLSKLSLGGWIKGLIQKAVLLDTARIVRRFLSLQP

SEQ ID NO: 29125 - protein, 1203 aa, Cosmia trapezina
MLTRSAARARPPPPDSSLSSASPPPVSSPTVGAVMTPAAAVASSSSDEYFSPPTSPTPVRRQGRGRPPRSLGLRGQPTPSRVPPAAGGCVQRMRWTQSMNENVMRAYYGSTEGGTNLTAYRVRMLSLFQELEPTVNVSAQRISDQVRVIQRNHRLDDAALDRLRSEVLSNHIISNPTQTAVQPSIIDALPPRSNHVVEEVDDRVATVSSQYNDRLRDALEDAFCEYRSTPTELRPRLPRLPMHKKNRALMCALNSLLKDFFESSENLVDTHSILYCAAVAACRLANVKFPNCDGATRPKPAIPAWQCRIERRIDGARVLIGKLYCFRQGNTRPRVMRFVRRAFSGTGISPPEYMSRVTERIDFLKQKVCAWASRIRRYKRRVDRYTQNRMFQSDERWVYRAWERPEQNVTDVCRPDDAATSAFWRSIWSVPVCHAEAGWMKDVERVCEAIPEMEPVLITPLDVARAVRPLPNWKSPGPDGLHNFWLKWLISSHTRLASQFQSSLESGSLPQFLTTGVTHLLHKSGSPAEPKNYRPITCLSTIYKLLTSILRAKINMHIDSNSIMSTSQNGCRNGSRGTKELLLIDMAISQQVRRSRKDLSTCWIDYKKAYDSVSHAWLMRVLELYKIDATLRTFLESCMGQWRTVLRYPGCRRIQGNDEPVRIKRGIFQGDSLSPLWFCLALNPLSTLLEDSGLGYRLRRGGQVISHLLYMDDLKLFAPNKLRLMELLKVTETFSSAIRMEFGVDKCAVMHVKRGEIMESEGIQLSDSIHLRSLSSSETYKYLGMSEALGINVADMKQSLRERFFGRLTKVLISLLSGGNKVRAFNGWVMPVLMYSFGILKWTQTELDALDRRVRTLLTANRMHHPRSSVMRLYIPRKCGGRGFLNAKTLHNREVCSLREYFLKSDVGMHRDVVAVDKGLTPLSMAKENWRKPVVLTTDDRKKVWQSKELHGRFYRALHEPDVDFLASVSWLRFGDLFGETEGFVCAIMDEVILTNNYRRYIMKDGTVDVCRACHRPGESIRHIISGCSRLANGEYLHRHNQVARIIHQQLALKYKLVDSEVPYYKYVPDPVLENDHVTLYWDRSIITDRTIVANKPDIVVMDRLARRAMIVDVTIPHDGNLVKAEKEKQIKYLDLAHEVVDMWNVDSAVIVPIVVTANGLIADSLDQHLSRLSLGGWIKGQIQKAVLLDTARIVRRFLSLQP

SEQ ID NO: 29126 - protein, 1202 aa, Noctua fimbriata
MITRAAYRRARLPPPDPSLSSASPPPESSPIVSAVTPAVAVASSSSDEYFSPPTSPTPVRRQGRGRPPRSLGLRGHPAPSRVPAAGGCVQRMRWTHSINENVMRAYYGSTEGGTNLTAYRVGMLSLFQVLEPTVNVSAQRLSDQVRVIQRNHMLDDAVLDRLRSEVLSNRIVLTPAQTAVQASVIDATPPRFNPAVVEEDDRVAVVSSQCNDRLRSALEDALREYRSTPTELRPRLPRLPMHNKNRALVCALDSQLENIFESSENLVDTHSILYCGAVAACRLANVKFSNCDVATRPKPAVPAWQRRIERRIDGARVLIGKLHCFREGNTRPRVMRFVRRAFSGTGISPQEYMSRVTERIDFLKQKVYAWANRIRRYKRRVDRYSQNRMFQSDERWVYRVWERPELNMTDVCRPDDAATSSFWRSIWSVPVCHTEADWMRDVERVCEPIPEMEPILITPLDIARAVRPLPNWKSPGPDGLHNFWLKWLSSSHTCLASQFQSSLESGSLPQFLTTGVTHLLHKSGSPAEPKNYRPITCLSTVYKLLTSILRAKINTHIDKNSIMSASQNGCRNGSRGTKELLLIDMAISQQVRRSRKDLSTCWIDYKKAYDSVPHTWLMRVLELYKIDATLRAFLESCMGQWRTVLRYPGCRQIQGNDEPVWIKRGIFQGDSLSPLWFCLALNPLSTLLEDSGLGYRLRRGGQVISHLLYMDDLKLFAPNKLQLMELLKVTETFSSAIRMEFGVDKCAVMYVKRGEIMESEGIQLSDFIHLRSLSSSESYKYLGMSEALGINVTDMKQSLKERFFGRLNKVLHSLLSGGNKVRAFNGWVMPVLMYSFGVLKWTQTELDALDRRVRTLLTANRMHHPRSSVMRLYIPRKCGGRGFLNAKSLHNREMCSLREYFLKVEVGMHRDVVAVDKGLTPLSMAKENWRKPEVLTTDDRKEVWQGKELHGRFYRALHGPDVDFLASVSWLRFGDLFGETEGFVCAIMDEVMLTNNYRKYIMKDGTVDVCRACHRPGESIRHIISGCSRLANGEYLHRHNQVARIIHQQLALKYKLVESEVPYYKYVPDPVLEKNHVTLYWDQSIITDRTIVANKPDIVVIDRSARRVMIVDVTIPHDENLVKAEKEKQIKYLDLAHEVVDMWHVNSAIIVPIVVTANGLIAKSLDDHLSKLSLGGWIKGLIQKAVLLDTARIVRRFLSLEP

SEQ ID NO: 29127 - protein, 1202 aa, Noctua fimbriata
MLTRAAARRARLPPPDPSLSSASPPPESSPIVSAVTPAVAVASSSSDEYFSPPTSPTPVRRQGRGRPPRSLGLRGHPAPSRVPAAGGCVQRMRWTHSINENVMRAYYGSTEGGTNLTAYRVGMLSLFQVLEPTVNVSAQRLSDQVRVIQRNHMLDDAVLDRLRSEVLSNRIVLTPAQTAVQALVIDATPPRFNPAVVEEDDRVAVVSSQCNDRLRSALEDALREYRSTPTELRPRLPRLPTHNKNRALVCALDSQLENIFESSENLVDTHSILYCGAVAACRLANVKFPNCDVATRPKPAVPAWQRRIERRIDGARVLIGKLHCFRDGNTRPRVMRFVRRAFSGTGISPQEYMSRVTERIDFLKQKVYAWANRIRRYKRRVDRYSQNRMFQSDERWVYRAWERPELNMTDVCRPDDAATSSFWRSIWSVPVCHTEADWMRDVERVCEPIPEMEPILITPLDIARAVRPLPNWKSPGPDGLHNFWLKWLSSSHTCLASQFQSSLETGSLPQFLTTGVTHLLHKSGSPAEPKNYRPITCLSTVYKLLTSILRAKINTHIDKNSIMSASQNGCRNGSRGTKELLLIDMAISQQVRRSRKDLSTCWIDYKKAYDSVPHTWLMRVLELYKIDATLRAFLESCMGQWRTVLRYPGCRQIQGNDEPVWIKRGIFQGDSLSPLWFCLALNPLSTLLEDSGLGYRLRRGGQVISHLLYMDDLKLFAPNKLQLMELLKVTETFSSAIGMEFGVDKCAVMYVKRGEIMESEGIQLSDSIHLRSLSSSESYKYLGMSEALGINVTDMKQSLKERFFGRLNKVLHSLLSGGNKVRAFNGWVMPVLMYSFGALKWTQTELDALDRRVRTLLTANRMHHPRSSVMRLYIPRKCGGRGFLNAKSLHNREMCSLREYFLKVEVGMHRDVVAVDKGLTPLSMAKENWRKPEVLTTDDRKEVWQGKELHGRFYRALHGPDVDFLASVSWLRFGDLFGETEGFVCAIMDEVMLTNNYRKYIMKDGTVDVCRACHRPGESIRHIISGCSRLANGEYLHRHNQVARIIHQQLALKYKLVESEVPYYKYVPDPVLEKDHVTLYWDQSIITDRTIVANKPDIVVIDRSARRVMIVDVTIPHDENLVKAEKEKQIKYLDLAHEVVDMWHMNSAVIVPIVVTANGLIAKSLDDHLSKLSLGGWIKGLIQKAVLLDTARIVRRFLSLEP

SEQ ID NO: 29128 - protein, 1202 aa, Noctua fimbriata
MLTRAAARRARLPPPDPSLSSASPPPESSHVVSAVTPAVAVASSSSDEYFSPPTSPTPVRRQGRGRPPRSLGLRGHPAPSRVPAAGGCVQRMRWTHSINENVMRAYYGSTEGGTNLTAYRVEMLSLFQVLEPTVNVSAQRLSDQVRVIQRNHMLDDAVLDRLRSEVLSNRIVLTPAQTAVQASVIDATPPRFNPAVVEEDDRVAVVSSQCNDRLRSALEDALREYRSTPTELRPRLPRLPMHNKNRALVCALDSQLENIFESSENLVDTHSILYCGAVAACRLANVKFPNCDVATRPKPAVPAWQRRIERRIDGARVLIGKLHCFREGNTRPRVMRFVRRAFSGTGISPQEYMSRATERIDFLKQKVYAWANRIRRYKRRVDRYSQNRMFQSDERWVYRAWERPELNMTDVCRPDDAATSSFWRSIWSVPVCHTEADWMCDVERVCEPIPEMEPILITPLDIARAVRPLPNWKSPGPDGLHNFWLKWLSSSHTCLASQFQSSLESGSLPQFLTTGVTHLLHKSGSPAEPKNYRPITCLSTVYKLLTSILRAKINTHIDKNSIMSASQNGCRNGSRGTKELLLIDMAISQQVRRSRKDLSTCWIDYKKAYDSVPHTWLMRVLELYKIDATLRAFLESCMGQWRTVLRYPGCRQIQGNDEPVWIKRGIFQGDSLSPLWFCLALNPLSTLLEDSGLGYRLRRGGQVISHLLYMDDLKLFAPNELRLMELLKVTETFSSAIRMEFGVDKCAVMYVKQGEIMESEGIQLSDSIHLRTLSSTESYKYLGMSEALGINVTDMKQSLKERFFGRLNKVLHSLLSGGNKVRAFNGWVMPVLMYSFGVLKWTQTELDALDRRVRTLLTANRMHHPRSSVMRLYIPRKCGGRGFLNAKSLHNREMCSLREYFLKVEVGMHRDVVAVDKGLTPLSMAKENWRKPEVLTTDDRKEVWQGKELHGRFYRALHGPDVDFLASVSWLRFGDLFGETEGFVCAIMDEVMLTNNYRKYIMKDGTVDVCRACHRPGESIRHIISGCSRLANGEYLHRHNQVARIIHQQLALKYKLVESEVPYYKYVPDPVLEKDHVTLYWDQSIITDRTIVANKPDIVVIDRSARRVMIVDVTIPHDENLVKAEKEKQIKYLDLAHEVVDMWNVNSAIIVPIVVTANGLIAKSLDDHLSRLSLGGWIKGLIQKAVLLDTARIVRRFLFLEP

SEQ ID NO: 29129 - protein, 1189 aa, Noctua fimbriata
MLTRAAARRARLPPPDPSLSSASPPPESSHIVSAVTPAVAVASSSSDEYFSPPTSPTPVRRQGRGRPPRSLGLRGHPAPSRVPAAGGCVQRMRWTHSINENVMRAYYGSTEGGTNLTAYRVGMLSLFQVLEPTINVSAQRLSDQVRVIQLNHMLDDAVLDRLRSEVLSNRIVFTPAQTAVQASVIDATPPRFNPAVVEEDDRVAVVSSQCNDRLRSALEDALREYRSTPTELRPRLPRLPMHNKNRALVCALDSQLENIFESSENLVDTHSILYCGAVAACRLANVKFPNCDVATRPKPAVPAWQRRIERRIDGARVLIGKLHCFREGNTRPRVMRFVRRAFSGTGISPQEYMSRVTERIDFLKQKVYAWANRIRRYKRRVDRYSQNRMFQSDERWVYRAWERPELNMTDVCRPDDAATSSFWRSIWSVPVCHTEADWMRDVERVCEPIPEMEPILITRLDIARAVRPLPNWKSPGPDGLHNFWLKWLSSSHTCLASQFQSSLESGSLPQFLTTGVTHLLHKSGSPAEPKNYRPITCLSTVYKLLTSILRAKINTHIDKNSIMSASQNGCRSGSRGTKELLLIDMAISQQVRRSRKDLSTCWIDYKKAYDSVPHTWLMRVLELYKIDATLRAFLESCMGQWRTVLRYPGCRQIQGNDEPVWIKRGIFQGDSLSPLWFCLALNPLSTLLEDSGLGYRLRRGGQVISHLLYMDDLKLFAPNKLRLMELLKVTETFSSAIRMEFGVDKCAVMYVKQGEIMESEGIQLSDSIHLRTLSSTESYKYLGMSEALGINVTDMKQSLKERFFGRLNKVLHSLLSGGNKVRAFNGWVMPVLMYSFGVLKWTQTELDALDRRVRTLLTANRMHHPRSSVMRLYIPRKCGGRGFLNAKSLHNREMCSLREYFLKVEVGMHRDVVAVDKGLTPLSMAKENWRKPEVLTTDDRKEVWQGKELHGRFYRALHGPDVDFLASVSWLRFGDLFGETEGFVCAIMDEVMLTNNYRKYIMKDGTVDVCRACHRPGESIRHIISGCSRLANGEYLHRHNQVARIIHQQLALKYKLVESEVPYYKYVPDPVLEKDHVTLYWDQSIITDRTIVANKPDIVVIDRSARRVMIVDVTIPHDENLVKAEKEKQIKYLDLAHEVVDMWNVNSAIIVPIVVTANGLIAKSLDDHLSRYRRTTIFYIFKCFLYSFC

SEQ ID NO: 29130 - protein, 962 aa, Noctua fimbriata
MNNKNRALVCALDSQLENIFESSENLVDTHSILYCGAVAACRLANVKLPNCDVATRPKPAVPAWQRRIERRIDGARVLIGKLHCFREGNTRPRVMRFVRRAFSGTGISPQEYMSRVTERIDFLKQKVYAWANRIRKYKRRVDRYSQNRMFQSDERWVYRAWERPELNMTDVCRPDDAATSSFWRSIWSVPVCHTEADWMRDVERVCEPIPEMEPILITPLDIARAVRPLPNWKSPGPDGLHNFWLKWLSSSHTCLASQFQSSLESGSLPQFLTTGVTHLLHKSGSPAEPKNYRPITCLSTVYKLLTSILRAKINTHIDKNSIMSASQNGCRSGSRGTKELLLIDMAISQQVRRSRKDLSTCWIDYKKAYDSVPHTWLMRVLELYKIDATLRAFLESCMGQWRTVLRYPGCRQIQGNDEPVWIKRGIFQGDSLSPLWFCLALNPLSTLLEDSGLGYRLRRGGQVISHLLYMDDLKLFAPNKLQLMELLKVTETFSSAIRMEFGVDKCAVMYVKRGEIMESEGIQLSDFIHLRSLSSSESYKYLGMSEALGINVTDMKQSLKERFFGRLNKVLHSLFSGGNKVRAFNGWVMPVLMYSFGVLKWTQTELDALDRRVRTLLTANRMHHPRSSVMRLYIPRKCGGRGFLNAKSLHNREMCSLREYFLKVEVGMHRDVVAVDKGLTPLSMAKENWRKPEVLTTDDRKEVWQGKELHGRFYRALHGPDVDFLASVSWLRFGDLFGETEGFVCAIMDEVMLTNNYRKYIMKDGTVDVCRACHRPGESIRHIISGCSRLANGEYLHRHNQVARIIHQQLALKYKLVESEVPYYKYVPDPVLEKNHVTLYWDQSIITDRTIFANKPDIVVIDRSARRVMIVDVTIPHDENLVKAEKEKQIKYLDLAHEVVDMWHVNSAIIVPIVVTANGLIAKSLDDHLSKLSLGGWIKGLIQKAVLLDTARIVRRFLSLEP

SEQ ID NO: 29131 - protein, 868 aa, Noctua fimbriata
MRFLRRAFSGTGISPQEYMSRVTERIDFLKQKVYAWANRIRRYKRRVDRYSQNRMFQSDERWVYRAWERPELNMTDVCRPDDAATSSFWRSIWSVPVCHTEADWMRDVERVCEPIPEMEPILITPLDIARAVRPLPNWKSPGPDGLHNFWLKWLSSSHTCLASQFQSSLESGSLPQFLTTGVTHLLHKSGSPAEPKNYRPITCLSTVYKLLTSILRAKINTHIDKNSIMSASQNGCRNGSRGTKELLLIDMAISQQVRRSRKDLSTCWIDYKKAYDSVPHTWLMRVLELYKIDATLRAFLESCMGQWRTVLRYPGCRQIQGNDEPVWIKRGIFQGDSLSPLWFCLALNPLSTLLEDSGLGYRLRRGGQVISHLLYMDDLKLFAPNKLRLMELLKVTETFSSAIRMEFGVDKCAVMYVKQGEIMESEGIQLSDSIHLRTLSSTESYKYLGMSEALGINVTDMKQSLKERFFGRLNKVLHSLLSGGNKVRAFNGWVMPVLMYSFGVLKWTQTELDALDRRVRTLLTANRMHHPRSSVMRLYIPRKCGGRGFLNAKSLHNREMCSLREYFLKVEVGMHRDVVAVDKGLTPLSMAKENWRKPEVLTTDDRKEVWQGKELHGRFYRALHGPDVDFLASVSWLRFGDLFGETEGFVCAIMDEVMLTNNYRKYIMKDGTVDVCRACHRPGESIRHIISGCSRLANGEYLHRHNQVARIIHQQLALKYKLVESEVPYYKYVPDPVLEKDHVTLYWDQSIITDRTIVANKPDIVVIDRSARRVMIVDVTIPHDENLVKAEKEKQIKYLDLAHEVVDMWNVNSAIIVPIVVTANGLIAKSLDDHLSKLSLGGWIKGLIQKAVLLDTARIVRRFLSLEP

SEQ ID NO: 29132 - protein, 1202 aa, Atethmia centrago
MLTRSAARARPPPPDSSLSSASPAPVPSPTVSAVTTPAAVVASSSSDEYFSPPTSPTPVRRQGRGRPPKSLGLRGQLAPSRVPAAGGCVQRMRWTQSMNENVMRAYYGSTEGGTNLTAYRVRMLSLFQKLEPTVNVSAQRLSDQVRVIQRNHRLDDAALDRLRSEVLSNHIVSTPAQTATHAPIINAIPPRSNHDVEEEDDRVATVSSQCNVRLRSALEDAFREYRSTPTELRPRLPRLPMHKKNRALVCTLDSLLKDFFESSEDLVDTHSILYCAAVAACRLANVKFPNCDGATRPKPAVPAWQCRIERRIDGARVLIGKLYCFREGNTRPRVMRFVRRAFSGTGISPREYMSRVTERIDFLKQKVCAWASRIRRYKRRVDRYMQNRMFQSDERWVYRAWERPEQNETDVCRPDDATTTAFWRSIWSVPVCHAEADWMRDVERVCETIPEMEVVIITPSDIARAVRPLPNWKSPGPDGLHNFWLKWLTSSHTCLASQFQSSLESGSLPQFLTTGITHLLHKSGSPAEPKNYRPITCLSTVYKLLTSILRAKINTHIDSNSIMSASQNGCRNGSRGTKELLLIDMAISQQVRRFRKDLSTCWIDYKKAYDSVPHTWLMRVLEFYKIDTTLRTFLESCMGQWRTVLRYPGCRQIQGNDEPVWIKRGIFQGDSLSPLWFCLALNPLSTLLEDSGLGYRLRRGGQVISHLLYMDDLKIFAPNKLQLMELLNVTETFSSAIRMEFGVDKCAVMHVKRGEIMESEGIQLSDSIHLRSLSSPESYKYLGMSEALGINVTDMKQSLKERFFGRLKKVLISPLSGGNKVRAFNGWVMPVLMYSFGILKWTQTELDALDRRVRTLLTANRMHHPRSSVMRLYIPRKCGGRGFLNAKTLHNREICSLREYFLKTEVGMHRDVVAVDKGLTPLSMAKENWCKPVILTTDDRKEIWQNKELHGRFYRALHEPDVDFLASVSWLRFGDLFGETEGFVCAIMDEVILTNNYRRHIMKDGTVDVCRACHRPGESIRHIISGCSRLANGEYLHRHNQVARIIHQQLALKYKLVNSEVPYYKYAPDPVLENDNVTLYWDRSIITDRTIVANKPDIVVIDRLARRAMIVDVTIPHDENLVKAEKEKQIKYLDLAHEVVDMWNVDSAVIVPIVVTANGLMAESLNHHLSRLSLGGWIKGLIQKAVLLDTVRIVRRFLSLES

SEQ ID NO: 29133 - protein, 1202 aa, Atethmia centrago
MLTRSAARARPPPPDSSLSSASPPPVPSPTVSAVTTPAAVVALSSSDEYFSPPTSPTPVRRQGRGRPPKSLGLRGQLAPSRVPAAGGCVQRMRWTQSMNENVMRAYYGSTEGGTNLTAYRVRMLSLFQELEPTVNVSAQRLSDQVRVIQRNHRLDDAALDRLRSEVLSNHIVSTPAQTATHAPIIDAIPPRSNHDVEEEDDRVATVSSQCNVRLRSALEDAFREYRSTPTELRPRLPRLPMHKKNRALVCALDSLLKDFFESSEDLVDTHSILYCAAVAACRLANVKFPNCDEATRPKLAVPAWQYRIERRIDGARVLISKLYCFREGNTRPRVMRFVRRAFSGTGISPREYMSRVTERIDFLKQKVCAWASRIRRYKRRVDRYTQNRMFQSDERWVYRAWERPEQNETDMCRPDDATTTAFWRSIWSEPVCHAEADWMRDVERVCETIPEMEVVVITPSDIARAVRPLPNWKSPGPDGLHNFWLKWLTSSHTYLASQFQSSLESGSLPQFLTTGITHLLHKSGSPAEPKNYRPITCLSTVYKLLTSILRAKINTHIDSNSIMSASQNGCRNGSRGTKELLLIDMAISQQVRRSRKDLSTCWIDYKKAYDSVPHTWLMKVLELYKIDTTLRTFLESCMGQWRTVLRYPGCRRIQGNDEPVWIKRGIFQGDSLSPLWFCLALNPLSTLLEDSGLGYRLRRGGQVISHLLYMDDLKIFAPNKLRLMELLKVTETFSGAIRMEFGVDKCAVMHVKRGEIMESEGIQLSDSIHLRSLSSPESYKYLGMSEALGINVTDMKQLLKERFFGRLKKVLISLLSGGNKVRAFNGWVMPVLMYSFGILKWTQTELDALDRRVRTLLTANRMHHPRSSVMRLYIPRKCGGRGFLNAKTLHNREICSLREYFLKAEVGMHRDVVAVDKGLTPLSMAKENWCKPVVLTTDDRKEIWQNKELHGRFYRALHEPDVDFLASVSWLRFGDLFGETEGFVCAIMDEVILTNNYRRHIMKDGTFDVCRACHRPGESIRHIISGCSRLANGEYLHRHNQVARIIHQQLALKYKLVNSEVPYYKYVPDPVLENDHVTLYWDRSIITDSTIVANKPDIVVIDRLARRAMIVDVTIPHDDNLVKAEKEKQIKYLDLAHEVVDMWNVNSAVIVPIVVTANGLMAESLNHHLSRLSLGGWIKGLIQKAVLLDTARIVRRFLSLEP

SEQ ID NO: 29134 - protein, 1202 aa, Atethmia centrago
MLTRSAARARPPPPDSSLSSASPPPVPSPTVSAVTTPAAVVTSSSSDEYFSPPTSPTPVRRQGRGRPPKSLGLRGQLAPSRVPAAGGCVQRMRWTQSMNENVMRAYYGSTEGGTNLTAYRVRMLSLFQKLEPTVNVSAQRLSDHVRVIQRNHRLDDAALDRLRSEVLSNHIVSTPAQTATHAPIINAIPPRSNHDVEEEDDRVATVSSQCNVRLRSALEDAFREYRSTPTELRPRLPRLPMHKKNRALVCALDPLLKDFFESSEDLVDTHSILYCAAVAACRLANVKFPNCDGATLPKPAVPAWQCRIERRIDGARVLIGKLYCFREGNTRPRVMRFVRRAFSGTGISPREYMSHVTERIDFLKQKVCAWASRIRRYKRRVDRYTQNRMFQSDERWVYRSWERPEQNETDVCRPDDATTTAFWRSIWSVPVCHAEADWMRDVERVCETIPEMEIVIITPSDIARAVRPLPNWKSPGPDGLHNFWLKWLTSSHTCLASQFQSSLESGSLPQFLTTGITHLLHKSGSPAEPKNYRPITCLSTVYKLFTSILRAKINTHIDSNSIMSASQNGCRNGSRGTKELLLIDMAISQQVRRFRKDLSTCWIDYKKAYDSVPHTWLMRVLELYKIDTTLRTFLESCMGQWRTVLRYPGCRQIQGNDEPVWIKRGIFQGDSLSPLWFCLALNPLSTLLEDSGLGYRLRRGGQVISHLLYMDDLKIFAPNKLQLMELLKVTETFSSAIRMEFGVDKCAVMHVKRGEIMESEGIQLSDSIHLRSLSSPESYKYLGMSEALGINVTDMKQSLKERFFGRLKKVLISPLSGGNKVRAFNGWVMPVLMYSFGILKWTQTELDALDRRVRTLLTANRMHHPRSSVMRLYIPRKCGGRGFLNAKTLHNREICSLREYFLKTEVGMHRDVVAVDKGLTPLSMAKENWCKPVILTTDDRKEIWQNKQLHGRFYRALHEPDVDFLASVSWLRFGDLFGETEGFVCAIMDEVILTNNYRRHIMKDGTVDVCRACHRPGESIRHIISGCSRLANGEYLHRHNQVARIIHQQLALKYKLVNSEVPYYKYAPDPVLENDHVTLYWDRSIITDRTIVANKPDIVVIDRLAGRAMIVDVTIPHDENLVKAEKEKQIKYLDLAHEVVDMWNVDSAVIVPIVVTANGLMAESLNHHLSRLSLDGWIKGLIQKAVLLDTARIVRRFLSLES

SEQ ID NO: 29135 - protein, 1201 aa, Atethmia centrago
MLTRSAARARPPPPDSSLSSASPPPVPSPTVSAVTTPAAVVASSSSDEYFSPPTSPTPVRRQGRGRPPKSLGLRGQLAPSRVPAAGGCVQRMRWTQSMNENVMRAYYGSTEGGINLTAYRVRMLSLFQELEPTVNVSAQRLSDQVRVIQRNHRLDDAALDRLRSEVLSNHIVSTPAQTATHAPIIDAIPPRSNHDVEEEDDRVATVSSQCNVRLRSALEDAFREYRSTPTELRPRLPRLPMHKKNRALVCALDSLLKDFFESSEDLVDTHSILYCAAVAACRLANVKFPNCDEATRPKPAVPAWQCRIERRIDGAGVLISKLYCFREGNTRPRVMRFVRRAFSGTGISPREYMSRVTERIDFLKQKVCAWASRIRRYKRRVDRYTQNRMFQSDERWVYRAWERPEQNETDMCRPDDATTTAFWRSIWSEPVCHAEADWMRDVERVCETIPEMEVVVITPSDIARAVRPLPNWKSPGPDGLHNFWLKWLTSSHTCLASQFQSSLESGSLPQFLTTGITHLLHKSGSPAEPKNYRPITCLSTVYKLLTSILRAKINTHIDSNSIMSASQNGCRNGSRGTKELLLIDMAISQQVRRSRKDLSTCWIDYKKAYDSVPHTWLMKVLELYKIDTTLRTFLESCMGQWRTVLRYPGCRRIQGNDEPVWIKRGIFQGDSLSPLWFCLALNPLSTLLEDSGLGYRLRRGGQVISHLLYMDDLKIFAPNKLRLMELLKVTETFSGTIRMEFGVDKCAVMHVKRGEIMESEGIQLSDSIHLRSISSPESYKYLGMSEALGINVTDMKQLLKERFFGRLKKVLISLLSGGNKVRAFNGWVMPVLMYSFSILKWTQTELDALDRRVRTLLTANRMHHPRSSVMRLYIPRKCGGRGFLNAKTLHNREICSLREYFLKAEVGMHRDVAAVDKGLTPLSMAKENWCKPVVLTTDDRKEIWQNKELHGRFYRALHEPDVDFLASVSWLRFGDLFGETEGFVCAIMDEVILTNNYRRHIMDGTVDVCRACHRPGESIRHIISGCSRLANGEYLHRHNQVARIIHQQLALKYKLVNSEVPYYKYVPDPVLENDHVTLYWDRSIITDRTIVANKPDIVVIDRLARRAMIVDVTIPHDDNLVKAEKEKQIKYLDLAHEVVDMWNVNSTVIVPIVVTANGLMAESLNHHLSRLSLGGWIKGLIQKAVLLDTARIVRRFLSLEP

SEQ ID NO: 29136 - protein, 1190 aa, Mesoligia furuncula
MLTRSAARRAHLPPPDSSLSPAPQPPEPSPIESAVTPAAAVASSSSDEYFSPPTSPTPVRRQGRGRPPNCLGLRGHPAPSRVPATGGCVQRMRWTQSMNENVMRAYYGSTEGGINLTAYRDRMLSLFQELEPTFNVSAQRLSDQVRVIQRNHRLDDIALDRLRSEVMNNHIVSTSAQTAAQVSSVDAIPPRFNHVEEEDDRVDTVSSQCNVRLRSALEDALREYRSTPTELRPRLPRLPMHKKNRALVCALDSQLKNFFESSVDLVDTHSILYCAAVAACRLANVKFPSCDGATRPKPAVPAWQRRIERRIDGARVLIGKLYCFREGNTRPRVMRFVRRAFSRVTERIDFLKQKVCAWASRIRRYKRRVDQYTQNRMFQSDERWVYRAWERPEQNVTDVCRPDDAATSAFWCSIWSVPVCHTEAGWMQDVERVCGSVPEMETVLITPSDVARAVRPLSNWKSPGPDGLHNFWLKWLISSHTCLASQFQSSLESGSLPQFLTTGVTHLLHKSGSPAEPKNYRPITCLSTVYKLLTSILRAKINKHIESNSIMSTSQNGCRNGSRGTKELLLIDMAISQQVRRSRKDLSTCWIDYKKAYDSVPHTWLMRVLELYKIDATLRTFLESCMGQWKTVLRYPGCRQIQGNDEPVWIKRGIFQGDSLSPLWFCLALNPLSTLLEDSGLGYRLRRGGQVISHLLYMDDLKLFAPNKLRLMELLKVTKTFSSAIRMEFGVDKCAVMHVKRGEIMESEGIQLSDSISLRSLSSSESYKYLGMSEALGINDADMKQSLKERFFCRLKKVLISLLSGGNKVRAFNGWVMPVLMYSFGILKWTQTELDALDRRVRTLLTANRMHHPRSSVMRLYIPRKCGGRGFLNAKTLHNREVCSLREYFLKTEVGMHRDVVAVDKGLTPLSMAKENWRKPVVLSTDDRKKVWQSKELHGRFYRALHEPGVDFIASVSWLRFGDLFGETEGFVCAIMDEVILTNNYRRHIMKDGTVDVCRACHRPGESIRHIISGCSRLANGEYLHRHNQVARIIHQQLALKYKLVDSEVPYYKYVPDPVLENDHVTLYWDRSIITDRTIVTNKPDIVVIDRLARRTMIVDVTIPHDGNLVKAEKEKKIKYLDLAHEVVDMWNVSSAVIVPIVVSANGLMAESLDQHLSRLSLGGWIKGLIQKAVLLDTARIVRRFLSLEP

SEQ ID NO: 29137 - protein, 962 aa, Mesoligia furuncula
MHKKNRALVCALDSQLKNFFESSEDLVDTHSILYCAAVAACRLANVKFSSCDGATRPKPAVPAWQRRIERRIDGARVLIGKLYCFREGNTRPRVMRFVRRAFSGTGISPREYMSRVTERIDFLKQKVCAWASRIRRYKRRVDRYTQNRMFQSDERWVYRAWERPEQNVTDVCRPDDAATSAFWCSIWSVPVCHTEAGWMQDVERVCESVPEMEKVLITPSDVARAVRPLSNWKSPGPDGLHNFWLKWLISSHTCLASQFQSSLESGSLPQFLTTGVTHLLHKSGSPAEPKNYRPITCLSTVYKLLTSILRAKINKHIESNSIMSASQNGCRNGSRGTKELLLIDMAISQQVRRSRKDLLTCWIDYKKAYDSVPHTWLMRVLELYKIDATLRTFLESCMGQWKTVLRYPGCRQIQGNDEPVWIKRGIFQGDSLSPLWFCLALNPLSTLLEDSGLGYRLRRGGQVISHLLYMDDLKLFAPNKLRLMELLKVTKTFSSAIKMEFGVDKCAVMHVKRGEIMESEGIQLSDSISLRSLSSSESYKYLGMSEALGINDADMKQSLKERFFCRLKKVLISLLSGGNKVRAFNGWVMPVLMYSFGILKWTQTELDALDRRVRTLLTANRMHHPRSSVMRLYIPRKCGGRGFLNAKTLHNREVCSLREYFLKAEVGMHRDVVAVDKGLTPLSMAKENWRKPVVLSTDDRKRVWQSKELHGRFYRALHEPGVDFIASVSWLRFGDLFGETEGFVCAIMDEVILTNNYRRHIMKDGTVDVCRACHRPGESIRHIISGCSRLANGEYLHRHNQVARIIHQQLALKYKLVDSEVPYYKYVPDPVLENDHITLYWDRSIITDRTIVANKPDIVVIDRLARRTMIVDVTIPHDGNLVKAEKEKQIKYLDLTHEVVDMWNVSSAIIVPIVVSANGLMAESLDQHLSRLSLGGWIKGLIQKAVLLDTARIVRRFLSLEP

SEQ ID NO: 29138 - protein, 1201 aa, Mesoligia furuncula
MLTRLAARRARLPPPDSSLSSAPPPPEPSPIESAVTPAVAVASSSSDEYFSPPTSPTPVRRQGRGRPPNSLGLRGHPAPSRVPATGGCVQRMRWTQSMNENVMRAYYGSTEGGINLTAYRDRMLSLFQELEPTVNVSAQRLSDQVRVIQRNHRLDDIALDRLRSEVLSNHIVTTSAQTAAQASTVDAIPPRFHHVEEEDDRVDTVSSQCNVRLRSALEDALREYRSTPTELRPRLPRLPMHKKNRALVCALDSQLKNFFESSEDLVDTHSILYCAAVAACRLANVKFPSCDGATRPKPAVPAWQRRIERRIDGARVLIGKLYCFREGNTRPRVMRFVRRAFSGTGISPREYMSRLTERIDFLKQKVCAWASRIRRYKRRVDRYTQNRMFQSDERWVYRAWERPEQNVTDVCRPDDAATSAFWCSIWSVPVCHTEAGWMQDVERVCESIPQMEKVLITPSDVARAVRPLPNWKSPGPDGLHNFWLKWLISSHTCLASQFQSSLESGSLPKFLTTGVTHLLHKSGSPAEPKNYRPITCLSTVYKLLTSILRAKINTHIEINSIMSASQNGCRNGSRGTKELLLIDMAISQQVRRSRKDLSTCWIDYKKAYDSVPHTWLMRVLELYKIDATLRTFLESCMGQWKTVLRYPGCRQIQGNDEPVWIKRGIFQGDSLSPLWFCLALNPLSTLLEDSGLGYRLRRGGQVISHLLYMDDLKLFAPNKLRLMELLKVTETFSSAIRMQFGVDKCAVMHVKRGEIMESEGIQLSDSISLRSLSSSESYMYLGMSEALGINDADMKQSLKERFFCRLKKVLISLLSGGNKVRAFNGWVMPVLMYSFGILKWTQTELDALDRRVRTLLTANRMHHPRSSVMRLYIPRKCGGRGFLNAKTLHNREVCSLREYFLKAEVGMHRDVVAVDKGLTPLSMAKENWRKPVVLSTDDRKKVWQSKELHGRFYRALHEPGVDFIASVSWLRFGDLFGETEGFVCAIMDEVILTNNYRRHIMKDGTVDVCRACHRPGESIRHIISGCSRLANGEYLHRHNQVARIIHQQLALKYKLVDSEVPYYKYVPDPVLENDHVTLYWDRSIITDRTIVANKPDIVVIDRLARRTMIVDVTIPHDGNLVKAEKEKEIKYLDLAHEVVDMWNVSSAIIVPIVVSANGLMAESLDQHLSRLSLGGWIKGLIQKAVLLDTARIVRRFLSLEP

SEQ ID NO: 29139 - protein, 1203 aa, Omphaloscelis lunosa
MLTRSAARSARLPPPDSPLSSASPPPVPSPIVNAVSTPAAVVASSSSDEYFSPPTSPTPVRRQGRGRPPKSLGLRGRPAPSRVPAAGGCVQRMRWTQSMNENVMRAYYGSTEGGTNLTAYRVRMLSLFQELEPTVNVSAQRLSDQVRVIQRNHRLDDTALDRLRSEVLSNHIVSAREQTVAEASNIDPTPPRFNHGVEEEDDRVATVSSQCNNRLRSALEDAFREYRYTPTELRPRLPRLAMHKKNRALMCALDSQLTNFFESSEDLIDTHSILYCAAVAACRLANVKFPNCDGATRPKPAVPAWQCRIERRIDGVRVLIGKLYCFREGNTRPRVMRFVRRAFSGTEISPQDYMSRVTERIDFLKQKVCAWASRIRRYKRRVDRYTQNRMFQSDERWVYRAWERPEQNVTDVCRPDDAATSAFWRSIWSVPVCHTEAGWMQDVERVCETIPEMDAVFITPLDVARAVRPLPNWKSPGPDGLHNFWLKWLSSSHTCLASQFQSSLESGSLPQFLTTGVTHLLHKSGNPAESKNYRPITCLSTVYKLLTSILRTKINTHIDSNSIMSVSQNGCRNGSRGTKELLLIDMAISQQVRRSRKDLSTCWIDYKKAYDSVPHTWLMRVLELYKVDTTLRTFLMSCMGQWRTVLRYPGCRRTQGNDEPVWIKRGIFQGDSLSPLWFCLALNPLSTLLEDSGLGYRLRRGGQVISHLLYMDDLKLFAPNKLRLMELLKVTETFSGAIRMEFGVDKCAVMHVKRGEIMESEGIQLSDSIHLRPLSSAENYRYLGMSESLGINVADMKQSLKERFFGRLKKVLISFLSGGNKVRAFNGWVMPVLMYSFGILKWTQTELDALDRRVRTLLTANRMHHPRSSVMRLYIPRKCGGRGFLNAKTLHNREVCSLREYFFKADVGMHRDVVAVDNGLTPLSMAKENWRKPVVLTTDDRKEIWQSKALHGRFYRALHEPSVDFLASVSWLRFGDLYGETEGFICAIMDEVILTNNYRRHIMKDGTVDVCRACHRPGESIRHIISGCSRLANGEYLHRHNQVARIIHQQLALKYKLVDSEVPYYKYVPDPVLENDHATLYWDRSIITDRTIVANKPDIVVIDRLARHAMIVDVTIPHDENLVKAEKEKQIKYLDLAHEVVGMWNVSSAIIVPIVVTANGLMAKSLDHHLSRLSLGGWIKRLIQKAVLLDTARIVRRFLSLQP

SEQ ID NO: 29140 - protein, 1203 aa, Omphaloscelis lunosa
MLTRSAARLARPPPPDSSLSSASPPPVPSPTVSATTTPAAVVASSSSDEYFSPPTSPTPIRRQGRGRPPKSLGLRGQPAPSRVPAAGGCVQRMRWTQSMKENVMRAYYGSTEGGTNLTAYRVRMLSLFQELEPTVNVSAQRLSDQVRVIQRNHRLDDTALDRLRSEVLSNHIVSTRAQTAAQASNIDATPPRFNHGVEEEDDRVATVSSQCNNRLRSALEDAFREYRYTPTELRPRLPRLPMHNKNRALVCALDSQLTNFFESSEDLIDTYSILYCAAVAACRLANVKFPNCDRATRPKPVVPAWQCRIERRIDGARVLIGKLYCFREGNTRPRVMRFVRRAFSGTGISPQDYMSRVTERIDFLKQKVCAWASRIRRYKRRVDRYMQNRVFQSDERWVYRAWERPEQNVTDVCRPDDAATSAFWRSIWSVPVCHTEAGWMQDVERVCETIPVMDAVFITPLDVARAVRPLPNWKSPGPDGLHNFWLKWLSSSHTRLASQFQSSLESGSLPQFLTTGVTHLLHKSGNPAEPKNYRPITCLSTVYKLLTSILRTKINTHIDSNSIISVSQNGCRNGSRGTKELFLIDMAISQQVRRSRKDLSTCWIDYKKAYDSVPHTWLMRVLELYKVDTTLRTFLMSCMGQWRTDLRYPGCRQTQGNDEPVWIKRGIFQGDSLSPLWFCLALNPLSTLLEDSGLGYRLRRGGQVISHLLYMDDLKLFAPNKLRLMELLKVTETFSGAIRMEFGVDKCAVMHVKRGEIMESEGIQLSDSIHLRSLSSAENYRYLGMSESLGINVADMKQSLKKRFFGRLKKVLISFLSGGNKVRAFNGWVMPVLMYSFGILKWTQTELDALDRRVRTLLTANRMHHPHSSVMRLYIPRKCGGRGLLNAKTLHNREVCSLREYFFKADVGMHRDVVAVDNGLTPLSMAKENWRKPVVLTTDDRKEVWQSKALHGRYFRALHEPDVDFLASVSWLRFGDLFGETEGFICAIMDEVILTNNYRRHIMKDGTVDVCRACHRPGESIRHIISGCSRLANGEYLHRHNQVARIIHQQLALKYKLVDSEVPYYKYVPDPVFENDHVTLYWDRSVITDRTIVANKPDIVVIDRLARHAMIVDVTIPHDENLVKAEKEKQIKYLDLAHEVVVMWNVSSAIIVPIVVTANGLMAKSLDQHLSRLSLDGWIKRLIQKAVLLDTARIVRRFLSLQP

SEQ ID NO: 29141 - protein, 868 aa, Sesamia nonagrioides
MRFVRQAFSGTGISPREYLTHVTERIDFLKQKVCAWANRIRRYKRRVDRYTQNRMFQSDERWVYRAWERSELNEADVCRPDVAATSAFWRSIWSVPVCHAEGDWIQNVEQVCEMIPEMDTILITPIDVATAVRSLPNWKSPGPDGLHNFWLKWLSSSHTCLASQFQSSLESGSLPQFLTTGITHLLHKSGSTAEPNNYRPITCLPTVYKVLTSILKAKINKHLDSNSIMSVSQNGCKSGSRGTKELLLIDMAISQQVRRSRKDLSTCWIDYKKAYDSVPHTWLMRVLELYKINATLRSFLRSCMGQWKTVLRYPGSRRIQGNDEPVWIKRGIFQGDSLSPLWFCLALNPLSTLLEDSGLGYRLKRGGQVISHLLYMDDLKLFAPNKLHLMKLLNVTETFSSGIKMEFGVDKCAVMHVERGQIMESEGITLPDSIHLRSLSSFESYKYLGMSEALGINDADMKQSLKERFFGRLKKVLKSLLSGGNKVRAFNGWVMPVLMYSFGILKWTQTELDALDRRVRTLLTANRMHHPRSSVMRLYIPRKCGGRGFLNAKTLHNREVCSLREHFLKTVVGMHHDVVTVDKGLTPLSMAKENWHKPIILTTDDRKMIWQSKELHGRFYRALHGPDVDFLASVSWLRFGDLFGETEGFVCAIMDEVILTNNYRRYIMKDGTIDVCRACHHPGESIRHIISGCSRLANSEYLHRHNQVARIIHQQLALKYKLVDSEVPYYKYVPDPVLENDHVTLYWDRSIITDRTIVANKPDIVVIDRLARLAMIVDVTIPHDGNLVKAEKEKQMKYLDLAHEVVDMWNVNSAVIVPIVVSANGLIAKSLDQHLLRLSLGSWIKGLIQKAVLLDTARIVRKFLSLEP

SEQ ID NO: 29142 - protein, 868 aa, Sesamia nonagrioides
MRFVRQAFSGTGISPREYINNVTERIDFLKQKVCAWASRIRRYKKRVDRYTQNRMFQSDERWVYRAWERPEQNEADECRPDDATTSAFWRGIWSVSVCHTEGDWTQDVEQVCEAIPEMDNILITPLDVATAVRSLPNWKSPGPDGLHNFWLKWLSSSHTCLASQFQSSLESGSLPQFLTTGITHLLHKSGSTAEPKNYRPITCLPTVYKVLTSILKAKINNHLDSNSIMSVSQNGCRSGSRGTKELLLIDMAISQQVRRSRKDLSTCWIDYKKAYDLVPHTWLMRVLELYKINATLRTFLRSCMGQWKTVLRYPGSRQIQGNDEPVWIKRGIFQGDSLSPLWFCLALNPLSTLLEDSGLGYRLKRDGQVISHLLYMDDLKIFAPNKLHLMKLLNVTETFSSGIKMEFGVDKCAVMHVKRGQIMESEGITLPDSIHLRSLSSIESYKYLGMSEALGINDADMKQSLKERFFGRLKKVLNSLLSGGNKVRAFNGWVMPVLMYSFGILKWTQTELDALDRRVRTLLTANRMHHPRSSVMRLYISRKCGGRGFLNAKTLHNREVFSLREYFLKTVVGMHHDVVTVDKGLTPLSMAKENWHKPIILTTYDRKMVWQSKELHGRFYRALHGPDVDFLASVSWLRFGDLFGETEGFVCAIMDEVILTNNYRRYIMKDGTIDVCRACHHPGESIRHIISGCSRLANSEYLHRHKQVARIIHQQLALKYKLVDSEVPYYKYVPDPVLENDHVTLYWDRSIITDRTIVANKPDIVVIDRLARLAMIVDVTIPHDGNLVKAEKEKQMKYLDLAHEVVDMWNVNSAVIVPIVVSANGLIAKSLDQHLLRLSLGNWIKGLIQKAVLLDTARIVRRFLSLEP

SEQ ID NO: 29143 - protein, 1199 aa, Mamestra configurata
MITRAAARRAHPPPPGSSLSSASPTPDIGSQVSPVVAVASSSSDEYFSPPTSPTPVRRQGRGRPPRSLGSRGQPAPSRVPAAGGCVQRMRWTQSMNENVMRAYYGSTEGGTNLTAYRVRMLSLFQDLEPTVNVSAQRLSDQVRVIQHNCRLDDAALERLRSEVLSNLIISTPTQTVVQAPASGAITPRPNNGSDEVDDRVVTVSSQCNDRLRSALEDALREYRLTPTELRPRLPRLPMHKKNRALVCALDSLLQNIFESSESLVDTHSILFCGAVAACRIANVKFPSCDEAIRPKPAAPAWQCRIERRIDEARALIGKLYCFREGNTRPRVMRFVRRAFSGTEISPRDFTSRVTERIDFLKQKVCAWASRIRRYKRRVDRYSQNRMFQSDERWVYRAWERPEQSVTDVCRPDDVATSIFWRSIWSVPICHAEGGWMRDVERVCEAIPQMEKITITTLDVAKAVRPLPNWKSPGPDGLHNFWLKWYSSSHALLASQFQSSLDSGSLPQFLTTGVTHLLHKTGSPTEPKNYRPITCLSTVYKLLTSILRAKINEHIESNSIMSASQNGCRKGSRGTKELLLIDMAISQQVRRSRKDLSTCWIDYKKAYDSVPHTWLMKVLELYKIDATLRTFLESCMRQWKTVLRYPGCRPIQGSDEPVWIKRGIFQGDSLSPLWFCLALNPLSTLLEDSGLGYRLRRGGQAISHLLYMDDLKLFAPNNLRLMELLKVTETFSSAIRMEFGVDKCAVMHVKKGEIMESEGIQLSDSIQVRSLSSTETYKYLGMSEALGINGTDMKQSLRERFFGRLKKVLNSLLSGGNKVRAFNGWVMPVLMYTFGILKWTQTELDALDRRVRTLLTANRMHHPRSSVMRLYIPRKCGGRGFLNAKTLHNREMCSLREYFLKADVGMHRDVVAVDKGLTPLSMAKENWRTPVILTTDDRKEVWKGKELHGRFYRALHGSDVDFSASVAWLRFGDLFGETEGFVCAIMDEVILTNNYRRHIMKDGTVDMCRACHRPGESIRHIISGCSRLANGEYLHRHNQVARIIHQQLALKYKLVDSEVPYYKYVPDPVLENDHVTLYWDRSIITDRTIVANKPDIVVIDRLARRTMIIDVTIPHDENLVKAEKEKQIKYLDLAHEVVDMWNVDSAVIVPIVVTANGLMAKSFDDHLSKLALRGWIKGLIQKAVLLDTARIVRRFLSLEP

SEQ ID NO: 29144 - protein, 1200 aa, Mythimna ferrago
MLTRAAARRARHPPPGSSLSSASPPPDPGSPVSPAAAVASSSSDEYFSPPTSPTPVRRPGRGRPPKSMGPRGQPAPSRVPAAGGCVQRMRWTQSMNENVMRAYYGSTEGGTNLTAYRERMLSLFQVLEPTVNVSAQRLSDQVRVIQRNHRLDDAALDRLRSEILSNQIVSTSTQTQTAATPTTNAISPRSDHNNDDADDRVVTVSSQCNERLRSALEDALCEYMSTPTELRPRLPRLPMHKKNRALVCALDSLLKNIFESSENLIDTHSILYCGAVAACRLANIKFPNIDGTIRPKSAVPAWQCRIERRIGEARVLIGKLHCFREGNTRPRVMRFVRRAFLGTGISPQGYMSRVTERIDFLKQKVCAWASRIRRYKRRVDRYSQNRMFQSDERWVYRAWERPEHSVIDGCRPDDFATITFWRNIWSVPVSHAEGGWMRDVERVCEAIPEMEKVTITPEDVAKAVRPLPNWKSPGPDGLQNFWLKWYSSSHALLASQFQSILESGSLPEYLTTGITHLLHKTGNPVDPKNYRPITCLSTVYKLLTSILRAKINIHIENHQIISPSQNGCRNGSRGTKELLLIDMAISQQTRRSRKDLSTCWIDYKKAYDSVPHTWLMRVLELYKIDITLRTFLESCMRQWKTVLRYPGCRPIQGNDEPIWIKRGIFQGDSLSPLWFCLALNPLSTLLEDSGLGYRLRRGGQVISHLLYMDDLKLFAPSTLQLMELLKVTETFSSAIRMEFGVDKCAGMHVKRGEIMESEGIQLPDSIHLRSLSSTETYKYLGMSEALGINNADMKQSLKERFFGRLKKVLNSLLSGGNKVRAFNGWVMPVLMYSFGILKWTQTELDALDRRVRTLLTANRMHHPRSSVMRLYIPRKCGGRGFLNAKTLHNREVCSLREYFLKTDVGMHRDVVAVDKGLTPLSMAKEDWHKPVIMTTDNRKEIWKGKELHGRFFRALHEPDVDFLASVAWLRFSDLFGETEGFVCAIMDEVILTNNYRRYIMKDGTVDVCRACHRPGESIRHIISGCSRLANGEYLHRHNQVARIIHQQLALKYNLVDLEVPYYKYVPDPVLENDHVTLYWDRSIITDRTIVANKPDIVVIDRSARRAMIVDITIPHDENLVKAEKEKQMKYLDLAHEVVDMWSVDSAVIVPIVVTANGLIAKSFDDHLSKLSLRGWIKGQIQKAVLLDTARIVRRFLSLEP

SEQ ID NO: 29145 - protein, 868 aa, Mythimna ferrago
MRFVRRAFSGTEISPREYMSRVTERIDFLKQKVCAWANRIRRYKRRVDRYSQNRMFQSDERWVYRAWERPGQNVTDGFRPDSVATNTFWRSIWSEPVCHNEGGWMRDVERVCEAIPEMDKVFITPLDVARAVRPLPNWKSPGPDGLQNFWLKWYSSSHAILASQFQSSLESGSLPQILTTGTTHLLHKTGSTADPKNYRPITCLSTVYKLLTSILRVKITLHIEKNSIMFASQNGCRNGSRGTKELLLIDMAISQQVRRSRKDLSTCWIYYKKAYDSVPHTWLMKVLELYKIDATLRTFLESCMRQWKTVLRYPGCRPIQGNDEPIWIKRGIFQGDSLSPLWFCLALNPLSTLLEDSGLGYRWRRGGQVLSHLLYMDDLKLFAHNNSQLMELLKVTETFSSAIRMEFGVDKCAVMHVRRGEIVESEGIQLSDSIHLRSLSSTETYKYLGMSEALGINVADMKQTLKERFFGRLKKVLNSLLSGGNKVRAFNGWVMPVLMYSFGILKWTQTELDALDRRVRTLLTANRMHHPRSSVMRLYIPRKCGGRGFLNAKTLHNREVCSLREYFLKTDVGMHRDVVAVDKGLTPLSMAKENWRKPVVLTTDDRKEVWKGKELHGRFFRALHEPDVDFSASVAWLRFSNLFGETEGFVCAIMDEVILTNNYRRHIMKDGTVDVCRACHRPGESIRHIISGCSRLANGEYLHRHNQVARILHQQLALKYNLVDSEVPYYRYVPDPVLENDHVTLYWDRSIITDRTIVANKPDIVVIDRLARRVMIVDVTIPHDENLVKAEKEKQIKYLDLAHEVVDMWNVDSAIIVPIVVTANGLIAKSFDDHLSKLSLHGWIKGLIQKAVLLDTARIVRRFLSLEP

SEQ ID NO: 29146 - protein, 1076 aa, Mythimna ferrago
MELEPSVNVTTQRLSDQVRVIQRNHRLDDAALDRLRSEVLSNRIISSPTQTQIAAPRATDAIMPRSNHGDDEADDRVVTVSSQCNDRLRSALEDALREYRSTPIARRPRLPRLPMHKKNRALVCALDSLLENVFESSVNLVDTHSILYCGAIAACRLANVKLLSCDEATRPKPAVPAWQYRIERRIDGARALIGKLYCFREGNTRPRVMRFVRRAFSGTGISPREYSSHVTERIDFLKQKVCAWASRIRRYKRRVDRYSQNRMFQSDERWVYRAWERPEQNVTDVLRPDDAATNAFWRSIWSVPVCHTEGGWMRDVERACEAIPEMEKIIISSTDVARAVRPLPNWKSPGPDGLQNFWLKWYSSSHALLASQFQSSLESGSLPQFLTTGVTHLLHKTGSTAEPKNYRPITCLSTVYKLLTSILRTKINKHIENNSIMSASQNGCRNGSRGTKELLLIDMAISQQVRRSRRDLSTCWIDYKKAYDSVPHTWLMRVLELYKIDATLRTFLESCMREWNTVLRYPGCRSIRGDDEPIWIKRGIFQGDSLSPLWFCLALNPLSTLLEDSGLGYRLRRGGQVLSHFLYMDDLKLIAPNKLRLMELLKVTETFSSAIRMEFGVDKCAVMHVKRGEIMESEGVQLSDSIHLRSLSSTETYKYLGMSEALGINVTDMKQSLKERFFGRLKKVLNSLLSGGNKVRAFNGWVMPVLMYSFGILKWTQTELDALDRRVRTLLTANRMHHPRSSVMRLYIPRKCGGRGFLNAKTLHNREVCSLREYFLKTDVGMHRDVVAVDKGLTPLSMAKENWRKPVVLTTDDRKEVWKGKELHGRFFRALHEPDVDFSASVAWLRFSNLFGETEGFVCAIMDEVILTNNYRRHIMKDGTIDVCRACHRPGESIRHIVSGCSRLANGEYLHRHNQVARILHQQLALKYNLVDSEVPYYKYVPDPVLKNDHVTMYWDRSIITDRTIVANKPDIVVIDRLARRAMIVDVTIPHDENLVKAEKEKQIKYLDLAHEVVDMWNVDSAVIVPIVVTVNGLIAKSFDDHLSKLSLHGWIKGLIQKAVLLDTARIVRRFLSLEP

SEQ ID NO: 29147 - protein, 1200 aa, Mythimna ferrago
MLTRTAARRARHPPPGSSLSSASPPPDPGSPVSPAAAVASSSSDEYFSPPTSPTPVRRPGRGRPPKSMGPRGQPAPSRVPAAGGCVQRMRWTQSMNENVMRAYYGSTEGGTNLTAYRERILSLFQVLEPTVNVSAQRLSDQVRVIQRNHRLDDAALDRLRSEILSNQIVSTSTQTQTAATPTTNAISPRSDHNNDDADDRVVTVSSQCNERLRSALEDALCEYMSTPTELRPRLPRLPMHKKNRALVCALDSLLKNIFESSENLVDTHSILYCGAVAACRLAKIKFPNIDGTIRPKTAVPAWQCRIERRIDEARVLIGKLHCFREGNTRPRVMRFVRRAFLGTGISPQGYMSRVTERIDFLKQKVCAWASRIRRYKRRVDRYSQNRMFQSDERWVYRAWERPEHSVIDECRPDDLATITFWRNIWSVPVSHTEGGWMRDVERMCEAIPEMEKVTITPEDVAKAVRPLPNWKSPGPDGLQNFWLKWYSSSHAPLASQFQSILESGSLPEYLTTGVTHLLHKTGNPVDPKNYRPITCLSTVYKLLTSILRAKINIHIENNQIISPSQNGCRNGSRGTKELLLIDMAISQQTRRSRKDLSTCWIDYKKAYDSVPHTWLMRVLELYKIDITLRTFLESCMRQWKTVLRYPGCRPIQGNDEPIWIKRGIFQGDSLSPLWFCLALNPLSTLLEDSGLGYRLRRGGQVISHLLYMDDLKLFAPSNLQLMELLKVTETFSSAIRMEFGVDKCAGMHVKRGEIMESEGIQLPDSIHLRSLSSTETYRYLGMSEALGINNADMKQLLKERFFGRLKKVLNSLLSGGNKVRAFNGWVMPVLMYFFGILKWTQTELDALDRRVRTLLTANRMHHPRSSVMRLHIPRKCGGRGFLNAKTLHNREVCSLREYFLKTDVGMHRDVVAVDKGLTPLSMAKEDWHKPVIMTTDNRKEIWKGKELHGRFFRALHEPDVDFLASVAWLRFSDLFGETEGFVCAIMDEVILTNNYRRYIMKDGTVDVCRACHRPGESIRHIISGCSRLANGEYLHRHNQVARFIHQQLALKYNLVDLEVPYYKYVPDPVLENDHVTLYWDRSIITDRTIVANKPDIVVIDRLARRAMIVDITIPHDENLVKAEKEKQIKYLDLAHEIVDMWNVDSAIIVPIVVTANGLIAKSFDDHLSKLSLRGWIKGQIQKAVLLDTARIVRKFLSLEP

SEQ ID NO: 29148 - protein, 1199 aa, Noctua pronuba
MITRAASRRARLPTPDSSLSSASPPPDPGSPVLPAAAVASSSSDEYFSPPTSPTPVRRQGRGRPPRSLGLRGHPAPSRVPATGGCVQRMRWTHPINENVMRAYYGSTEGGTNLTAYRVRMLSLFQVLEPTVNVSAQRLSDQVRVIQRNHMLDDAALDRLRSEVLSNPIVLTPSQTVVQASTIDITPPRSNPAVAEEDDRVATVSSQCNDRLRSALEDALREYRYTRTEFRPRLPRLPMHKKNRALVCALDSQLKNLFESSENLVDTHSILYCGAVAACRLANVKFTNSDTATRPKPAVPTWQCRIERRIDGARVLIGKLHCFREGNTRPRVMRFVRRAFSGTGISPQEYMSRVTERIDFLKQKVYAWANRIRRYKRRVDRYSQNRMFQSDERWVYRAWERPEQNMTDVCRPDDATTSSFWSSIWSVPVCHTEADWMRDVERMCEPIPEMEPILITPQDIARAVRPLPNWKSPGPDGLHNFWLKWLSSSHTCLASQFQSSLESGSLPQFLTTGVTHLLHKSGSPAEPKNYRPITCLSTVYKLLTSILRAKINTHIDKNSIMSASQNGCRNGSRGTKELLLIDMAISQQVRRSRKDLSTCWIDYKKAYDSVPHTWLMRVLELYKVDATLRAFLESCMGQWRTVLRYPGCRQIQGNNEPVWIKRGIFQGDSLSPLWFCLALNPLSTLLEDSGLGYRLRRGGQVISHLLYMDDLKLFAPNKLRLMELLKVTETFSSAIRMEFGVDKCAVMYVKRGEIMESEGIQLSDSIHLRSLSSSESYKYLGMSEALGINVTDMKQSLRERFFGRLKKVLNSLLSGGNKVRAFNGWVMPVLMYSFGILKWTQTELDALDRRVRTLLTANRMHHPRSSVMRLYIPRKCGGRGFLNAKTLHNREVCSLREYFLKAEVGMHRDVVAVDKGFTPLSMAKENWRKPVVLTTDDRKEVWQGKELHGRFYRALHGPDVDFLASVSWLRFGDLFGETEGFVCAIMDEVMLTNNYRKYIMKDGTVDVCRACHRPGESIRHIISGCSRLANGEYLHRHNQVARIIHQQLALKYKLVESEVPYYKYVPDPVLEKDHVTLYWDRSIITDRTIVANKPDIVVIDRSARRVMIVDVTIPHDENLVKAEKEKQIKYLDLAHEVVDMWNVNSAVIVPIVVTANGLMAKSFDDHLSKLSLGGWIKGLIQKAVLLDTARIVRRFLSLEP

SEQ ID NO: 29149 - protein, 1111 aa, Ochropleura plecta
MRWTSFINENVMRAYYGSTEGGTNLTAYRVRMLSLFQDLEPTINVSAQRLSDQVRVIQRNHLLDDAALDRLRSEVLSNRVILTTPQTAVQASAIDVTQPRSNPAVVEEDDRVATVSSQCNERLRSALEDALRDYRSTPTELRPRLPRLPMHKKNRALVCALDSQLKNLFESSENLVDTHSILYCGAVAVCRVANVKFQNSDVATRPKPSVPVWQCRIERRIDEARVLIGKLYCFREGNTRPRVMRFVRRAFSGTGISPQEYLSCTTERIDFLKQKVYAWANRIRRYKRRVDRYSQNRMFRSDERWVYRAWERPEQSVTDVCRPDDVATSSFWHSIWSVPVCHTEADWMRDVERVCETIPEMEPILITSIDIASAVRPLPNWKSPGPDGLHNFWLKWLSSSHTRLASQFQSCLESGSLPQFLTTGITHLLYKSGSPAEPKNYRPITCLSTVYKLLTSILRAKINSHIDKNSIMSASQNGCRNGSRGTKELLLIDMAISQQVRRSRKDLSTCWIDYKKAYDSVPHTWLKRVLELYKIDATLRAFLESCMGQWRTVLRYPGCRQIQGNDEPVWIKRGIFQGDSLSPLWFCLALNPLSTLLEDSGVGYRLRRGGKVISHLLYMDDLKLFAPNKLRLMELLKVTETFSNAIRMEFGVDKCAVMYVKRGEIMESEGIQLSDSIHLRSLSSSESYKYLGMSEALGINVADMKQLLRERFFGRLKKVLKSLLSGGNKVRAFNSWVMPVLMYSFGILKWTQTELDALDRRVRTLLTGNRMHHPRSSVMRLYIPRKCGGRGFLNAKTLHNREVCSLREYFLKTDVGMHRDVVAVDKGLTPLSMAKENWRKPVVLTTNDRKVVWQGKELHGRFYKALHGPDVDFLASVSWLRFGDLFGETEGFVCAIMDEVMLTNNYRKYIMKDGTVDVCRACHRPGESIRHIISGCSRLANSEYLHRHNQVARVIHQQLALKYNLVESEVPYYKYVPDPVLEKDHVTLYWDRSIITDRTIVANKPDIVVIDRSARRVMIIDVTIPHDENLVKAEKEKQLKYLDLAHEVVDMWNVNSAIIVPIVVTANGLIAKSLDEHLSKLSLGGWIKGLIQKAVLLDTARIVRRFLSLEP

SEQ ID NO: 29150 - protein, 1200 aa, Mythimna impura
MLTRAAARRARHPPPGSPLSSASPPPDLESPVSPAAAVASSSSDEYFSPPTSPTPVRRPGRGRPPRSLGSRGQPAPSRVPAAGGCVQRMRWTQSMNENVMRAYYGSTEGGTNLTAYRVRMLSLFQVLEPTVNVTTQRLSDQVRVIQRNHRLDNAALDRLRSEVLSNRIISTPIQTQTAAPRATDGILPQSNHVDDEADDRVVTVSSQCNDRLRSALEDALREYRSTPIDLRPRLPRLPMHKKNRALVCALDSLLENVFESSVNLADTHSILYCGAIAACRLANVKLPSCDGATRPKSVAPAWQCRIEKRIDGARALIGKLYCFREGNTRPRVMRYVRRAFSGTGISPPEYLSRVTERIDFLKQKVCAWANRIRRYKRRVDRYSQNRMFQSDERWVYRAWERPEQNVTDVTRPDAVATNAFWRNIWSVPVCHTEDGWMREVEHVCEAIPEMEKVIISPTDVARAVRPLPNWKSPGPDGLQNFWLKWYSSSHALLASQFQSSLESGSLPQFLTTGVTHLLHKTGSTAEPKNYRPITCLSTVYKLLTSILRTKINQHIDNNSIMSASQNGCRNGSRGTKELLLIDMTISQQVRRSRKDLSTCWIDYKKAYDSVPHTWLMRVLELYKIDATLRTFLESCMGQWNTVLRYPGCRSIRRDDEPIWIKRGIFQGDSLSPLWFCLALNPLSTLLEESGLGYRLRRDGQVLSHLLYMDDLKLIAPNKLRLMELLKVTETFSSAIRMEFGVDKCAVMHVKRGEIMESEGIQLSDSIHLRSLSSTETYKYLGMSEALGINVADMKQSLKERFFGRLKKVLNSLLSGGNKVRAFNGWVMPVLMYSFGILKWTQTELDALDRRVRTLLTANRMHHPRSSVMRLYIPRKCGGRGFLNTKTLHNREVCSLREYFHKTDVGMHRDVVAVDKGLTPLSMAKENWRKPVVLTTDDRKEVWKSKELHGRFYRALHESDVDFAASVAWLRFSNLFGETEGFICAIMDEVILTNNYRRYIMKDGTVDVCRACHRPGESIRHIISGCSRLANGEYLHRHNQVARIIHQQLALKYNLVYSEVPYYRYVPDPVLENDHVTLYWDRSIITDRTIVANKPDIVVIDRLARRAMIVDVTIPHDENLVKAEKEKQIKYLDLAHEVVDMWNVDSAVIVPIVVTANGLIAKSFDDHLSKLSLRGWIKGLIQKAVLLDTARIVRRFLSLEP

SEQ ID NO: 29151 - protein, 1200 aa, Mythimna impura
MLTRTAARRARHPPPGSPLSSASPPPVLGSPMSPAAAVASSSSDEYFSPPTSPTPVRRPGRGRPPKSLGPRGQPAPSRVPAASGCVQRMRWTQSMNENVMRAYYGSTEGGTNLTAYRVRMLSLFQELEPTVNVTTQRLSDQVRVIQRNHRLDDAALDRLRSEVLSNRIISTPIQTQAAALRATDATLPQSNHVDDEADDRVVTVSSQCNDRLRSALEDALREYRSTPIALRPRLPRLPMHKKNRALVCALDSLLENVFESSVNLADTHSILYCGAIAACRLANVKLPSCDGATRPKPAAPAWQYRIERRIDGARALIGKLYCFREGNTRPRVMRYVRRAFSGTGISPREYLSRVTERIDFLKQKVCAWANRIRRYKRRVDRYSQNRMFQSDERWVYRAWERPEQNVTDVTRPDAVATNTFWRNIWSVPVCHTEDGWMREVERVCEAIPEMEKVVISPTDVATAVRPLPNWKSPGPDGLQNFWLKWYSSSHALLASQFQSSLESGSLPQFLTTGVTHLLHKTGSTAEPKNYRPITCLSTVYKLLTSILRTKINKHIETNSIMSASQNGCRNGSRGTKELLLIDMAISQQVRRSRKDLSTCWIDYKKAYDSVPHTWLMRVLELYKIDATLRTFLESCMGQWNTVLRYPGCRSIRRDDEPIWIKRGIFQGDSLSPLWFCLALNPLSTLLEESGLGYRLRRGGQVLSHLLYMDDLKLIAPNKLRLMELLKVTETFSSAIRMEFGVDKCAVMHVKRGEIMESEGIQLSDSIYLKSLSSTETYKYLGMSEALGINVADMKQSLKERFFDRLKKVLNSLLSGGNKVRAFNGWVMPVLMYSFGILKWTQTELDALDRRVRTLLTANRMHHPRSSVMRLYIPRKCGGRGFLNAKTLHNREVCSLREYFHKTDVGMHRDVVAVDKGLTPLSMAKENWRKPVVLTTDDRREVWKSKELHGRFYRALHESDVDFAASVAWLRFSNLFGETEGFICAIMDEVILTNNYRRYIMKDGTVDVCRACHRPGESIRHIISGCSRLANGEYLHRHNQVARIIHQQLALKYNLVYSEVPYYSYVPDPVLENDHVTLYWDRSIITDRTIVANKPDIVVIDRLARRVMIVDVTIPHDENLVKAEKEKQIKYLDLAHEVVDMWNVDSAIIVPIVVTANGLMAKSLDDHLSKLSLRGWIKGLIQKAVLLDTARIVRRFLSLQP

SEQ ID NO: 29152 - protein, 1199 aa, Xestia xanthographa
MITRAAARRAHLPTPDSSLSSASPPPDPGSPVSPVAAVASSSSDEYFSPPTSPPPVRRAGRGRPPKSLGLRGQQTPNRVPATGGCVQRMKWTQSMNENVMRAYYGSTEGGTNLTAYRVRMLSLFQGLEPTVNVSAQRLSDQVRVIQRSHRLDDAALDRLRSEVLSNLIVLTPTQTAVQVSAIDATPPRLNPVVVEEDDGVATVSSQCNDRLRSALENALHEYRSTPTELRPRLPRLPMHKKNRALVCALDSQLKNIFECSENLVDTHSILFCGAVAACRLANVKFPNCDVANRPKPAVPAWQRRIERRIDGARVLIGKLYCFREGNTRPRVMRFVRRAFSGTEISPQEYMSRVTERIDFLKQKVYAWANRIRRYKRRVDRYSQNRMFQSDERWVYRAWERPEQNMTDVCRPDDAATSSFWRSIWSVPVCHTEADWMRDVERVCEPIPEMEPIFITPLDVARTVRPLPNWKSPGPDGLHNFWLKWFSSSHTCLASQFQSSLESGSLPQFLTTGVTHLLHKSGSPAEPKNYRPITCLSTIYKLLTSILRVKMNTHIDKNSIMSASQNGCRNGSRGTKELLLIDMAISQQVRRSRKDLSTCWIDYKKAYDSVPHTWLMRVLELYKIDTTLRTFLESCMGQWRTVLRYPGCRQIQGSDDPVWIKRGIFQGDSLSPLWFCLALNPLSTLLENSGLGCRLRKDGQVISHLLYMDDLKLFASNKLRLMELLKVTETFSNAIRMEFGVDKCAVMYVKRGEIMESEGLQLSDSIQLRSLSSSETYKYLGMSEALGINITDMKQSLKERFFSRLRKVLNSLLSGGNKVRAFNGWVMPVLMYSFGILKWTQTELDALDRRVRTLLTESRMHHPRSSVMRLYIPRKCGGRGFLNAKTLHNREMCSLREYFLKAEVGMHRDVVAVDKGLTPLSMAKENWHKPEVLTTDDRKEVWQGKELHGRFYRALHGPDVDFLASVSWLRFGDLFGETEGFVCAIMDEVMLTNNYRKYIMKDGTVDMCRACHLPGESIRHIISGCSRLANGEYLHRHNQVARIIHQQLALKYKLVESEVPYYKYVPDPVLESDHVTLYWDRSIITDRTIVANKPDIVMIDRSARRVMIIDVTIPHDENLVKAEKEKQIKYLDLAHEVRDMWNMNSVIIVPIVVTANGLIAKSFDDHLSKLSLGGWIKGLIQKAVLLDTARIVRRFLSLQP

SEQ ID NO: 29153 - protein, 1201 aa, Xestia xanthographa
MMLTRAAAARRARLPTPDSSLSSASPPPDPGSPVSPVAAVASSSSDEYFSPPTSPPPVRRAGRGRPPKGLGLRGQQAPSRVPATGGCVQRMKWTQAMNENVMRAYYGSTEGGTNLTAYRARMLSLFQDLEPTVNVSAQRLSDQVRVIQRNHRLDDAALDRLRSEELSNLIILTPTQTAVQVSAINITLPRSNPAVVEEDDRVATVSSQCNDRLRSALEDALREYRSTPTELRPRLPRLPMHKKNRALVCALDSQLKNILKSSEDLVDTHSILFCGAVAACRLAHVKFPNCDVATRPKPAVPAWQCRIERRIDEARVLIGKLYCFREGNTRPRVMRFVRRAFSGTEISPQEYMSRVTERIDFLKQKVYAWANRIRRSKRRVDRYSQNRMFQSDERWVYRAWERSEQNMTNVCHPDDVATSSFWRSIWSVPVCHTEADWMRDVERVCEPIPEMEPIFITPLDVARAVRPLPNWKSPGPDGLHNFWLKWFSSSHTCLASQFQSSLESGSLPQFLTTGVTHLLHKSGSPAEPKNYRPITCLSTIYKLLTSILRVKINTHIDKNSIMSASQNGCRNGSRGTKELLLIDMAISQQVRRSRKDLSTCWIDYKKAYDSVPHTWLMRVLELYKIDTTLRTFLESCMGQWRTVLRYPGCRQIQGSDEPVWIKRGIFQGDSLSPLWFCLALNPLSTLLENLGLGCRLRKDGQVISHLLYMDDLKLFAPNKLRLMELLKVTETFSSAIRMEFGVDKCAVMYVKRGEIMESEGLQLSDPIHLRSLSSSETYKYLGMSEALGINITDMKQSLKERFFGRLRKVLNSLLSGGNKVRAFNGWVMPVLMYSFGILKWTQTELDALDRRVRTLLTESRMHHPRSSVMRLYIPRKCGGRGFLNAKTLHNREVCSLREYFLKAEVGMHRDVVAVDKGLTPLSMAKENWHKPEVLTTDDRKEVWQGKELHGRFYRALHGPDVDFLASVSWLRFGDLFGETEGFVCAIMDEVMLTNNYRKYIMKDGTVDVCRACHLPGESIRHIISGCSRLANGEYLHRHNQVARIIHQQLALKYKLVESEVPYYKYVPDPVLEKDHVTLYWDRSIITDRTIVANKPDIVMIDRSARRVMIIDVTIPHDENLVKAEKEKQIKYLDLAHEVRDMWNMNSVIIVPIVVTANGLIAKSFDDHLSKLSLGGWIKGLIQKAVLLDTARIVRRFLSLQP

SEQ ID NO: 29154 - protein, 1202 aa, Cosmia trapezina
MLTRSAARACPPPPDSSLSSASPPPVSSPTVSAVTTPAAVVASSSSDEYFSPPTSPIPVRRQGRGRPPKSLGLGGQPAPSRVPAAGGCVQRMRWTQSMNENVMRAYYGSTEGGTNLTAYRVRMLSLFQELEPTVNVSAQRLSDQVRVIQRNHRLDDAALDRLRSEILSDRIVSTQAQTAVQDSIIDALPPRCNHVVEEEDDRVATVSSQSNDRLRSALEDAFREYRSTPTELRPRLPRLPMHKKNRALVCALDSHLKDFFECSEDLVDTHSILYCAAVAACRLANVKFPNCDGANRSKPAVPAWQCRIERRIDGTRVLIGKLYCFREGNTRPRVMRFVRRAFSGTGISPPEYMSRVTERIDFLKQKVCAWASRIRRYKRRVDRYTQNRMFQSDERWVYRAWERPEQNVTDVCRPDDAATSAFWRSIWSVPVCHAEAGWMQDVERVCETIPEMETVLITPLDVARAVRPFPNWKSPGPDGLHNFWLKWLISSHTCLASQFQSSLESGSLPQFLTTGVTHLLHKSGSPVEPKNYRPITCLSTVYKLLTSILRAKINTHIASNSIISASQNGCRTGSRGTKELLLIDMAISQQVRRSRKDLSTCWIDYKKAYDSVPHTWLLKVLELYKIDATLRTFLESCMGQWRTVLRYPGCRQIRGNDEPVWIKRGIFQGDSLSPLWFCLALNPLSTLLEDSGLGYRLRRGGQVISHLLYMDDLKLFAPNELRLMELLKVTETFSGAIRMEFGVDKCAVMHVKRGEIMESEGIQLTDSIYLRSLSSSETYKYLGMSEALGINVAGVKQSLKERFFGRLKKVLISLLSGGNKVRAFNGWVMPVLMYSFGILKWTQTELDALDRRVRTLLTANRMHHPRSSVMRLYIPRKCGGRGFLNAKTLHNREVCSLREYFLKADVGMHRDVVAVDKGLTPLSMAKENWRKPVLLTTDDRRKVWQSKELHGRFYRALHEPGVDFLASVSWLRFSDLFGETEGFVCAIMDEVILTNNYRRYIMKDGTVDVCRACHRPGESIRHIISGCSRLANGEYLHRHNQVARIIHQQLALKYKLVDSEVPYYKYVPDPVLENDHVTLYWDRSIITDRTIVANKPDIVVIDRLARRAMIVDVTIPHDGNLVKAEKEKEIKYLDLAHEVVDMWNVDSAVIVPIVVTANGLIADSLDQHLSRLSLGGWIKGQIQKAVLLDTARIVRRFLSLQP

SEQ ID NO: 29155 - protein, 1199 aa, Mamestra brassicae
MITRAAARRAHPPPPGSSLSSASPTPDIGSQVSPVVAVASSSSDEYFSPPTSPTPVRRQGRGRPPRSLGSRGQPALSRVPAAGGCVQRMRWTQSMNENVMRAYYGSTEGGTNLTAYRVRMLSLFQDLEPTVNVSAQRLSDQVRVIQHNCRLDDAALERLRSEVLSNLIISTPTQTVVQAPASGAITPRPNNGSDEVDDRVVTVSSQCNDRLRSALEDALREYRLTPTELRPRLPRLPMHKKNRALVCALDSLLQNIFESSESLVDTHSILFCGAVAACRIANVKFPSCDEAIRPKPAAPAWQCRIERRIDEARALIGKLYCFREGNTRPRVMRFVRRAFSGTGISSREYTFRVTERIDFLKQKVCAWANRIRRYKRRVDRYSQNRMFQSDERWVYRDWERPEQSVTDVYRPDDVATSTFWRSIWSVPICHAEGGWMRDVERVCEAIPQMEKITITTLDIAKAVRPLPNWKSPGPDGLHNFWLKWYSSSHALLASQFQSSLESGSLPQFLTTGITHLLHKTGSPAEPKNYRPITCLSTVYKLLTSILRAKINEHIESNSIMSASQNGCRKGSRGTKELLLIDMAISQQVRRSRKDLSTCWIDYKKAYDSVPHTWLMKVLELYKIDTTLRTFLESCMRQWKTILRYPGCQPIQGSDEPVWIKRGIFQGDSLSPLWFCLALNPLSTLLEDSGLGYRLRRGGQAISHLLYMDDLKLFAPNNLRLMELLKVTETFSSAIRMEFGVDKCAVMHVKKGEIMESEGIQLSDSIQVRSLSSTESYKYLGMSEALGINGTDMKQSLRERFFGRLKKVLNSLLSGGNKVRAFNGWVMPVLMYTFGILKWTQTELDALDRRVRTLLTANRMHHPRSSVMRLYIPRKCGGRGFLNAKTLHNREMCSLREYFLKADVGMHRDVVAVDKGLTPLSMAKENWRKPVILTTDDRKEVWKGKELHGRFYRALYGSDVDFSASVAWLRFGDLFGEIEGFVCAIMDEVILTNNYRKHIMKDGTVDVCRACHRPGESIRHIISGCSRLANGEYLHRHNQVARIIHQQLALKYKLVDSEVPYYKYVPDPVLENDHVTLYWDRSIITDRTIVANKPDIVVIDRLARRTMIIDVTIPHDENLVKAEKEKQIKYLDLAHEVVDMWNVDSAVIVPIVITANGLMAKSFDDHLSKLALRGWIKGLIQKAVLLDTARIVRRFLSLQP

SEQ ID NO: 29156 - protein, 1202 aa, Noctua fimbriata
MITRAAYRRARLPPPDPSLSSASPPPESSPIVSAVTPAVAVASSSSDEYFSPPTSPTTVRRQGRGRPPRSLGLRGHPAPSRVPAAGGCVQRMRWTHSINENVMRAYYGSTEGGTNLTAYRVGMLSLFQVLEPTVNVSAQRLSDQVRVIQRNHMLDDAVLDRLRSEVLSNRIVLTPAQTAVQASVIDATPPRFNPAVEEEDDRVAVVSSQCNDRLRSALEDALREYRSTPTELRPRLPRLPMHNKNRALVCALDSQLENIFESSENLVDTHSILYCGAVAACRLANVKFSNCDVATRPKPAVPAWQRRIERRIDGARVLIGKLHCFREGNTRPRVMRFVRRAFSGTGISPQEYMSRVTERIDFLKQKVYAWANRIRRYKRRVDRYSQNRMFQSDERWVYRAWERPELNMTDVCRPDDAATSSFWRSIWSVPVCHTEADWMRDVERVCEPIPEMEPILITPLDIARAVRPLPNWKSPGPDGLHNFWLKWLSSSHTCLASQFQSSLESGSLPQFITTGVTHLLHKSGSPAEPKNYRPITCLSTVYKLLTSILRAKINTHIDKNSIMSASQNGCRNGSRGTKELLLIDMAISQQVRRSRKDLSTCWIDYKKAYDSVPHTWLMRVLELYKIDATLSAFLESCMGQWRTVLRYPGCRQIQGNDEPVWIKRGIFQGDSLSPLWFCLALNPLSTLLEDSGLGYRLRRGGQVISHLLYMDDLKLFAPNKLQLMELLKVTETFSSAIRMEFGVDKCAVMYVKRGEIMESEGIQLSDFIHLRSLSSSESYKYLGMSEALGINVTDMKQSLKERFFGRLNKVLHSLLSGGNKVRAFNGWVMPVLMYSFGVLKWTQTELDALDRRVRTLLTANRMHHPRSSVMRLYIPRKCGGRGFLNAKSLHNREMCSLREYFLKVEVGMHRDVVAVDKGLTPLSMAKENWRKPEVLTTDDRKEVWQGKELHGRFYRALHGPDVDFLASVSWLRFGDLFGETEGFVCAIMDEVMLTNNYRKYIMKDGTVDVCRACHRPGESIRHIISGCSRLANGEYLHRHNQVARIIHQQLALKYKLVESEVPYYKYVPDPVLEKNHVTLYWDQSIITDRTIVANKPDIVVIDRSARRVMIVDVTIPHDENLVKAEKEKQIKYLDLAHEVVDMWHVNSAIIVPIVVTANGLIAKSLDDHLSKLSLGGWIKGLIQKAVLLDTARIVRRFLSLEP

SEQ ID NO: 29157 - protein, 1111 aa, Noctua fimbriata
MRWTHSINENVMRAYYGSTEGGTNLTAYRVGMLSLFQVLEPTVNVSAQRLSDQVRVIQRNHMLDDAVLDRLRSEVLSNRIVLTPAQTAVQASVIDATPPRFNPAVVEEDDRVAVVSSQCNDRLRSALEDALREYRSTPTELRPRLPRLPMHNKNRALVCALDSQLENIFESSENLVDTHSILYCGAVAACRLANVKFPNCDVATRPKPAVPAWQRRIEHRIDGARVLIGKLHCFREGNTRPRVMRFVRRAFSGTGISPQEYMSRATEHIDFLKQKVYAWANRIRRYKRRVDRYSQNRMFQSDERWVYRAWERPELNMTDVCRPDDAATSSFWRSIWSVPVCHTEADWMCDVERVCEPIPEMEPILITPLDIARAVRPLPNWKSPGPDGLHNFWLKWLSSSHTCLASQFQSSLESGSLPQFLTTGVTHLLHKSGSPAEPKNYRPITCLSTVYKLLTSILRAKINTHIDKNSIMSASQNGCRNGSRGTKELLLIDMAISQQVRRSRKDLSTCWIDYKKAYDSVPHTWLMRVLELYKIDATLRAFLESCMGQWRTVLRYPGCRQIQGNDEPVWIKRGIFQGDSLSPLWFCLALNPLSTLLEDSGLGYRLRRGGQVISHLLYMDDLKLFAPNELRLMELLKVTETFSSVIRMEFGVDKCAVMYVKQGEIMESEGIQLSDSIHLRTLSSTESYKYLGMSEALGINVTDMKQSLKERFFGRLNKVLHSLLSGGNKVRAFNGWVMPVLMYSFGVLKWTQTELDALDRRVRTLLTANRMHHPRSSVMRLYIPRKCGGRGFLNAKSLHNREMCSLREYFLKVEVGMHRDVVAVDKGLTPLSMAKENWRKPEVLTTDDRKEVWQGKELHGRFYRVLHGPDVDFLASVSWLRFGDLFGETEGFVCAIMDEVMLTNNYRKYIMKDGTVDVCRACHRPGESIRHIISGCSRLANGEYLHRHNQVARIIHQQLALKYKLVESEVPYYKYVPDPVLEKDHVTLYWDQSIITDRTIVANKPDIVVIDRSARRVMIVDVTIPHDENLVKAEKEKQIKYLDLAHEVVDMWNVNSAIIVPIVVTANGLIAKSLDDHLSRLSLGGWIKGLIQKAVLLDTARIVRRFLSLEP

SEQ ID NO: 29158 - protein, 1202 aa, Noctua fimbriata
MITRAAYRRARLSPPDPSLSSASPPLESSPIVSAVTPAVAVVSSLSDEYFSPPTSPTPVRRQGRGRPPRSLGLRGHPAPSRVPAAGGCVQRMRWTHSINENVMRAYYGSTEGGTNLTAYRVGMLSLFQVLEPTVNVSAQRLSDQVRVIQRNHMLDDAVLDRLRSEVLSNRIVLTPAQTAVQASVIDATPPRFNPAVVEEDDRVAVVSSQCNDRLRSALEDAFREYRSTPTELRPRLPRLPMHNKNRALVCALDSQLENIFESSENLVDTHSILYCGAVAACRLANVKFPNCDVVTRPKPAVPAWQRRIERRIDGARVLIGKLHCFREGNTRPRVMRFVRRAFSGTGISPQEYMSRVTERIDFLKQKVYAWANRIRRYKRRVDRYSQNRMFQSDERWVYRAWERPDLNMTDVCRPDDAATSSFWRSIWSVPVCHTEADWMRDVERVCEPIPEMEPILITRLDIARAVRPLPNWKSPGPDGLHNFWLKWLSSSHTCLASQFQSSLESGSLPQFLTTGVTHLLHKSGSPAEPKNYRPITCLSTVYKLLTSILRAKINTHIDKNSIMSASQNGCRNGSRGTKELLLIDMAISQQVRRSRKDLSTCWIDYKKAYDSVPHTWLMRVLELYKIDATLRAFLESCMGQWRTVLRYPGCRQIQGNDEPVWIKRGIFQGDSLSPLWFCLALNPLSTLLEDSGLGYRLRRGGQVISHLLYMDDLKLFAPNKLRLMELLKVTETFGSAIRMEFGVDKCAVMYVKQGEIMESEGIQLSDSIHLRTLSSTESYKYLGMSEALGINVTDMKQSLKERFFGRLNKVLHSLLSGGNKVRAFNGWVMPVLMYSFGVLKWTQTELDALDRRVRTLLTANRMHHPRSSVMRLYIPRKCGGRGFLNAKSLHNREMCSLREYFLKVEVGMHRDVVAVDKGLTPLSMAKENWRKPEVLTTDDRKEVWQGKELHGRFYRALHRPDVDFLASVSWLRFGDLFGETEGFVCAIMDEVMLTNNYRKYIMKDGTVDVCRACHRPGESIRHIISGCSRLANGEYLHRHNQVARIIHQQLALKYKLVESEVPYYKYVPDPVLEKDHVTLYWDQSIITDRTIVANKPDIVVIDRSARRVMIVDVTIPHDENLVKAEKEKQIKYLDLAHEVVDMWNVNSAIIVPIVVTANGLIAKSLDDHLSKLSLGGWIKGLIQKAVLLDTARIVRRFLSLEP

SEQ ID NO: 29159 - protein, 1202 aa, Noctua fimbriata
MITRAAYRRARLPPPDPSLSSASPPPESSHIVSAVTPAVAVASSSSDEYFSPPTSPTPVRRQGRGRPPRSLGLRGHPAPSRVPAAGGCVQRMRWTHSINENVMRAYYGSTEGGTNLTAYRVGMLSLFQVLEPTISVSAQRLSDQVRVIQRNHMLDDAVLDRLRSEVLSNRIVFTPAQTAVQASVIDATPPRFNPAVVEEDDRVAVVSSQCNDRLRSALEDALREYRSTPTELRPRLPRLPMHNKNRALVCALDSQLKNLFESSENLVDTHSILYCGAVAACRLANVKFPNCDVATRPKPAVPAWQRRIERRIDGARVLIGKLHCFREGNTRPRVMRFVRRAFSGTGISPQEYMSRVTERIDFLKQKVYAWANRIRRYKRRVDRYSQNRMFQSDERWVYRAWERPDQNMTDVCRPDDAATSSFWRSIWSVPVCHTEADWMRDVEQVCEPIPEMEPILITPLDVARAVRPLPNWKSPGPDGLHNFWLKWLSSSHTCLASQFQSSLESGSLPQFLTTGVTHLLHKSGSPAEPKNYRPITCLSTVYKLLTSILRAKINTHIDKNSIMSASQNGCRNGSRGTKELLLIDMAISQQVRRSRKDLSTCWIDYKKAYDSVPHTWLMRVLELYKIDATLRAFLESCMGQWRTVLRYPGCRQIQGNDEPVWIKRGIFQGDSLSPLWFCLALNPLSTLLEDSGLGYRLRRGGQVISHLLYMDDLKLFAPNKLRLMELLKVTETFSSAIRMEFGVDKCAVMYVKQGEIMESEGIQLSDSIHLRTLSSTESYKYLGMSEALGINVTDMKQSLKERFFGRLNKVLHSLLSGGNKVRAFNGWVMPVLMYSFGVLKWTQTELDALDRRVRTLLTANRMHHPRSSVMRLYIPRKCGGRGFLNAKSLHNREMCSLREYFLKVDLGMHRDVVAVDKGLTPLSMAKENWRKPEVLTTDDRKEVWQGKELHGRFYRALHGPDVDFLASVSWLRFGDLFGETEGFVCAIMDEVMLTNNYRKYIMKDGTVDVCRACHRPGESIRHIISGCSRLANGEYLHRHNQVARIIHQQLALKYKLVESEVPYYKYVPDPVLEKDHVTLYWDQSIITDRTIVANKPDIVVIDRSARRVMIVDVTIPHDENLVKAEKEKQIKYLDLAHEVVDMWNVNSAIIVPIVVTANGLIAKSLDDHLSKLSLGGWIKGLIQKAVLLDTARIVRRFLSLEP

SEQ ID NO: 29160 - protein, 962 aa, Noctua fimbriata
MHNKNRALVCALDSQLENIFESSENLVDTHSILYCGAVAACRLANVKFPNCDVATRPKPAVPAWQRRIERRIDGARVLIGKLHCFREGNTRPRVMRFVRRAFSGTGISPQEYMSRVTERIDFLKQKVYAWANRIRRYKRRVDRYSQNRMFQSDERWVYRAWERPELNMTDVCRPDDAATSSFWRSIWSVPVCHTEADWMRDVERVCEPIPEMEPILITRLDIARAVRPLPNWKSPGPDGLHNFWLKWLSSSHTCLASQFQSSLESGSLPQFLTTGVTHLLHKSGSPAEPKNYRPITCLSTVYKLLTTILRAKINTHIDKNSIMSASQNGCRNGSRGTKELLLIDMAISQQVRRSRKDLSTCWIDYKKAYDSVPHTWLMRVLELYKIDATLRAFLESCMGQWRTVLRYPGCGQIQGNDEPVWIKRGIFQGDSLSPLWFCLALNPLSTLLEDSGLGYRLRRGGQVISHLLYMDDLKLFAPNKLQLMELLKVTETFSSAIRMEFGVDKCAVMYVKQGEIMESEGIQLSDSIHLRTLSSTESYKYLGMSEALGINVTDMKQSLKERFFGRLNKVLHSLLSGGNKVRAFNGWVMPVLMYSFGVLKWTQTELDALDRRVRTLLTANRMHHPRSSVMRLDIPRKCGGRGFLNAKSLHNREMCSLREYFLKVEVGMHRDVVAVDKGLTPLSMAKENWRKPEVLTTDDRKEVWQGKELHGRFYRALHGPDVDFLASVSWLRFGDLFGETEGFVCAIMDEVMLTNNYRKYIMKDGTVDVCRACHRPGESIRHIISGCSRLANGEYLHRHNQVARIIHQQLALKYKLVESEVPYYKYVPDPVLEKDHVTLYWDQSIITDRTIVANKPDIVVIDRSARRVMIVDVTIPHDENLVKAEKEKQIKYLDLAHEVVDMWNVNSAIIVPIVVTANGLIAKSLDDHLSKLSLGGWIKGLIQKAVLLDTARIVRRFLSLEP

SEQ ID NO: 29161 - protein, 962 aa, Noctua fimbriata
MHNKNRALVCALDSQLKNIFESSENLVDTHSILYCGAVAACRLANVKFPNCDVATRPKPAVPAWQCRIERRIDGARVLIGKLHCFREGNTRPRVMRFVRRAFSGTGISPQEYMSRVTERIDFLKQKVYAWANRIRRYKRRVDRYSQNRMFQSDERWVYRAWERPELNMTDVCRPDDAATSSFWRSIWSVPVCHTEADWMCDVERVCEPIPEMEPILITPLDIARAVRPLPNWKSPGPDGLHNCWLKWLSSSHTCLASQFQSSLESGSLPQFLTTGVTHLLHKSGSPAEPKNYRPITCLSTVYKLLTSILRAKINTHIDKNSIMSASQNGCRNGSRGTKELLLIDMAISQQVRRSRKDLSTCWIDYKKAYDSVPHTWLMRVLELYKIDATLRAFLESCMGQWRTVLRYPGCRQIQGNDEPVWIKRGIFQGDSLSPLWFCLALNPLSTLLEDSGLGYRLRRGGQVISHLLYMDDLKLFAPNKLRLMELLKVTESFSSAIRMEFGVDKCAVMYVKQGEIMESEGIQLSDSIHLRTLSSTESYKYLGMSEALGINVTDMKQSLKERFFGRLNKVLHSLLSGGNKVRAFNGWVMPVLMYSFGVLKWTQTELDALDRRVRTLLTANRMHHPRSSVTRLYIPRKCGGRGFLNAKSLHNREMCSLREYFLKVEVGMHRDVVAVDKGLTPLSMAKENWRKPEVLTTDDRKEVWQGKELHGRFYRALHGPDVDFLASVSWLRFGDLFGETEGFVCAIMDEVMLTNNYRKYIMKDGTVDVCRACHRPGESIRHIISGCSRLANGEYLHRHNQVARIIHQQLALKYKLVESEVPYYKYVPDPVLEKDHGTLYWDQSIITDRTIVANKPDIVVIDRSARRVMIVDVTIPHDENLVKAEKEKQIKYLDLAHEVVDMWNVNSAIIVPIVVTANGLIAKSLVDHLSKLSLGGWIKGLIQKAVLLDTARIVRRFLSLEP

SEQ ID NO: 29162 - protein, 1203 aa, Atethmia centrago
MLTRAASKRARPPPPDSSLSSASPPPVSSPTVSAVITPAAVVASSSSDEYFSPPTSPTPVRRQGRDRPPKSLGLRGHPAPSRVPAAAGCVQRMRWTQSMNENVMRAYYGSTEGGTNLTAYRVRMLSLFQELEPTVNVSAQRLSDQVRVIQRNRRLDDATLDRLRSEVLSNYIISTPAQTAVHTPIIDVIPPRSNHGVEEEDDRAATVSSQCNVRLRSALEDAFREYRSTPTELRPRLPRLPMHKKNRALMCALDSQLKVFFESSEDLVDTHSILYCAAVAACRLANVKFPNSDGATRPKPAVPAWQCRIERRIDKARVLIGKLYCFREGNTRPRVMRFVRRAFSGTGISPREYMSHITERIDFLKQKVCAWASRIRRYKRRVDRYTQNRMFQSDERWVYRAWERPKQNVTDVCRPDDATTTAFWRSIWSVPVCHVEADWMRDVERVCETIPEMEVVIITPSDIARAVRPLPNWKSPGPDGLHNFWLKWLTSSHTCLASQFQSSLESGSLPQFMTTGITHLLHKSGSPVEPKNYRPITCLSTVYKLLTSILRAKINTHIDSNSIMSASQNGCRNGSRGTKELLLIDMAISQQVRRSRKDLSTCWIDYKKAYDSVPHTWLMRVLELYKIDTTLRTFLESCMGQWRTVLRYPGCRQIQGNDEPVWIKRGIFQGDSLSPLWFCLALNPLSMQLEDSGLGYRLRRGGQIISHLLYMDDLKIFAPNKLQLMKLLKVTETFSSAIRMEFGVDKCALMHVKRGEIMESEGIQLSDSIHLRSLSSPESYKYLGMSEALGINVTDMKQSLKERFFGRLKKVLISLLSGGNKVRAFNSWVMPVLTYSFGILKWTQTELDALDRRVRTLLTANRMHHPRSSVMRLYIPRKCGGRGFLNAKTLHNREICSLREYFLKTEVGMHRDVVAVDKGLTPLSMAKENWCKPVVLTTDDRKEIWQSKELHGRFYRALHEPDADFLASVSWLRFGDLFGETEGFVCAIMDEVILTNNYRRHIMKDGTVDVCRACHRPGESIRHIISGCSRLANGEYLHRHNQVARIIHQQLALKYKLVKSEVPYYKYVPDPVLENDHVTLYWDRSIITDRTIVANKPDIVVIDRLARRAMIVDVTIPHDDNLVKAEKEKQIKYLDLAHEVVDMWNVNSAVIVPIVVTANGLMARSLNHHLSRLALDGWIKGLIQKAVLLDTARIVRRFLSLEP

SEQ ID NO: 29163 - protein, 868 aa, Atethmia centrago
MRFVRRAFSGTGISPREYMSRVTERIDFLKQKVCAWASRIRRYKRRVDRYTQNRMFQSDERWVYRAWERPEQNETDVCRPDDATTTAFWCSIWSVPVCHAEADWMRDVERVCETIPEMEVVIITPSDIARAVRPLPNWKSPGPDGLHNFWLKWLTSSHTCLASQFQSSLESGSLPQFLTTGITHLLHKSGSPAEPKNYRPITCLSTVYKLLTSILRAKINTHIDSNSIMSASQNGCRNGSRGTKELLLIDMAISQQVRRFRKDLSTCWIDYKMAYDSVPHTWLMRVLEFYKIDTTLRTFLESCMGQWRTVLRYPGCRQIQGNDEPVWIKRGIFQGDSLSPLWFCLALNPLSTLLEDSGLGYRLRRGGQVISHLLYMDDLKIFAPNKLQLMELLKVTETFSSAIRMEFGVDKCAVMHLKRGEIMESEEIQLSDSIHLRSLSSPESYKYLGMSEALGINVTDMKQSLKERFFGHLKKVLISPLSGGNKVRAFNGWVMPVLMYSFGILKWTQTELDALDRRVRTLLTANRMHHPRSSVMRLYIPRKCGGRGFLNAKTLHNREICSLREYFLKTEVGMHRDVIAVDKGLTPLSMAKGNWCKSVILTTDDRKEIWQNKKLHGRFYRALHEPDVDFLASVSWLHFGDLFGETEGFVCAIMDEVILTNNYRRHIMKDGTVDVCRACHRPGESIRHIISGCSRLANGEYLHRHNQVARIIHQQLALKYKLVNSEVPYYKYAPDPVLENDHVTLYWDRSIITDRTIVANKPDIVVIDRLARRAMIVDVTIPHDENLVKAEKEKQIKYLDLAHEVVDMWNVDSAVIVPIVVTANGLMAESLNHHLSRLSLGGWIKGLIQKAVLLDTARIVRRFLSLES

SEQ ID NO: 29164 - protein, 1136 aa, Atethmia centrago
MAIYDFFIFFIFPPCSVYYIIIIIIIMRWTQSMNENVMRAYYGSTEGGTNLTAYRVRMLSLFQKLEPTVNVSAQRLSDQVRVIQRNHRLDDAALDRLRSEVLSNHIVSTPAQTATHAPIINAIPPRSNHDVEDEDDRVATVSSQCNVDLRSTLEDAFREYRSTPTELRPRLPRLPMHKKNRALVCTLDSLLKDFFESSEDLVDTHSILYCAAVAACRLVNVKFPNCDGATRPKPAVPAWQCRIERRIDGARVLIGKLYCFREGNTRPRVMRFVRRAFSGTGISPREYMSRVTERIDFLKQKVCAWASRIRRYKRRVDRYTQNRMIQSDERWVGAWERPEQNETDVCRPDDATTTAFWRSIWSVPVCHAEADWMRDVERVCETIPEMEVVIITPSDIARAVLPLPNWKSPGPDGLHNFWLKWLTSSHTCLASQFQSSLESGSLPQFLTTGITHLLHKSGSPAEPKNYRPITCLSTVYKLLTSILRAKINTHIDSNSIMSASQNGCRNGSRGTKELLLIDMAISQQVRRFRKDLSTCWIDYKKAYDSVPHTWLMRVLEFYKIDTTLRTFLESCMGQWRTVLRYPGCRQIQGNDEPVWIKRGIFQGDSLSPLWFCLALNPLSTLLEDSGLGYRLRRGGQVISHLLYMDDLKIFAPNKLQLMELLKVTETFSSAIRMEFGVDKCAVMHVKRGEIMESEGIQLSDSIHLRSLSSPESYKYLGMSEALGINVTDMKQSLKERFFGHLKKVLISPLSGGNKVRAFNGWVMPVLMYSFGILKWTQTELDALDRRVRTLLTAIRMHHPRSSVMRLYIPRKCGGRGFLNAKTLHNREICSLREYFLKTEVGMHRDVVAVDKGLTPLSMAKENWCKPVILTTDDRKEIWQNKELHGRFYRALHEPDVDFLASVSWLRFGDLFGETEGFVCAIMDEVILTNNYRRHIMKDGTVDVCRAYHRPGESIRHIISGCSRLANGEYLHRHNQVARIIHQQLALKYKLVNSEVPYYKYAPDPVLENDHVTLYWDRSIITDRTIVANKPDIVVIDRLARRAMIVDVTIPHDENLVKAEKEKQIKYLDLAHEVVDMWNVDSAVIVPIVVTANGLMAESLNHHLSRLSLGGWIKGLIQKAVLLDTARIVRRFLSLES

SEQ ID NO: 29165 - protein, 1202 aa, Atethmia centrago
MLTRSAARARPPPPDSSLSSASPPPVPSPTVSAVTTPAAVVALSSSDEYFSPPTSPTPVRRQGRGRPPKSLGLRGQLAPSRVPAAGGCVQRMRWTQSMNENVMRAYYGSTEGGTNLTAYRVRMLSLFQELEPTVNVSAQRLSDQVRVIQRNHRLDDAALDRLRSEVLSNHIVSTPAQTATHAPIIDAIPPRSNHDVEEEDDRVATVSSQCNVRLRSALEDAFREYRSTPTELRPRLPRLPMHKKNRALVCALDSLLKDFFESSEDLVDTHSILYCAAVAACRLANVKFPNCDEATRPKPAVPAWQYRIERRIDGARVLISKLYCFREGNTRPRVMRFVRRAFSGTGISPREYMSRVTERIDFLKQKVCAWASRIRRYKRRVDRYTQNRMFQSDERWVYRAWERPEQNETDMCRPDDATTTAFWRSIWSEPVCHAEADWMRDVERVCETIPEMEVVVITPSDIARAVRPLPNWKSPGPDGLHNFWLKWLTSSHTCLASQFQSSLESGSLPQFLTTGITHLLHKSGSPAEPKNYRPITCLSTVYKLLTSILRAKINTHIDSNSIMSASQNGCRNGSRGTKELLLIDMAISQQVRRSRKDLSTCWIDYKKAYDSVPHTWLMKVLELYKIDTTLRTFLESCMGQWRTVLRYPGCRRIQGNDEPVWIKRGIFQGDSLSPLWFCLALNPLSTLLEDSGLGYRLRRGGQVISHLLYMDDLKIFAPNKLRLMELLKVTETFSGAIRMEFGVDKCTVMHVKRGEIMESEGIQLSDSIHLRSLSSPESYKYLGMSEALGINVTDMKQLLKERFFGRLKKVLISLLSGGNKVRAFNGWVMPVLMYSFGILKWTQTELDALDRRVRTLLTANRMHHPRSSVMRLYIPRKCGGRGFLNAKTLHNREICSLREYFLKAEVGMHRDVVAVDKGLTPLSMAKENWCKPVVLTTDDRKEIWQNKELHGRFYRALHEPDVDFLASVAWLRFGDLFGETEGFICAIMDEVILTNNYRRHIMKDGTVDVCRACHRPGESIRHIISGCSRLANGEYLHRHNQVARIIHQQLALKYKLVNSEVPYYKYVPDPVLENDHVTLYWDRSIITDRTIVANKPDIVVIDRLARRAMIVDVTIPHDDNLVKAEKEKQIKYLDLAHEVVDMWNVNSAVIVPIVVTANGLMAESLNHHLSRLSLGGWIKGLIQKAVLLDTARIVRRFLSLEP

SEQ ID NO: 29166 - protein, 1202 aa, Atethmia centrago
MLTRSAARARPPPPDSSLSSASPPPVPSPTVSAVTTPAAVVASSSSDEYFSPPTSPTPVRRQGRGRPPKSLGLRGQLAPSRVPAAGGCVQRMRWTQSMNENVMRAYYGSTEGGTNLTAYRVRMLSLFQKLEPTVNVSAQRLSDQVRVIQRNHRLDDAALDRLRSEVLSNHIVSTPAQTATHAPIINAIPPRSNHDVEEEDDRVATVSSQCNVRLRSALEDAFREYRSTPTELRPRLPRLPMHKKNTALVCALDSLLKDFFESSEDLVDTHSILYCAAVAACRLANVKFPNCDGATRPKPAVPAWQCRIERRIDGARVLIGKLYCFREGNTRPRVMRFVRRAFSGTGISPREYMSRVTERIDFLKQKVCAWASRIRRYKRRVDRCTQNRMFQSDERWVYRSWERPEQNETDVCRPDDATTTAFWRSIWSVPVCYAEADWMRDVERVCETIPEMEVVIITPSDIARAVRPLPNWKSPGPDGLHNFWLKWLTSSHTCLASQFQSSLESGSLPQFLTTGITHLLHKSGSPAEPKNYRPITCLSTVYKLLTSILRAKINTHIDSNSIMSASQNGCRNGSRGTKELLLIDMAISQQVRRFRKDLSTCWIDYKKAYDSVPHTWLMRVLELYKIDTTLRTFLESCMGQWRTVLRYPGCRQIQGNDEPVWIKRGIFQGDSLSPLWFCLALNPLSTLLEDSDLGYRLRRGGQVISHLLYMDDLKIFAPNKLQLMELLKVTETFSSAIRMEFGVDKCAVMHVKRGEIMEPEGIQLSDSIHLRSLSSPESYKYLGMSEALGINVTDMKQSLKERFFGRLKKVLISPLSGGNKVRAFNGWVMPVLMYSFGILKWTQTEFDALDRRVRTLLTANRMHHPRSSVMRLYIPRKCGGRGFLNAKTLHNREICSLREYFLKTEVGMHRDVVAVDKGLTPLSMAKENWCKPVILTTDDRKEIWQNKELHGRFYRALHEPDVDFLASVSWLRFGDLFGETEGFVCAIMDEVILTNNYRRHIMKDGTVDVCRACHRPGESIRHIISGCSRLANGEYLHRHNQVARIIHQQLALKYKLVNSEVPYYKYAPDPVLENDHVTLYWDRSIITDRTIVANKPDIVVIDRLARRAMIVDVTIPHDENLVKAEKEKQIKYLDLAHEVVDMWNVDSAVIVPIVVTANGLMAESLNHHLSRLSLGGWIKGLIQKAVLLDTARIVRRFLSLES

SEQ ID NO: 29167 - protein, 1201 aa, Mesoligia furuncula
MLTRLAARRARLPPPDSSLSSAPPPPEPSPIESAVTPAVAVASSSSDEYFSPPTSPTPVRRQGRGRPPNSLGLRGHPAPSRVPATGGCVQRMRWTQSMNENVMRAYYGSTEGGINLTAYRDRMLSLFQVLEPTVNVSAQRLSDQVRVIQRNHRLDDIALDRLRSEVLSNHIVTTSAQTAAQASTVDAIPPRFNHVEEEDDRVDTVSSQCNVRLRSALEDALREYRSTPTELRPRLPRLPMHKKNRALVCALDSQLKNFFESSEDLVDTHSILYCAAVAACRLANVKFPSCDGATRPKPAVPAWQRRIERRIDGARVLIGKLYCFREGNTRPRVMRFVRRAFSGTGISPREYMSRLTERIDFLKQKVCAWASRIRRYKRRVDRYTQNRMFQSDERWVYRAWERPEQNVTDVCRPDDAATSAFWCSIWSVPVCHTEAGWMQDVERVCESIPQMEKVLITPSDVARAVRPLPNWKSPGPDGLHNFWLKWLISSHTCLASQFQSSLESGSLPQFLTTGVTHLLHKSGSPAEPKNYRPITCLSTVYKLLTSILRAKINTHIESNSIMSASQNGCRNGSRGTKELLLIDMAISQQVRRSRKDLSTCWIDYKKAYDSVPHTWLMRVLELYKIDATLRTFLESCMGQWKTVLRYPGCRQIQGNDEPVWIKRGIFQGDSLSPLWFCLALNPLSTLLEDSGLGYRLRRGGQVISHLLYMDDLKLFAPNKLRLMELLKVTETFSSAIRMQFGVDKCAVMHVKRGEIMESEGIQLSDSISLRSLSSSESYKYLGMSEALGINDADMKQSLKERFFCRLKKVLISLLSGGNKVRAFNGWVMPVLMYSFGILKWTQTELDALDRRVRTLLTANRMHHPRSSVMRLYIPRKCGGRGFLNAKTLHNREVCSLREYFLKAEVGMHRDVVAVDKGLTPLSMAKENWRKPVVLSTDDRKKVWQSKELHGRFYRALHEPGVDFIASVSWLRFGDLFGETEGFVCAIMDEVILTNNYRRHIMKDGTVDVCRACHRPGESIRHIISGCSRLANGEYLHRHNQVARIIHQQLALKYKLVDSEVPYYKYVPDPVLENDHVTLYWDRSIITDRTIVANKPDIVVIDRLARRTMIVDVTIPHDGNLVKAEKEKEIKYLDLAHEVVDMWNVSSAIIVPIVVSANGLMAESLDQHLSRLSLGGWIKGLIQKAVLLDTARIVRRFLSLEP

SEQ ID NO: 29168 - protein, 1199 aa, Xestia c-nigrum
MITRAALRRARLATPDSSLSSASPPPDPGSPVSPAVAVASSSSDEYFSPPTSPTPVRRAGRGRPPRSLGLRGQQAPSRVPATGGCVQRMRWTQSMNENVMRAYYGSTEGGTNLTVYRVRMLSMFQDLEPTVNASAQRLSDQVRVIQRNHLLDDAVLDRLRSEVLNNRIIFTQAQTTVQASAIHATPPRSNPAVIEEDDRVATISSQCNDRLRSALDNALREYRSISAELRPRLPRLPMHKKNRALVCALDSQLKNIFESSEDLVDTHSILFCGAVAACRLANVKFPNCYIATRPKPAVPAWQRRIERRIDGARVLIGKLYCFREGNTRPRVMRFVRRAFSGTEISPQEYMSRVTERIDFLKQKVYAWASRIRRYKRRVDRYSQNRMFQSDERWVYRAWEQPQQNMTDVCRPDDAATSSFWRSIWSVPVCHSEADWMRDIERVCEPIPTMEPILITPLDIARAVRPLPNWKSPGPDGLHNFWLKWFSSSHTCLASQFQSSLESGSLPQFLTTGVTHLLHKSGSPAEPKNYRPITCLSTVYKLLTSILRTKINTHVDSNSIMSASQNGCRNGSRGTKELLLIDMAISQQVRRARKDLSTCWIDYKKAYDSVPHSWLRRVLELYKIDATLRAFLESCMGQWRTVLRYPGCRQIQGNDEPVWIKRGIFQGDSLSPLWFCLALNPVSTLLENSGLGYRLRKDGQVISHLLYMDDLKLFAPNKLQLMELLKVTETFSSAIGMEFGVDKCAVMYVKRGKIMGSEGLQLSDSIHLRSLSSSESYKYLGMSEALGINVTDMKQSLKERFFGRLKKVLNSLLSGGNKVRAFNGWVMPVLMYSFGILKWTQTELDALDRRVRTLLTENRMHHPRSSVMRLYIPRKCGGRGFLNAKTLHNREVCSLREYFLKADVGMHRDVVAVDKGLTPLSMAKENWRKPVVLTTDDRKKEWQGKELHGRFYRALHGPDVDFLASVSWLRFGDLFGETEGFVCAIMDEVMLTNNYRKYIMKDGTVDVCRACHCPGESIRHIISGCSRLANGEYLHRHNQVARIIHQQLALKFKLVESEVPYYKYVPDPVLVKDHVTLYWDQSIITDRTIVANKPDIVVIDRSARRVMIIDVTIPHDENLVKAEKEKQMKYLDLAHEVRDMWNMNSVIIVPIVVTANGLIAKSLDEHLSKLSLGGWIKGLIQKAVLLDTARIVRRFLSLQP

SEQ ID NO: 29169 - protein, 1199 aa, Xestia c-nigrum
MITRAASRRALIPSPDSSLSSASPPPDPGSPVSPVAAVASSSSDEYFSPPTSPTPVRRAGRGRPPKGLGLRGQQAPSRVPATGGCVQRMKWTQLMNENVMRAYYGSTEGGTNLTAYRVRMLSLFQDLEPTVNASAQRLSDQVRVIQRNHLLDGAALDRLRSEVLSNRIILTPAQTAVQASSIDANPPRSNPAVVEEDDRVATVSSQCNDRLRSALEDALHEYRSTSAELRPRLPRLPMHKKNRALVCALDSQLKNVFESSEDLVDTHSILFCGAVAACRLANVKFPNCDLATRPKPAVPAWQRRIERRIDGARVLIGKLHCFREGNTRPRVMRFVRRAFSGTEISPQEYMSRVTERIDFLKQKVYAWASRIRRYKRRVDRYSQNRMFQSDERWVYRAWERPQQNMTDVCRPDDAATSSFWRSIWSVPVCHSEADWMRDVERVCEPIPTMEPILITPLDIARAVRPLPNWKSPGPDGLHNFWLKWFSSSHTCLASQFQSSLESGSLPQFLTTGITHLLHKSGSPAEPKNYRPITCLSTVYKLLTSILRTKINTHVDSNSIMSASQNGCRNGSRGTKELLLIDMAISQQVRRARKDLSTCWIDYKKAYDSVPHSWLKRVLELYKIDATLRTFLESCMGQWRTVLRYPGCRQIQGNDEPVWIKRGIFQGDSLSPLWFCLALNPVSTLLENSGLGYRLRKDGQVISHLLYMDDLKLFAPNKLQLMELLKVTETFSSAIGMEFGVDKCAVMYVKRGKIMGSEGLQLSDSIHLRSLSSSESYKYLGMSEALGINVTDMKQSLKERFFGRLKKVLNSLLSGGNKVRAFNGWVMPVLMYSFGILKWTQTELDALDRRVRTLLTENRMHHPRSSVMRLYIPRKCGGRGFLNAKTLHNREVCSLREYFLKVDVGMHRDVVAVDKGLTPLSMAKENWRKPVVLTTDDRKKEWQGKELHGRFYRALHGPDVDFLASVSWLRFGDLFGETEGFVCAIMDEVMLTNNYRKYIMKDGTVDVCRACHCPGESIRHIISGCSRLANGEYLHRHNQVARIIHQQLALKFKLVESEVPYYKYVPDPVLVKDHVTLYWDQSIITDRTIVANKPDIVVIDRSARRVMIIDVTIPHDENLVKAEKEKQMKYLDLAHEVRDMWNMNSVIIVPIVVTANGLIAKSLDEHLSKLSLGGWIKGLIQKAVLLDTARIVRRFLSLQP

SEQ ID NO: 29170 - protein, 1202 aa, Omphaloscelis lunosa
MLTRSAARSARLPPPDSPLSSASPPPVPSPIVNAVSTPAAVVASSSSDEYFSPPTSPTPVRRKGRGRPPRSLGLRGQPAPSRVPAAGGCVQRMRWTQLMNENVMRAYYGSTEGGTNLTAYRVRMLSLFQELEPTVNVSAQRLSDQVRVIQRNHRLDDIALDRLRSEVLNNHIVSTRAQTAAQESNIDPTPPRFNHGVEEDDRVATVSSQCNDRLRSALEDAFREYRYTPTELRPRLPRLPMHKKNRALVCALDSQLTNFFESSEDLIDTHSILYCAAVAACRLANVKFPNYDGATRPKPVVPAWQCRIERRIDGARVLIGKLYCFREGNTRPRVMRFVRRAFLGTGISPQEYMSRVTERIDFLKQKVCAWASRIRRYKRRVDRYTQNRMFQSDERWVYRAWERPEQNVTDVCRPDDAATSAFWRSIWSVPVCHTEAGWMQDVERVCETIPEMDAVFITPLDVARAVRPLPNWKSPGPDGLHNFWLKWLSSSHTRLASQFQSSLESGSLPQFLTTGVTHLLHKSGNPAEPKNYRPITCLSTVYKLLTSILRTKINTHIDSNSIMSVSQNGCRNGSRGTKELLLIDMAISQQVRRSRKDLSTCWIDYKKAYDSVPHTWLMRVLELYKVHTTLRTFLMSCMGQWRTVLRYPGCRQTQGNDEPVWIKRGIFQGDSLSPLWFCLALNPLSTLLEGSGLGYRLRRGGQVISHLLYMDDLKLFAPNKLRLMELLKVTETFSGAIRMEFGVDKCAVMHVKRGEIMESEGTQLSDSIHLRSLSSAENYRYLGMSESLGINVADMKQSLKERFFGRLKKVLISFLSGGNKVRAFNGWVMPVLIYSFGILKWTQTELDALDRRVRTLLTANRMHHPRSSVMRLYIPRKCGGRGFLNAKTLHNREVCSLREYFFKADVVMHRDVVAVDNGLTPLSMAKENWRKPVVLTTDDRKEVWQSKALHGRFYRALHEPGVDFLASVSWLRFGDLFGETEGFICAIMDEVILTNNYRRHIMKDGTVDVCRACHRPGESIRHIISGCSRLANGEYLHRHNQVARIIHQQLALKYKLVDSEVPYYKYVPDPVLENDHVTLYWDRSIITDRTIIANKPDIVVIDRLARRAMIVDVTIPHDENLVKAEKEKQIKYLDLAHEVVDMWNVSSAIIVPIVVTANGLMAESLDQHLSRLSLGGWIKRLIQKAVLLDTARIVRRFLSLQP

SEQ ID NO: 29171 - protein, 1202 aa, Sesamia nonagrioides
MLTRQAARRARSPPPDSSPSSASPPPVPSANVSAVTTPAAVVASSSSDEYFSPPTSPRPVRRQGRGRPPKSLGLRGHPAPSRVPAAGGCVQRMRWTQTMNENVMRAYYRATEGGTNLTAYRERMLSLFQALEPTVNVSAQRLSDQVRVIQRNHRLDDIALDRLRSEVLSNQITPTLTQTAAQASIIDAAPPRSNRVEEEDDRVETVSSQYNDRLRNALEDAFRDYRSTPTDLRPRLPRLPMHKKNRALVCALDSLLKNFFESSEDLIDTHSILYCAAVAACRLAKVKFPNCEEAARPKPAVPAWQRRIERRIDGTRVLIGKLYCFRDGNTRPRVMRFVRQAFSGTGISPREYINHLTERIDFLKQKVCAWASRIRRYKRRVDRYTQNRMFQSDERWVYRAWERPEQNEADVCRPDDATTSAFWRGIWSVSVCHTEVNWIQNVEQVCETIPEMDTILITPSDVAAAVRSLPNWKSPGPDGLHNFWLKWLSSSHTCLASQFQSSLESGSLPQFLTTGITHLLHKSGSTAEPKNYRPITCLPTVYKVLTSILKAKINKHLNSNSIMSVSQNGCKNGSRGTKELLLIDMAISQQVRRSRKDLSTCWIDYKKAYDSVPHTWLMRVLELYKVNATLRTFLRSCMGQWKTVLRYPGSRRIQGNDEPVWIKRGIFQGDSLSPLWFCLALNPLSTLLEDSGLGYRLQRGGQVISHLLYMDDLKLFAPNKLHLMKLLNVTETFSSGIKMEFGVDKCAVMHVKRGQIMESEGITLPDSIHLRSLSSFESYKYLGMSEALGINDADMKQSLKERFFGRLKKVLKSLLSGGNKVRAFNGWVMPVLMYSFGILKWTQTELDALDRRVRTLLTANRMHHPRSSVMRLYIPRKCGGRGFLNAKTLHNREVCSLREHFFKTVVGMHHDVVTVDKGLTPLSMAKENWHKPIILTTDDRKMIWQSKELHGRFYRALHEPDVDFLASVSWLRFSDLFGETEGFVCAIMDEVILTNNYRRYIMKDGTIDVCRACHHPGESIRHIISGCSRLANSEYLHRHNQVARIIHQQLALKYKLVDSEVPYYKYVPDPVLENDHVTLYWDRSIITDRTIVANKPDIVVIDRLARLAMIVDVTIPHDGNLVKAEKEKQVKYLDLAHEIVDMWNVNSAVIVPIVVSANGLIAKSLDQHLLRLSLGSWIKGLIQKAVLLDTARIVRRFLSLEP

SEQ ID NO: 29172 - protein, 1202 aa, Sesamia nonagrioides
MLTRAAKRRARPPPPDSSLSTASPPPVSSATVNAVRTPAVVVASSSSDEYFSPPTSPTPVRRQGRGRPPKSLGLRGHPAPSRVPAAGGCVQRMRWTQTMNENVMRAYYGATVGGTNLTAYRERMLSLFQALEPTVNVSAQRLSDQVRVIQRNHRLDDIALDRLRSEVLSNQIAPTLTQTAAQASIIDAVPPRSNRVEEEDDRAETVSSQYNDRLRSALEDAFRDYRSTPTNLRPRLPRLPMHKKNRALVCALDSQLKNFFESSEDLIDTHSILYCAAVAACRLAKVKFPNCEEATRPKLAVPAWQRRIERRIDGTRVLIGKLYCFREGNTRPRVMRFVRQAFSGTGISPREYINNVTERIDFLKQKVCAWASRIRRYKKRVDRYTQNRMFQSDERWVYRAWERPEQNEADECRPDDATTSAFWRGIWSVSVCHTEGDWTQDVEQVCEAIPEMDNILITPLDVATAVRSLPNWKFPGPDGLHNFWLKWLSSSHTCLASQFQSSLESGSLPQFLTTGITHLLHKSGSTAEPKNYRPITCLPTVYKVLTSILKAKINNHLDSNSIMSVSQNGCRGGSRGTKELLLIDMAISQQVRRSRKDLSTCWIDYKKAYDSVPHTWLMRVLELYKINATLRTFLKSCMGQWKTVLRYPGSRQIQGNDEPVWIKRGIFQGDSLSPLWFCLALNPLSTLLEDSGLGYRLKRGGQVISHLLYMDDLKLFAPNKLHLMKLLNVTETFSSGIKMEFGVDKCAVMHVKRGQIMESEGITLPDSIHLRSLSSIESYKYLGMSEALGINDADMKQSLKARFFGRLKKVLNSLLSGGNKVRAFNGWVMPVLMYSFGILKWTQTELDALDRRVRTLLTANRMHHPRSSVMRLYIPRKCGGRGFLNAKTLHNREVFSLREYFLKTVVGMHHDVVTVDKGLTPLSMAKENWHKPIILTTDDRKMLWQSKELHGRFYRALHGPDVDFLASVSWLRFGDLFGETEGFVCAIMDEVILTNNYRRYIMKDGTIDVCRACHHPGESIRHIISGCSRLANSEYLHRHNQAARIIHQQLALKYKLVDSEVPYYKYVPDPVLENDHVTLYWDRSIITDRTIVANKPDIVVIDRLARLAMIVDVTIPHDGNLVKAEKEKQMKYLDLAHEVVDMWNVNSAVIVPIIVSANGLIAKSLDQHLLRLSLGSWIKGLIQKAVLLDTARIVRRFLSLEP

SEQ ID NO: 29173 - protein, 1199 aa, Mamestra configurata
MLTRAASRRARPPSPDPSLSSASPPPDSGSPMSPAVAVASSSSDEYFSPPTSPTPVRWQGRGRPPRGLGPRGQPAPSRVPAAGGCVQRMRWTQSMNENVMRAYYGSTEGGTNLTAYRVRMLSLFQDLEPTVNVSAQRLSDQVRVIQRNHRLDDAALDRLRSEVLNNLIISTPTQTAVQAPVNGRITPRPNNVSDEVDDRVVTVSSQCNDRLRSALEDALREYRSTPTELRPRLPRLPMHKKNRALVCALDSLLQNIFESSESLVDTHSILYCGAVAACRIANVKFPGCDEAIRPKPAAPAWQRRIERRIDETRALIGKLYCFREGNTRPRVMRFVRRAFSGTEISPRDFTSRVTERIDFLKQKVCAWASRIRRYKRRVDRYSQNRMFQSDERWVYRAWERPEQSVTDVCRPDDVATSIFWRSIWSVPICHAEGGWMRDVERVCEAIPQMEKITITTLDVAKAVRPLPNWKSPGPDGLHNFWLKWYSSSHALLASQFQSSLDSGSLPQFLTTGVTHLLHKTGSPTEPKNYRPITCLSTVYKLLTSILRAKINEHIESNSIMSASQNGCRKGSRGTKELLLIDMAISQQVRRSRKDLSTCWIDYKKAYDSVPHTWLMKVLELYKIDATLRTFLESCMRQWKTVLRYPGCRPIQGSDEPVWIKRGIFQGDSLSPLWFCLALNPLSTLLEDSGLGYRLRRGGQAISHLLYMDDLKLFAPNNLRLMELLKVTETFSSAIRMEFGVDKCAVMHVKKGEIMESEGIHLSDSIQVRSLSSTETYKYLGMLEALGINGTDMKQSLRERFFGRLKKVLNSLLSGGNKVRAFNGWVMPVLMYTFGILKWTQTELDALDRRVRTLLTANRMHHPRSSVMRLYIPRKCGGRGFLNAKTLHNREMCSLREYFLKADVGMHRDVVAVDKGLTPLSMAKENWRTPVILTTDDRKEVWKGKELHGRFYRALHGSDVDFSASVAWLRFGDLFGETEGFVCAIMDEVILTNNYRRHIMKDGTVDMCRACHRPGESIRHIISGCSRLANGEYLHRHNQVARIIHQQLALKYNLVDSEVPYYKYVPDPVLENDHVTLYWDRSIITDRTIVANKPDIVVIDRLARRTMIIDVTIPHDENLVKAEKEKQIKYLDLAHEVVDMWNVESAVIVPIVVTANGLMAKSFDDHLSKLALRSWVKGLIQKAVLLDTARIVRRFLSLEP

SEQ ID NO: 29174 - protein, 1204 aa, Noctua janthe
MLTRRRAKLHETHPPSPGSSLSSASHSPGRATSVSAASPVAAVASSSSDEFFSPPSTPPPPRRRGRGRPPVGLGTRGQQATNRVPAAGGNVSRIRWTQSMNENVMRAYYGSTEGGTNLTEYRVRMLSLFQVLEPIVNVSAQRLSDQVRVIQRNHMLDDAALDRLRSEVLSNRIVLTPAQTAVQASAIDATPPRPNPANVEEDDRVAMVSSQCNDRLRSALKDALREYRSTPTKLRPRLPRLPMHNKNRALVCALDSQLKNIFESSENLVDTHSILYCGAVAACRLANVKFPNYDVAIRPKPAVPTWQRRIECRIDEARVLIGKLHCFREGNTRPRVMRFVRRAFSGTGISPQEYMSRVTERIDFLKQKVYAWANRIRRYKRRVDRYSQNRIFQSDERWVYRAWERPEQNMTDVCRPDDAATSSFWRSIWSVPVCHTEADWIRDVERTCEPIPEMEPILITPIDIARAVRPLPNWKSPGPDGLHNFWLKWLSSSHTCLASQFQSSLESGSLPQFLTTGVTHLLHKSGSPAEPKNYRPITCLSTVYKLLTSILRVKINTHIDKNFIMSASQNGCRNRSRGTKELLLIDMAISQQVRRSRKDLSTCWIDYKKAYDSVPHTWLMRVLELYKIDATLRAFLESCMGQWRTVLRYPGCRQIQGNDEPVWIKRGIFQGDNLSPLWFCLALNPLSTLLEDSGLGYRLRRGGQVISHLLYMDDLKLFAPNKLRLMELLKVTETFSNAIRMEFGMDKCAVMYVKRGEIMESEGIQLSDSIHLRSLSSSESYKYLGMSESLGINVTDMKQSLRERFFGRLNKVLNSLLSGGNKVRAFNGWVMPVLMYSFGVLKWTQTELDALDRRVRTLLTANRMHHPRSSVMRLYIPRKCGGRGFLNAKTLHNREICSLREYFLKTEVGMHRDVVAVDKGLTPLSMAKENWRKPVVLTTDDRKEVWQGKELHGRFYRALHGPDVDFLASVSWLRFGDLFGETEGFVCAIMDEVMLTNNYRKYIMKDGTVDVCRACHRPGESIRHIISGCSRLANGEYLHRHNQVARIIHQQLALKYKLVESEVPYYKYVPDPVLEKDHVTLYWDRSIITDRTIVANKPDIVVIDRLARRVMIVDVTIPHDENLVKAEKEKQIKYLDLAHEVVDMWNVNSAIIVPIVVTANGLIAKSLDDHLSRLSLGGWIKGLIQKAVLLDTARIVRRFLSLEP

SEQ ID NO: 29175 - protein, 1096 aa, Noctua janthe
MITRAAYRRARLTTPDSSLSSASPPPDPGSPVSPAAAVASSSSDEYFSPPTSPTPVRRQGRGRPPKSLGLRGHPAPSRVPAAGGCVQRMRWTQTINENVMRAYYGSTEGGTNLTAYRVRMLSLFQVLEPIVNVSAQRLSDQVRVIQRNHMLDDAALDRLRSEVLSNRIVLTPAQTAVQASTIDATPPRSNPAVVEEDDRVAMVSSQCNDRLRSALEDALREYRSTPTKLRPRLPRLPMHNKNRALVCALDSQLKNIFESSENLVDTHSILYCGAVAACRLANVKFPNYDVAIRPKPAVPTWQRRIECRIDEARVLIGKLHCFREGNTRPRVMRFVRRAFSGTGISPQEYMSRVTERIDFLKQKVYAWANRIRRYKRRVDRYSQNRIFQSDERWVYRAWERPEQNMTDVCRPDDAATSSFWRSIWSVPVCHTEADWMRDVERACEPIPEMEPILITSIDITRAVRPLSNWKSPGPDGLHNFWLKWLSSSHTCLASQFQSSLESGSLPQFLTTGVTHLLHKSGSPAEPKNYRPITCLSTVYKLLTSILRVKINTHIDKNFIMSASQNGCRNRSRGTKELLLIDMAISQQVRRSRKDLSTCWIDYKKAYDSVPHTWLMRVLELYKIDSTLRAFLESCMGQWRTVLRYPGCRQIQGNDEPVWIKRGIFQGDSLSPLWFCLALNPLSTLLEDSGLGYRLRRGGQVISHLLYMDDLKLFAPNKLRLMELLKVTETFSNAIRMEFGVDKCAVMYVKRGEIMESEGIQLSDSIHLRSLSSSESYKYLGMSESLGINVTDMKQSLRERFFGRLNKVLNSLLSGGNKVRAFNGWVMPVLMYSFGVLKWTQTELDALDRRVRTLLTANRMHHPRSSVMRLYIPRKCGGRGFLNAKTLHNREICSLREYFLKTEVGMHRDVVAVDKGLTPLSMAKENWRKPVVLTTDDRKEVWQGKELHGRFYRALHGPDVDFLASVSWLRFGDLFGETEGFVCAIMDEVMLTNNYRKYIMKDGTVDVCRACHRPGESIRHIISGCSRLANGEYLHRHNQVARIIHQQLALKYKLVESEVPYYKYVPDPVLEKDHVTLYWDRSIITDSSRLLSPINLT

SEQ ID NO: 29176 - protein, 1004 aa, Noctua janthe
MVSSQCNDRLRSALEDALREYRSTPTKLRPRLPRLPMHNKNRALVCALDSQLKNIFESSENLVDTHSILYCGAVAACRLANVKFPNYDVAIRPKPAVPTWQRRIECRIDEARVLIGKLHCFREGNTRPRVMRFVRRAFSGTGISPQEYMSRVTERIDFLKQKVYAWANRIRRYKRRVDRYSQNRIFQSDERWVYRAWERPEQNMTDVCHILLGCRPDDAATSSFWRSIWSVPVCHTEADWMGDVERACEPIPEMEPILITSIDITRAVRPLPNWKSPGPDGLHNFWLKWLSSSHTCLASQFQSSLESGSLPQFLTTGVTHLLHKSGSPAEPKNYRPITCLSTVYKLLTSILRVKINTHIDKNFIMSASQNGCRNRSRGTKELLLIDKAISQQVRRSRKDLSTCWIDYKKAYDSVPHTWLMRVLELYKIDATLRAFLESCMGQWRTVLRYPGCRQIQGNDEPVWIKRGIFQGDSLSPLWFCLALNPLSTLLEDSGLGYRLRRGGQVISHLLYMDDLKLFAPNKLRLMELLKVTETFSNAIRMEFGVDKCAVMYVKRGEIMESEGIQLSDSIHLRSLSSSESYKYLGMSESLGINVTDMKQSLRERFFGRLNKVLNSLLSGGNKVRAFNGWVMPVLMYSFGVLKWTQTELDALDRRVRTLLTANRMHHPRSSVMRLYIPRKCGGRGFLNAKTLHNREICSLREYFLKTEVGMHRDVVAVDKGLTPLSMAKENWRKPVVLTTDDRKEVWQGKELHGRFYRALHGPDVDFLASVSWLRFGDLFGETEGFVCAIMDEVMLTNNYRKYIMKDGTVDVCRACHRPGESIRHIISGCSRLANGEYLHRHNQVARIIHQQLALKYKLVESEVPYYKYVPDPVLEKDHVTLYWDRSIITDRTIVANKPDIVVIDRLARRVMIVDVTIPHDENLVKAEKEKQIKYLDLAHEVVDMWNVNSAIIVPIVVTANGLIAKSLDDHLSRLSLGGWIKGLIQKAVLLDTARIVRRFLSLEP

SEQ ID NO: 29177 - protein, 1200 aa, Mythimna ferrago
MLTRAAAQRARIPPPDSLLSSASPPPDPGSSVSPAAAVASSSSDEYFSPPTSPTPVRRPGRGRPPNGLGFRGQPAPSRVPAAGGCVQRMKWTQSMNENVMRAYYGATEGGTNLTAYRVRMLSLFQDLEPTVNVSAQRLSDQVRVIQRNHRLDDAALDRLRSQVLSNPIVSTPQQIQTVGPSTSVTTTSRYDHVEDEADDRVDRVSSQCNDRLRSALEDALREYRSTPTELRPRLPRLPMHKKNRALVCALDSLLKNVFESSDSLLDTHSILYCGAVAACRLANVKFPCHGVATRPTPAAPAWQCRIERRIDEARALIGKLYCFREGNTRPRVMRFVRRAFSGTEISPREYMSRVTERIDFLKQKVCAWANRIRRYKRRVDRYSQNRMFQSDERWVYRAWERPGQNVTDGFRPDSVATNTFWRSIWSEPVCHNEGGWMRDVERVCEAIPEMDKVFITPLDVARAVRPLPNWKSPGPDGLQNFWLKWYSSSHAILASQFQSSLESGSLPQILTTGTTHLLHKTGSTADPKNYRPITCLSTVYKLLTSILRVKITLHIEKNSIMFASQNGCRNGSRGTKELLLIDMAISQQVRRSRKDLSTCWIDYKKAYDSVPHTWLMKVLELYKIDATLRTFLESCMRQWKTVLRYPGCRPIQGNDEPIWIRRGIFQGDSLSPLWFCIALNPLSTLLEDSGLGYRLRRGGQVLSHLLYMDDLKLFAHNNSQLMELLKVTETFSSAIRMEFGVDKCAVMHVRRGEIVESEGIQLSDSIHLRSLSSTETYKYLGMSEALGINVADMKQTLKERFFGRLKKVLNSLLSGGNKVRAFNGWVMPVLMYSFGILKWTQTELDALDRRVRTLLTANRMHHPRSSVMRLYIPRKCGGRGFLNAKTLHNREVCSLREYFLKTDVGMHRDVVAVDKGLTPLSMAKENWRKPVVLTTDDRKEVWKGKELHGRFFRALHEPDVDFSASVAWLRFSNLFGETEGFVCAIMDEVILTNNYRRHIMKDGTVDVCRACHRPGESIRHIISGCSRLANGEYLHRHNQVARILHQQLALKYNLVDSEVPYYRYVPDPVLENDHVTLYWDRSIITDRTIVANKPDIVVIDRLARRAMIVDVTIPHDENLVKAEKEKQIKYLDLAHEVVDMWNVDSAIIVPIVVTANGLIAKSFDDHLSKLSLHGWIKGLIQKAVLLDTARIVRRFLSLEP

SEQ ID NO: 29178 - protein, 1200 aa, Mythimna ferrago
MLTRTAARRARHPPPGSSLSSASPPPDPGSPVSPAAAVASSSSDEYFSPPTSPTPVRRPGRGRPPKSMGPRGQPAPSRVPAAGGCVQRMRWTQSMNENVMRAYYGSTEGGTKLTAYRERMLSLFQVLEPTVNVSAQRLSDQVRVIQRNHRLDDAALDRLRSEILSNQIVSTSTQTQTAATPTTNAISPRSDHNNDDADDRVVTVSSQCNERLRSALEDALCEYMSTPTELRPRLPRLPMHKKNRALVCALDSLLKNIFESSENLIDTHSILYCGAVAACRLANIKFPNIDGAIRPKSAVPAWQCRIERRIGEARVLIGKLHCFREGNTRPRVMRFVRRAFLGTGISPQGYMSRVTERIDFLKQKVCAWASRIRRYKRRVDRYSQNRMFQSDERWVYRAWERPEHSVIDGCRPDDFATITFWRNIWSVPVSHAEGGWMRDVERVCEAIPEMEKVTITPEDVAKAVRPLPNWKSPGPDGLQNFWLKWYSSSHALLASQFQSILESGSLPEYLTTGITHLLHKTGNPEDPKNYRPITCLSTVYKLLTSILRAKINIHIENHQIISPSQNGCRNGSRGTKELLLIDMAISQQTRRSRKDLSTCWIDYKKAYDSVPHTWLMRVLELYKIDITLRTFLESCMRQWKTVLRYPGCRPIQGNDEPIWIKRGIFQGDSLSPLWFCLALNPLSTLLEDSGLGYRLRRGGQVISHLLYMDDLKLFAPSTLQLMELLKVTETFSSAIRMEFGVDKCAGMHVKRGEIMESEGIQLPDSIHLRSLSSTETYKYLGMSEALGINNADMKQSLKERFFGRLKKVLNSLLSGGNKVRAFNGWVMPVLMYSFGILKWTQTELDALDRRVRTLLTANRMHHPRSSVMRLYIPRKCGGRGFLNAKTLHNREVCSLREYFLKTDVGMHRDVVAVDKGLTPLSMAKEDWHKPVIMTTDNRKEIWKGKELHGRFFRALHEPDVDFLASVAWLRFSDLFGETEGFVCAIMDEVILTNNYRRYIMKDGTVDVCRACHRPGESIRHIISGCSRLANGEYLHRHNQVARILHQQLALKYNLVDSEVPYYRYVPDPVLENDHVTLYWDRSIITDRTIVANKPDIVVIDRLARRAMIVDVTIPHDENLVKAEKEKQIKYLDLAHEVVDMWNVDSAIIVPIVVTANGLIAKSFDDHLSKLSLHGWIKGLIQKAVLLDTARIVRRFLSLEP

SEQ ID NO: 29179 - protein, 1199 aa, Noctua pronuba
MITRAASRRARLPTPDSSLSSASPPPDPGSPVLPAAAVASSSSDEYFSPPTSPTPVRRQGRGRPPRSLGLRGHPAPSRVPATGGCVQRMRWTHPINENVMRAYYGSTEGGTNLTAYRVRMLSLFQVLEPTVNVSAQRLSDQVRVIQRNHMLDDAALDRLRSEVLSNPIVLTPSQTVVQASTIDITPPRSNPAVAEEDDRVATVSSQCNDRLRNALEDALREYRYTRTEFRPRLPRLPMHKKNRALVCALDSQLKNLFESSENLVDAHSILYCGAVAACRLANVKFTNSDTATRPKPAVPAWQCRIERRIDGARVLIGKLHCFREGNTRPRVMRFVRRAFSGTGISPQEYMSRVTERIDFLKQKVYAWANRIRRYKRRVDRYSQNRMFQSDERWVYRAWERPEQNMTDVCRPDDATTSSFWSSIWSVPVCHTEADWMRDVERMCEPIPEMEPILITLQDIARAVRPLPNWKSPGPDGLHNFWLKWLSSSHTCLASQFQSSLESGSLPQFLTTGVTHLLHKSGSPAEPKNYRPITCLSTVYKLLTSILRAKINTHIDKNSIMSVSQNGCRNGSRGTKELLLIDMAISQQVRRSRKDLSTCWIDYKKAYDSVPHTWFMRVLELYKVDATLRAFLESCMGQWRTVLRYPGCRQIQGNNEPVWIKRGIFQGDSLSPLWFCLALNPLSTLLEDSGLGYRLRRGGQVISHLLYMDDLKLFAPNKLRLMELLKVTETFSSAIRMEFGVDKCAVMYVKRGEIMESEGIQLSDSIHLRSLSSSESYKYLGMSEALGINVTDMKQSLRERFFGRLKKVLNSLLSGGNKVRAFNGWVMPVLMYSFGILKWTQTELDALDRRVRTLLTANRMHHPRSSVMRLYIPRKCGGRGFLNAKTLHNREVCSLREYFLKAEVGMHRDVVAVDKGFTPLSMAKENWRKPVVLTTDDRKEVWQGKELHGRFYRALHGPDVDFLASVSWLRFGDLFGETEGFVCAIMDEVILTNNYRKYIMKDGTVDVCRACHRPGESIRHIISGCSRLANGEYLHRHNQVARIIHQQLALKYKLVESEVPYYKYVPDPVLEKDHVTLYWDRSIITDRTIVANKPDIVVIDRSARRVMIVDVTIPHDENLVKAEKEKQIKYLDLAHEVVDMWNVNSAVIVPIVVTANGLMAKSFDDHLSKLSLGGWIKGLIQKAVLLDTARIVRRFLSLEP

SEQ ID NO: 29180 - protein, 1206 aa, Ochropleura plecta
MLTRRRAQEQQTLPPSPGSSLSSASQPPGRATRVSAVSPVAAVASSSSDEFFSPPSSPPPPTRQRRGRGRPPAGLGSRGQQVPIRVPAAGGNVSRMRWTSFINENVMRAYYGSTEGGTNLTAYRVRMLSLFEDLEPTINVSAQRLSDQVRVIQRNHLLDDAALDRLRSEVLGNRAILTTPQTAVQASAIDVTQPRSNPAVVEEDDRVATVSSQCNERLRSALEDALRDYRSTPTELRPRLPRLPMHKKNRALVCALDSQLKNLFESSENLVDTHSILYCGAVAVCRVANVKFQNSDVATRPKPSVPVWQCRIERRIDEARVLIGKLYCFREGNTRPRVMRFVRRAFSGTGISPQEYLSCTTERIDFLKQKVYAWTNRIRRYKRRVDRYSQNRMFRSDERWVYRAWERPEQSVTDVCRPDDVATSSFWHSIWSVPVCHTEADWMRDVERVCETIPEMEPILITSIDIASAVRPLPNWKSPGPDGLHNFWLKWLSSSHTHLASQFQSCLESGSLPQFLTTGITHLLYKSGSPAEPKNYRPITCLSTVYKLLTSILRAKINSHIDKNSIMSASQNGCRNGSRGTKELLLIDMAISQQVRRSRKDLSTCWIDYKKAYDSVPHTWLKRVLELYKIDATLRAFLESCMGQWRTVLRYPGCRQIQGNDEPVWIKRGIFQGDSLSPLWFCLALNPLSTLLEDSGLGYRLRRGGQVISHLLYMDDLKLFAPNKLRLMELLKVTETFSNAIRMEFGVDKCAVMYVKRGEIMESEGIQLSDSIHLRSLSSSESYKYLGMSEALGINVADMKQLLRERFFGRLKKVLKSLLSGGNKVRAFNSWVMPVLMYSFGILKWTQTELDALDRRVRTLLTGNRMHHPRSSVMRLYIPRKCGGRGFLNAKTLHNREVCSLREYFLKTDVGMHRDVVAVDKGLTPLSMAKENWRKPVVLTTDDRKVVWQGKELHGRFYKALHGPDVDFLASVSWLRFGDLFGETEGFVCAIMDEVMLTNNYRKYIMKDGTVDVCRACHRPGESIRHIISGCSRLANSEYLHRHNQVARVIHQQLALKYNLVESEVPYYKYVPDPVLEKDHVTLYWDRSIITDRTIVANKPDIVVIDRSARRVMIIDVTIPHDENLVKAEKEKQLKYLDLAHEVVDMWNVNSAIIVPIVVTANGLIAKSLDEHLSKLSLGGWIKGLIQKAVLLDTARIVRRFLSLEP

SEQ ID NO: 29181 - protein, 1105 aa, Hecatera dysodea
MNENVMRAYYGSTEGGTNLTAYRLRILSLFQDLEPTVNVSAQRLSDQVRVIQRSHRLDDAALERLRSEVLNNLIISTQTQTAVQAPVSGANTPQANNDSDEVDDRVVTVSSQYNNRLRSALEDALREYRSTPTELRPRLPRLPMHKKNRALVCALDSLLQNTFVSSENLVDTHSILYCGAVAACRLANVKFPSGDEAIRPKPAAPAWQCRIERRVDEARALIGKLYCFREGNTRPRVMRFVRRAFAGTGISPHEYTSRITERIDFLKQKVCAWANRIRRYKRRADRYSQNRMFQSDERWGYRTWERPEQSVTDECRPDDIATTTFWRSIWSVPVRHTEGDWMRDVERVCEAIPQMEKITITPTDIATAVRPLPNWKSPGPDGLHNFWLKWYSSSHAVLASQFQSSLESGSLPQFLTTGITHLLHKTGSPAEPKNYRPITCLSTVYKLLTSILRVKINEHIESNSIMSSSQNGCRKGSRGTKELLLIDMAISQQVRRSRKDLSTCWIDYKKAYDSVPHTWLMKVLELYKIDATLRTFLESCMRQWKTVLRYPGCRPIQGSDEPIWIKRGIFQGDSLSPLWFCLALNPLSTLLEDSGLGYRLRRGGQAISHLLYMDDLKLFAPNNLRLMELLKVTETFSSAIRMEFGVDKCAVMHVKKGEIMESEGIQLSDSIQVRSLSSTEIYKYLGMSEALGINGADMKQSLKERFFGRLKKVLNSLLSGGNKVRAFNGWVMPVLMYSFGILKWTQTELDALDRRVRTLLTANRMHHPRSSVMRLYIPRKCGGRGFLNAKTLHNREMCSLREYFLETDVGMHRDVVAVDKRLTPLSMAKENWRKPVIHTTDDRKVVWKGKELHGRFYRALYGSDVDFSASVAWLRFGDLFGETEGFVCAIMDEVILTNNYRRHIMKDGTVDVCRACHRPGESIRHIISGCSRLANSEYLHRHNQVARIIHQQLALKYKLVNSEVPYYKYVPDPVLENDHVTLYWDRSIITDRTIVANKPDIVVIDQLARRTMIIDVSIPHDENLVKAEKEKQIKYLDLAHEVVDMWDVDAAVIVPIIVTANGLMAKSFDDHLSKLALRSWVKGLIQKAVLLDTARIVRRFLSLQP

SEQ ID NO: 29182 - protein, 1199 aa, Hecatera dysodea
MLTRAATLRARHPPPGSPLSSASPPPDIESQVSPAAAVASSSSDEYFSPPTSPPPVRRQGRGRPPRGLGPRGQPAPSRVPATGGCVQRMRWTQSMNENVMRAYYGSTEGGINLTAYRVRMLSLFQDLEPTVNVSAQRLSDQVRVIQRSHRLDEAALDRLRSEVLNNLIISTPTQTAVQAPGSGAIIPRPIHVCDEVVDRVVTVSSQCNDRLRSALEDALREYRSTPTELRPRLPRLPMHKKNRALVCALDSLLKNIFESSENLVDTHSILYCGAVAACRVANVKFSNSDGATRPKNAAPAWQCRIERRIDEARVLIGKLYCFREGNTRPRVMRFVRRAFLGTEISPQEYMSRVTERIDFLKQKVCAWANRIRRYKRRVDRYSQNRMFQSDERWVYRAWERPEQSVTDVCRPDDVTTNTFWRSIWSVPVCHAEGGWMRDVERVCEAIPQMEKITITTVDIATAVRPLPNWKSPGPDGLHNFWLKWYSSSHALLASQFQSSLDSGSLPQFLTTGITHLLHKTGSPAEPKNYRPITCLSTVYKLLTSILRVKINEHIESNSIMSYSQNGCRKGSRGTKELLLIDMAISQQVRRSRKDLSTCWIDYKKAYDSVPHTWLLKVLELYKVDATLRTFLESCMRQWKTVLRYPGCRPIQGNEEPVWIKRGIFQGDSLSPLWFCLALNPLSTLLEDSGLGYRLRRGGQTISHLLYMDDLKLFAPNNLRLMELLKVTETFSSAIRMEFGVDKCAVMHVKKGEIMESEGIQLSDSIQVRSLSSTETYKYLGMSEALGINGADMKQSLKERFFGRLKKVLNSLLSGGNKVRAFNGWVMPVLMYSFGILKWTQTELDALDRRVRTLLTANRMHHPRSSVMRLYIPRKCGGRGFLNAKTLHNREMCSLREYFLKADVGMHRDVVAVDKGFTPLSMAKENWRKPVIPTTDDRREVWRGKELHGRFYRALHGSDVDFSASVAWLRFGDLFGETEGFVCAIMDEVILTNNYRRHIMKDGTVDVCRACHRPGESIRHIISGCSRLANGEYLHRHNQVARIIHQQLALKYKLVDSEVPYYKYVPDPVLENDHATLYWDRSIITDRTIIANKPDIVVIDRLARRTMIIDVTIPHDENLVKAEKEKQIKYLDLAHEVVDMWNVDSAVIVPIVVTANGLMAKSFDEHLSKLALHGWLKGLIQKAVLLDTARIVRRFLSLEP

SEQ ID NO: 29183 - protein, 1199 aa, Hecatera dysodea
MLTRAATLRARHPPPGSPLSSASPPPDIESQVSPAVAVASSSSDEYFSPPTSPPPVRRQGRGRPPRGLGPRGQPAPSRVPATGGCVQRMRWTQSMNENVMRAYYGSTEGGINLTAYRVRMLSLFQDLEPTVNVSAQRLSDQVRVIQRSHRLDEAALDRLRSEVLNNLIISTPTQTAVQAPGSGAIIPRPIHVCDEVVDRVVTVSSQCNDRLRSALEDALREYRSTSTELRPRLPRLPMHKKNRALVCALDSLLKNIFESSENLVDTHSILYCGAVAACRVANVKFSNSDGATRPKNAAPAWQCRIERRIDEARVLIGKLYCFREGNTRPRVMRFVRRAFLGTEISPQEYMSRVTERIDFLKQKVCAWANRIRRYKRRVDRCSQNRIFQSDERWVYRAWERPEQSVTDVCRPDDVTTNTFWRSIWSVPVCHAEGGWMRDVERVCEAIPQMEKITITTVDIATAVRPLPNWKSPGPDGLHNFWLKWYSSSHALLASQFQSSLDSGSLPQFLTTGVTHLLHKTGSPAEPKNYRPITCLSTVYKLLTSILRVKINEHIESNSIMSYSQNGCRKGSRGTKELLLIDMAISQQVRRSRKDLSTCWIDYKKAYDSVPHTWLLKVLELYKVDATLHTFLESCMRQWKTVLRYPGCRPIQGNEEPVWIKRGIFQGDSLSPLWFCLALNPLSTLLEDSGLGYRLRRGGHTISHLLYMDDLKLFAPNNLRLMELLKVTETFSSAIRMEFGVDKCAVMHVKKGEIMESEGIQLSDSIQVRSLSSTETYKYLGMSEALGINGADMKQSLKERFFGRLKKVLNSLLSGGNKVRAFNGWVMPVLMYSFGILKWTQTELDALDRRVRTLLTANRMHHPRSSVMRLYIPRKCGGRGFLNAKTLHNREMCSLREYFLKADVGMHRDVVAVDKGLTPLSMANENWRKPVIHTTDDRKEVWKGKELHGRFYRALYGSDVDFSASVAWLRFGDLFGETEGFVCAIMDEVILTNNYRRHIMKDGTVDVCRACHRPGESIRHIISGCSRLANGEYLHRHNQVARIIHQQLALKYKLVDSEVPYYKYVPDPVLENDHVTLYWDRSIITDRTIIANKPDIVVIDRLARRTMIIDVTIPHDENLVKAEKEKQIKYLDLAHEVVDMWNVDSAVIVPIVVTANGLMAKSFDEHLSKLALHGWLKGLIQKAVLLDTARIVRRFLSLEP

SEQ ID NO: 29184 - protein, 1199 aa, Hecatera dysodea
MLTRAATLRARHPPPDSPLSSASPPPDIESQVSPAAAVASSSSDEYFSPPTSPPPVRRQGRGRPPRGLGPRGQPAPSRVPATGGCVQRMRWTQSMNENVMRAYYGSTEGGTNLTAYRLRMLSLFQDLEPTVNVSAQRLSDQVRVIQRSHRLDDAALERLRSEVLNNLIISTQTQTAVQAPVSGANTPQANNDSDEVDDRVVTVSSQYNNRLRSALEDALREYRSTPTELRPRLPRLPMHKKNRALVCALDSLLQNTFVSSENLVDTHSILYCGAVAACRLANVKFPSGDEAIRPKPAAPAWQCRIERRIDEARALIGKLYCFREGNTRPRVMRFVRRAFAGTGISPHEYTSRITERIDFLKQKVCAWANRIRRYKRRADRYSQNRMFQSDERWVYRTWERPEQSVTDECRPDDIATTTFWRSIWSVPVRHTEGDWMRDVERVCEAIPQMEKITITPTDIATAVRPLPNWKSPGPDGLHNFWLKWYSSSHAVLASQFQSSLESGSLPQFLTTGITHLLHKTGSPAEPKNYRPITCLSTVYKLLTSILRVKINEHIESNSIMSSSQNGCRKGSRGTKELLLIDMAISQQVRRSRKDLSTCWIDYKKAYDSVPHTWLMKVLELYKIDATLRTFLESCMRQWKTVLRYPGCRPIQGSDEPIWIKRGIFQGDSLSPLWFCLALNPLSTLLEDSGLGYRLRRGGQAISHLLYMDDLKLFAPNNLRLMELLKVTETFSSAIRMEFGVDKCAVMHVKKGEIMESEGIQLSDSIQVRSLSSTETYKYLGMSEALGINGADMKQSLKERFFGRLKKVLNSLLSGGNKVRAFNGWVMPVLMYSFGILKWTQTELDALDRRVRTLLTANRMHHPRSSVMRLYIPRKCGGRGFLNAKTLHNREMCSLREYFLETDVGMHRDVVAVDKGLTPLSMAKENWRKPVIHTTDDRKEVWKGKELHGRFYRALYGSDVDFSASVAWLRFGDLFGETEGFVCAIMDEVILTNNYRRHIMKDGTVDVCRACHRPGESIRHIISGCSRLANSEYLHRHNQVARIIHQQLALKYKLVNSEVPYYKYVPDPALENDHVTLYWDRSIITDRTIVANKPDIVVIDRLARRTMIIDVSIPHDENLVKAEKEKQIKYLDLAHEVVDMWDVDSAVIVPIIVTANGLMAKSFDDHLSKLALRSWVKGLIQKAVLLDTARIVRRFLSLQP

SEQ ID NO: 29185 - protein, 868 aa, Mythimna impura
MRYVRRAFSGTGISPPEYLSRVTERIDFLKQKVCAWANRIRRYKRRVDRYSQNRMFQSDERWVYRAWERPEQNVTDVTRPDAVATNAFWRNIWSVPVCHTEDGWMREVERVCEAIPEMEKVIISPTDVARAVRPLPNWKSPGPDGLQNFWLKWYSSSHALLASQFQSSLESGSLPQFLTTGVTHLLHKTGSTAEPKNYRPITCLSTVYKLLTSILRTKINQHIDNNSIMSASQNGCRNGSRGTKELLLIDMTISQQVRRSRKDLSTSWIDYKKAYDSVPHTWLMRVLELYKIDATLRTFLESCMGQWNTVLRYPGCRSIRRDDEPIWIKRGIFQGDSLSPLWFCLALNPLSTLLEESGLGYRLRRDGQVLSHLLYMDDLKLIAPNKLRLMELLKVTETFSNAIRMEFGVDKCAVMHVKRGEIMESEGIQLSDSIHLRSLSSTETYKYLGMSEALGINVADMKQSLKERFFGRLKKVLNSLLSGGNKVRAFNGWVMPVLMYSFGILKWTQTELDALDRRVRTLLTANRMHHPRSSVMRLYIPRKCGGRGFLNTKTLHNREVCSLREYFHKTDVGMHRDVVAVDKGLTPLSMAKENWRKPVVLTTDDRKEVWKSKELHGRFYRALHESDVDFAASVAWLRFSNLFGETEGFICAIMDEVILTNNYRRYIMKDGTIDVCRACHRPGESIRHIISGCSRLANGEYLHRHNQVARIIHQQLALKYNLVYSEVPYYRYVPDPVLENDHVTLYWDRSIITDRTIVANKPDIVVIDRLARRVMIVDVTIPHDENLVKAEKEKQIKYLDLAHEVVDMWNVDSAVIVPIVVTANGLIAKSFDDHLSKLSLRGWIKGLIQKAVLLDTARIVRRFLSLEP

SEQ ID NO: 29186 - protein, 1199 aa, Phlogophora meticulosa
MITRAATRRARPPSPDSPLSSASPPPDLGSPVTPAVAAASSSSDEYFSPPTSPTPVRRQGRGRPPKSLGSRGQPAPSQVPATGGCVQRMRWTQSMNENVMRAYYGSTEGGTNLTAYRVRMLSLFQGFEPTVNVSAQRLSDQVRVIQRNHRLDDAALDRLRSEMLSNHIVLTSTQTAVQAPAFNAILPRSNHVSNEADDRVDTVCSQYNDRLRSALEDALREYRSTPTELRPRLPRLPMHRKNRALVCALESLPKNFFESSEDLVDTHSILYCAAVAACRLANVKFPKNDLAIRPKPAVPAWQSRIERRIDGARVLIGKLYCFREGNTRPRVMRFVRRAFSGTGISPREYMSRIVERIDFLKQKVCAWANRIRRYKRRVDRYSQNRMFQSDERWVYRAWERPEQDVAGEHRPDDVATNAFWRSIWSVPVHHVEAHWMSDYESVCETIPEMEKIIITPEDVATAVRPVPNWKSPGPDGLHNFWLKWLSSSHTRLASQFQSCLESGSLPQFLTTGITHLLYKSGSTTEPKNYRPITCLSTVYKLLTSILRAKITEHIVGNSIMSASQNGCRNGSRGTKELLLIDMAISQQVRRSRKDLSTCWIDYKKAYDSVPHAWLTRVLELYKIDATLRTFLASCMGQWKTVLRYPGCRQIQGNDEPIWIKRGIFQGDSLSPLWFCLALNPLSTLLEDSGLGYRLKRGGQVISHLLYIDDLKLFAPNNLRLMELLKITESFSSAIRMEFGVDKCAVMHVKRGEIVESEGIQLSDSIHLRSLSSSENYKYLGMSEALGINATDMKQSLKERFFGRLKKVLNCLLSGGNKVRAFNGWVMPVLMYSFGILKWTQTELDALDRRVRTLLTANRMHHPRSSVMRLYIPRKCGGRGFLNAKTLHNHEVCNLRDYFLKTEVGMHRDVVAVDKGLTPLSMAKENWRKPVVLTTDDRKQVWQSKELHGRFYRALHGPDVDFLASVSWLRFGDLFGETEGFVCAIMDEVILTNNYRKHIMKDGTVDMCRACHRPGESIRHIISGCSRLANSEYLHRHNQVARIIHQQLALRYKLVESEVPYYKYVPDPVLEDDHITLYWDRSIITDRTIVANKPDIVVIDRLARRAMIVDVTIPHDENLVKAEKEKQIKYLDLAHEVVDMWNVDSAVIVPIVVTANGLLAKSLDDHLSRLSLHGWIKGLIQKAVLLDTARIVRRFLSLQP

SEQ ID NO: 29187 - protein, 1105 aa, Xestia xanthographa
MNENVMRAYYGSTEGGTNLTAYRVRMLSLFQGLEPTVNVSAQRLSDQVRVIQRSHRLDDAALDRLRSEVLSNLIVLTPTQTAVQVSAIDATPPRLNPVVVEEDDGVATVSSQCNDRLRSALENALHEYRSTPTELRPRLPRLPMHKKNRALVCALDSQLKNIFESSENLVDTHSILFCGAVAACRLANVKFPNCDVANRPKPAVPAWQRRIERRIDGARVLIGKLYCFREGNTRPRVMRFVRRAFSGTEISPQEYMSRVTERIDFLKQKVYAWANRIRRYKRRVDRYSQNRMFQSDERWVYRAWERPEQNMTDVCRPDDAATSSFWRSIWSVPVCHTEADWMRDVERVCEPIPEMEPIFITPLDVARAVRPLPNWKSPGPDGLHNFWLKWFSSSHTCLASQFQSSLESGSLPQFLTTGVTHLLLKSGSPAEPKNYRPITCLSTIYKLLTSILRVKINTHIDKNSIMSASQNGCRNGSRGTKELLLIDMAISQQVRRSRKDLSTCWIDYKKAYDSVPHTWLMRVLELYKIDTTLRTFLESCMGQWRTVLRYPGCRQIQGSDDPVWIKRGIFQGDSLSPLWFCLALNPLSTLLENSGLGCRLRKDGQVISHLLYMDDLKLFASNKLRLMELLKVTETFSNAIRMEFGVDKCAVMYVKRGEIMESEGLQLSDSIQLRSLSSSETYKYLGMSEALGINITDMKQSLKERFFSRLRKVLNSLLSGGNKVRAFNGWVMPVLMYSFGILKWTQTELDALDRRVRTLLTESRMHHPRSSVMRLYIPRKCGGRGFLNAKTLHNREVCSLREYFLKAEVGMHRDVVAVDKGLTPLSMAKENWHKPEVLTTDDRKEVWQGKELHGRFYRALHGPDVDFLASVSWLRFGDLFGETEGFVCAIMDEVMLTNNYRKYIMKDGTVDMCRACHLPGESIRHIISGCSRLANGEYLHRHNQVARIIHQQLALKYKLVKSEVPYYKYVPDPVLESDHVTLYWDRSIITDRTIVANKPDIVMIDRSARRVMIIDVTIPHDENLVKAEKEKQIKYLDLAHEVRDMWNMNSVIIVPIVVTANGLIAKSFDDHLSKLSLGGWIKGLIQKAVLLDTARIVRRFLSLQP

SEQ ID NO: 29188 - protein, 868 aa, Xestia xanthographa
MRFVRRAFSGTEISPQEYMSRVTERIDFLKQKVYAWANRIRRYKRRVDRYSQNRMFQSDERWVYRAWERPEQNMTDVCRPDDAATSSFWRSIWSVPVSHTEADWMRDVERVCEPIPEMEPIFITPLDVARAVRPLPNWKSPGPDGLHNFWLKWFSSSHTCLASQFQSSLESGSLPQFLTTGVTHLLHKSGSPAEPKNYRPITCLSTIYKLLTSILRVKINTHIDKNSIMSASQNGCRNGSRGTKELLLIDMAISQQVRRSRKDLSTCWIDYKKAYDSVPHTWLMRVLELYKIDTTLRTFLESCMGQWRTVLRYPGCRQIQGSDDPVWIKRGIFQGDSLSPLWFCLALNPLSTLLENSGLGCRLRKDGQVISHLLYMDDLKLFASNKLRLMELLKVTETFSNAIRMEFGVDKCAVMYVKRGEIMESEGLQLSDSIQLRSLSSSETYKYLGMSEALGINITDMKQSLKERFFSRLRKVLNSLLSGGNKVRAFNGWVMPVLMYSFGILKWTQTELDALDRRVRTLLTESRMHHPRSSVMRLYIPRKCGGRGFLNAKTLHNREVCSLREYFLKAEVGMHRDVVAVDKGLTPLSMAKENWHKPEVLTTDDRKEVWQGKELHGRFYRALHGPDVDFLASVSWLRFGDLFGETEGFVCAIMDEVMLTNNYRKYIMKDGTVDMCRACHLPGESIRHIISGCSRLANGEYLHRHNQVARIIHQQLALKYKLVESEVPYYKYVPDPVLESDHVTLYWDRSVITDRTIVANKPDIVMIDRSARRVMIIDVTIPHDENLVKAEKEKQIKYLDLAHEVRDMWNMNSVIIVPIVVTANGLIAKSFDDHLSKLSLGGWIKGLIQKAVLLDTARIVRRFLSLQP

SEQ ID NO: 29189 - protein, 1201 aa, Xestia xanthographa
MMLTRAAAARRAHLPTPDSSLSSASPPPDPRSPVSPVAAVASSSSDEYFSPPTSPPPVRRAGRGRPPTSLGLRGRQAPRRVPATGGCVQRMKWTQSMNENVMRAYYGSTEGGTNLTAYRVRMLSLFQDLEPTVIVSAQRLSDQVRVIQRSHRLDDAALDRLRSEVLSNLIVLTPTQTAVQVSAIDATPPRFNPAVVEEDDGVATVSSQCNDRLRSALENALHEYRSTPTELRPRLPRLPMHKKNRALVCALDSQLKNIFESSENLVDTHSILFCGAVAACRIANVKFPNCDVATRPKPAVPAWQRRIERRIDGARVLIGKLYCFREGNTRPRVMRFVRRAFSGTEISPQEYMSRATERIDFLKQKVYAWANRIRRYKRRVDRYSQNRMFQSDERWVYRAWERPEQNMTDVCRPDDAATSSFWRSIWSVPVCHTEADWMRDVERVCEPIPEMEPIFITPVDVARAVRPLPNWKSPGPDGLHNFWLKWFSSSHTCLASQFQSSLESGSLPQFLTTGVTHLLHKSGSPAEPKNYRPITCLSTIYKLLTSILRVKINTHIDKNSIMSASQNGCRNGSRGTKELLLIDMAISQQVRRSRKDLSTCWIDYKKAYDSVPHTWLMRVLELYKVDTTLRTFLESCMGQWKTVLRYPGCRQIQGSDEPVWIKRGIFQGDSLSPLWFCLALNPLSTLLENSGLGCRLRKDGQVISHLLYMDDLKLFAPNKLRLMELLKVTETFSSAIRMEFGVDKCAVMYVKRGEIMESEGLQLSDSIHLKSLSSSETYKYLGMSEALGINVTDMKQSLRERFFGRLRKVLNSLLSGGNKVRAFNGWVMPVLMYSFGILKWTQTELDALDRRVRTLLTESRMHHPRSSVMRLYIPRKCGGRGFLNAKTLHNREVCSLREYFLKAEVGMHRDVVAVDKGLTPLSMAKENWHRPEVLTTDDRKEVWQGKVLHGRFYRALHGPDVDFIASVSWLRFGDLFGETEGFVCAIMDEVMLTNNYRKYIMKDGTVDVCRACHLPGESIRHIISGCSRLANGEYLHRHNQVARIIHQQLALKYKLVESEVPYYKYVPDPVLENDHVTLYWDRSIITDRTIVANKPDIVMMDRSARRVMIIDVTIPHDENLVKAEKEKQIKYLDLAHEVRGMWNMNSVIIVPIVVTANGLIAKSFDDHLSKLSLGGWIKGLIQKAVLLDTARIVRRFLSLQP

SEQ ID NO: 29190 - protein, 1203 aa, Mamestra brassicae
MTSVTIKSAALQRARPPPPDPSLSSASPPPDIGSPLSPAVAVASSSSDEYFSPPTSPTPVRRQGRGRPPRGLGPRGQPAPSRVPATGGCVQRMRWTQSMNENVMRAYYGSTEGGTNLTAYRVRMLSLFQDLEPTVNVSAQRLSDQVRVIQRNHRLDDAALDRLRSEILNNLIISTPTQTAVQAPVNGRITPRPNNVSDEVYDRVVTVSSQCNDRLRSALEDALREYRSTPTELRPRLPRLPMHKKNRALVCALDSLLQNIFESSESLVDTHSILYCGAVAACRIANVKFPGCDEAIRPKPAAPAWQRRIERRIDETRALIGKLYCFREGNTRPRVMRFVRRAFSGTEISPRDFTSRVTERIDFLKQKVCAWASRIRRYKRRVDRYSQNRMFQSDERWVYRAWERPEQSVTDVCRPDDVATSIFWRSIWSVPICHAEGGWMRDVERVCEAIPQMEKITITTLDVAKAVRPLPNWKSPGPDGLHNFWLKWYSSSHALLASQFQSSLDSGSLPQFLTTGVTHLLHKTGSPTEPKNYRPITCLSTVYKLLTSILRAKINEHIESNSIMSASQNGCRKGSRGTKELLLIDMAISQQVRRSRKDLSTCWIDYKKAYDSVPHTWLMKVLELYKIDATLRTFLESCMRQWKTVLRYPGCRPIQGSDEPVWIKRGIFQGDSLSPLWLCLALNPLSTLLEDSGLGYRLRRGGQAISHLLYMDDLKLFAPNNLRLMELLKVTETFSSAIRMEFGVDKCAVMHVKKGEIMESEGIHLSDSIQVRSLSSTETYKYLGMLEALGINGTDMKQSLRERFFGRLKKVLNSLLSGGNKVRAFNGWVMPVLMYTVGILKWTQTELDALDRRVRTLLTANRMHHPRSSVMRLYIPRKCGGRGFLNAKTLHNREMCSLREYFLKADVGMHRYVVAVDKGLTPLSMAKENWRTPVILTTDDRKEVWKGKELHGRFYRALHGSDVDFSASVAWLRFGDLFGETEGFVCAIMDEVILTNNYRRHIMKDGTVDMCRACHRPGESIRHIISGCSRLANGEYLHRHNQVARIIHQQLALKYNLVDSEVPYYKYVPDPVLENDHVTLYWDRSIITDRTIVANKPDIVVIDRLARRTMIIDVTIPHDENLVKAEKEKQIKYLDLAHEVVDKWNVESAVIVPIVVTANGLMAKSFDDHLSKLALRSWVKGLIQKAVLLDTARIVRRFLSLEP

SEQ ID NO: 29191 - protein, 1154 aa, Mamestra brassicae
MITRAAARRAHPPPPGSSLSSASPTPDIGSQVSPVVAVASSSSDEYFSPPTSPTPVRRQGRGRPPRSLGSRGQPALSRVPAAGGCVQRMRWTQSMNENVMRAYYGSTEGGTNLTAYRVRMLSLFQDLEPTVNVSAQRLSDQVRVIQHNCRLDDAALERLRSEVLSNLIISTPTQTVVQAPASGAITPRPNNGSDEVDDRVVTVSSQCNDRLRSALEDALREYRLTPTELRPRLPRLPMHKKNRALVCALDSLLQNIFESSESLVDTHSILFCGAVAACRIANVKFPSCDETIRPKPAAPAWQCRIERRIDEARALIGKLYCFREGNTRPRVMRFVRRAFSGTGISPREYTFRVTERIDFLKQKVCAWANRIRRYKRRVDRYSQNRMFQSDERWVYRAWERPEQSVTDVYRPDDVATSTFWRSIWSVPICHAEGGWMRDVERVCEAIPQMEKITITTLDIAKAVRPLPNWKSPGPDGLHNFWLKWYSSSHALLASQFQSSLESGSLPQFLTTGITHLLHKTGSPAEPKNYRPITCLSTVYKLLTSILRAKINEHIESNSIMSASQNGCRKGSRGTKELLLIDMAISQQVRRSRKDLSTCWIDYKKAYDSVPHTWLMKVLELYKIDATLRTFLESCMRQWKTVLRYPGCQPIQGSDEPVWIKRGIFQGDSLSPLWFCLALNPLSTLLEDSGLGYRLRRGGQAISHLLYMDDLKLFAPNNLRLMELLKVTETFSSAIRMEFGVDKCAVMHVKKGEIMESEGIQLSDSIQVRSLSSTESYKYLGMSEALGINGTDMKQSLRERFFGRLKKVLNSLLSGGNKVRAFNGWVMPVLMYTFGILKWTQTELDALDRRVRTLLTANRMHHPRSSVMRLYIPRKCGGRGFLNAKTLHNREMCSLREYFLKADVGMHRDVVAVDKGLTPLSMAKENWRKPVILTTDDRKEVWKGKELHGRFYRALYGSDVDFSASVAWLRFGDLFGETEGFVCAIMDEVILTNNYRKHIMKDGTVDVCRACHRPGESIRHIISGCSRLANGEYLHRHNQVARIIHQQLALKYKLVDSEVPYYKYVPDPVLENDHVTLYWDRSIITDRTIVANKPDIVVIDRLARRTMIIDVTIPHDENLVKAEKEKQIKYLDLAHEVVDMWTRLSLCRLSLRPMA

SEQ ID NO: 29192 - protein, 962 aa, Noctua fimbriata
MHNKNRALVCALDSQLENIFESSENLVDTHSILYCGAVAACRLANVKFPNCDVATRPKPAVPAWQRRIERRIDGARVLIGKLHCFREGNTRPRVMRFVRRAFSGTGISPQEYMSRVTERIDFLKQKVYAWANRIRRYKRRVDRYSQNRMFQSDERWVYRAWERPELNMTDVCRPDDAATSSFWRSIWSVPVCHTEADWMRDVERVCEPIPEMEPILITPLDIARAVRPLPNWKSPGPDGLHNFWLKWLSSSHTCLASQFQSSLESGSLPQFLTTGVTHLLHKSGSPAEPKNYRPITCLSTVYKLLTSILRAKINTHIDKNSIMSASQNGCRNGSRGTKELLLIDMAISQQVRRSRKDLSTCWIDYKKAYDSVPHTWLMRVLELYKIDATLRAFLESCMGQWRTVLRYPGCRQIQGNDEPVWIKRGIFQGDSLSPLWFCLALNPLSTLLEDSGLGYRLRRGGQVISHLLYMDDLKLFAPNKLRLMELLKVTETFSSAIRMEFGVDKCAVMYVKQGEIMESEGIQLSDSIHLRTLSSTESYKYLGMSEALGINVTDMKQSLKERFFGRLNKVLHSLLSGGNKVRAFNGWVMPVLMYSFGVLKWTQTELDALDRRVRTLLTANRMHHPRSSVMRLYIPRKCGGRGFLNAKSLHNREMCSLREYFLKVEVGMHRDVVAVDKGLTPLSMAKENWRKPEVLTTDDRKEVWQGKELHGRFYRALHGPDVDFLASVSWLRFGDLFGETEGFVCAIMDEVMLTNNYRKYIMKDGTVDVCRACHRPGESIRHIISGCSRLANGEYLHRHNQVARIIHQQLALKYKLVESEVPYYKYVPDPVLEKDHVTLYWDQSIITDRTIVANKPDIVVIDRSARRVMIVDVTIPHDENLVKAEKEKQIKYLDLAHEVVDMWNVNSAIIVPIVVTANGLIAKSLDDHLSRLSLGGWIKGLIQKAVLLDTARIVRRFLSLEP

SEQ ID NO: 29193 - protein, 1202 aa, Noctua fimbriata
MITRAAYRRARLPPPDPSLSSASPPPESSPIVSAVTPAVAVASSSSDEYFSPPTSPTPVRRQGRGRPPRSLGLRGHPAPSRVPAAGGCVQRMRWTHSINENVMRAYYGSTEGGTNLTAYRVGMLSLFQVLEPTVNVSAQRLSDQVRVIQRNHMLDDAVLDRLRSEVLSNRIVLTPAQTAVQASAIDATPPRFNPAVVEEDDRVAVVSSQCNDRLRSALEDALREYRSTPTEFRPRLPRLPMHNKNRALVCALDSQLENIFESSENLVDTHSILYCGAVAACRLANVKFPNCDVATRPKPAVPAWQRRIERRIDGARVLIGKLHCFREGNTRPRVMRFVRRAFSGTGISPQEYMSRVTERIDFLKQKVYAWANRIRRYKRRVDRYSQNRMFQSDERWVYRAWERPELNMTDVCRPDDAATSSFWRSIWSVPVCHTEADWMRDVERVCEPIPEMEPILITRLDIARAVRPLPNWKSPGPDGLHNFWLKWLSSSHTCLASQFQSSLESGSLPQFLTTGVTHLLHKSGSPAEPKNYRPITCLSTVYKLLTSILRAKINTHIDKNSIMSASQNGCRSGSRGTKELLLIDMAISQQVHRSRKDLSTCWIDYKKAYDSVPHTWLMRVLELYKIDATLRAFLESCMGQWRTVLRYPGCGQIQGNDEPVWIKRGIFQGDSLSPLWFCLALNPLSTLLEDSGLGYRLRRGGQVISHLLYMDDLKLFAPNKLQLMELLKVTETFSSAIRMEFGVDKCAVMYVKQGEIMESEGIQLSDSIHLRTLSSTESYKYLGMSEALGINVTDMKQSLKERFFGRLNKVLHSLLSGGNKVRAFNGWVMPVLMYSFGVLKWTQTELDALDRRVRTLLTANRMHHPRSSVMRLYIPRKCGGRGFLNAKSLHNREMCSLREYFLKVEVGMHRDVVAVDKGLTPLSMAKENWRKPEVLTTDDRKEVWQGKELHGRFYRALHGPDVDFLASVSWLRFGDLFGETEGFVCAIMDEVMLTNNYRKYIIKDGTVDVCRACHRPGESIRHIISGCSRLANGEYLHRHNQVARIIHQQLALKYKLVESEVPYYKYVPDPVLEKDHVTLYWDQSIITDRTIVANKPDIVVIDRSARRVMIVDVTIPHDENLVKAEKEKQIKYLDLAHEVVDMWNVNSAIIVPIVVTANGLIAKSLDDHLSKLSLGGWIKGLIQKAVLLDTARIVRRFLSLEP

SEQ ID NO: 29194 - protein, 1050 aa, Noctua fimbriata
MLDDAVLDRLRSEVLSNRIVLTPAQTAVQASVIDATTPRFNPAVVEEDDRVAVVSSQCNDRLRSALEDALREYRSTPTELRPRLPRLPMHNKNRALVCALDSQLENIFESSENLVDTHSILYCGAVAACRLANVKFPNCDVATRPKPAVPAWQRRIERRIDGARVLIGKLHCFREGNTRPRVMRFVRRAFSGTGISPQEYMSRVTERIDFLKQKVYAWANRIRRYKRRVDRYSQNRMFQSDERWVYRAWERPELNMTDVCRPDDAATSSFWRSIWSVPVCHTEADWMRDVERVCEPIPEMEPILITPLDIARAVRPLPNWKSPGPDGLHNFWLKWLSSSHTCLASQFQSSLESGSLPQFLTTGVTHLLHKSGSPAEPKNYRPITCLSTVYKLLTSILRAKINTHIDKNSIMSASQNGCRNGSRGTKELLLIDMAISQQVHRSRKDLSTCWIDYKKAYDSVPHTWLMRVLELYKIDATLRAFLESCMGQWRTVLRYPGCRQIQGNDEPVWIKRGIFQDDSLSPLWFCLALNPLSTLLEDSGLGYRLRRGGKVISHLLYMDDLKLFAPNKLQLMELLQVTETFSSAIRMEFGVDKCAVMYVKRGEIMESEGIQLSDFIHLRSLSSSESYKYLGMSEALGINVTDMKQSLKERFFGRLNKVLHSLLSGGNKVRAFNGWVMPVLMYSFGVLKWTQTELDALDRRVRTLLTANRMHHPRSSVMRLYIPRKCGGRGFLNAKSLHNREMCSLREYFLKVEVGMHRDVVAVDKGLTPLSMAKENWRKPEVLTTDDRKEVWQGKELHGRFYRALHGPDVDFLASVSWLRFGDLFGETEGFVCAIMDEVMLTNNYRKYIMKDGTVDVCRACHRPGESIRHIISGCSRLANGEYLHRHNQVARIIHQQLALKYKLVESEVPYYKYVPDPVLEKNHVTLYWDQSIITDRTIVANKPDIVVIDRSARRVMIVDVTIPHDENLVKAEKEKQIKYLDLAHEVVDMWHVNSAIIVPIVVTANGLIAKSLDDHLSKLSLGGWIKGLIQKAVLLDTARIVRRFLSLEP

SEQ ID NO: 29195 - protein, 1202 aa, Noctua fimbriata
MITRAAYRRARLPPPDPSLSSASPPPESSPIVSAVTPAVAVASSSSDEYFSPPTSPTPVRRQGRGRPPRSLGLRGHPAPSRVPAAGGCVQRMRWTHSINENVMRAYYGSTEGGTNLTAYRVGMLSLFQVLEPTVNVSAQRLSDQVRVIQRNHMLDDAVLDRLRSEVLSNRIVLTPAQTAVQASVIDATPPRFNPAVVEEDDRVAVVSSQCNDRLRSALEDALREYRSTPTELRPRLPRLPMHNKNRALVCALDSQLENIFESSENLVDTHSILYCGAVAACRLANVKFSNCDVATRPKPAVPAWQRRIERRIDGARVLIGKLHCFREGNTRPRVMRFVRRAFSGTGISPQEYMSRVTERIDFLKQKVYAWANRIRRYKRRVDRYSQNRMFQSDERWVYRAWERPELNMTDVCRPDDAATSSFWRSIWSVPVCHTEADWMRDVERVCEPIPEMEPILITPLDIARAVRPLPNWKSPGPDGLHNFWLKWLSSSHTCLASQFQSSLESGSLPQFLTTGVTHLLHKSGSPAEPKNYRPITCLSTVYKLLTSILRAKINTHIDKNSIMSAFQNGCRNGSRGTKELLLIDMAISQQVRRSRKDLSTCWIDYKKAYDSVPHTWLMRVLELYKIDATLRAFLESCMGQWRTVLRYPGCRQIQGNDEPVWIKRGIFQGDSLSPLWFCLALNPLSTLLEDSGLGYRLRRGGQVISHLLYMDDLKLFAPNKLQLMELLKVTETFSSAIRMEFGVDKCAVMYVKRGEIMESEGIQLSDFIHLRSLSSSESYKYLGMSEALGINVTDMKQSLKERFFGRLNKVLHSLLSGGNKVRAFNGWVMPVLMYSFGVLKWTQTELDALDRRVRTLLTANRMHHPRSSVMRLYIPRKCGGRGFLNAKSLHNREMCSLREYFLKVEVGMHRDVVAVDKGLTPLSMAKENWRKPEVLTTDDRKEVWQGKELHGRFYRALHGPDVDFLASVSWLRFGDLFGETEGFVCAIMDEVMLTNNYRKYIMKDGTVDVCRACHRPGESIRHIISGCSRLANGEYLHRHNQVARIIHQQLALKYKLVESEVPYYKYVPDPVLEKNHVTLYWDQSIITDRTIVANKPDIVVIDRSARRVMIVDVTIPHDENLVKAEKEKQIKYLDLAHEVVDMWHVNSAIIVPIVVTANGLIAKSLDEHLSKLSLGGWIKGLIQKAVLLDTARIVRRFLSLEP

SEQ ID NO: 29196 - protein, 1202 aa, Noctua fimbriata
MITRAAYRRARLPPPDPSLSSASPPPESSPIVSAVTPAVAVASSSSDEYFSPPTSPTPVRRQGRGRPPRSLGLRGNPAPSRVPAAGGCVQRMRWTHSINENVMRAYYGSTEGGTNLTAYRVGMLSLFQVLEPTVNVSAQRLSDQVRVIQRNHMLDDAVLDRLRSEVLSNRIVLTPAQTAVQASVIDATPPRFNPAVVEEDDRVAVVSSQCNDRLRSALEDALREYRSTPTELRPRLPRLPMHNKNRALVCALDSQLENIFESSENLVDTHSILYCGAVAACRLANVKFSNCDVATRPKPAVPAWQRRIERRIDGARVLIGKLHCFREGNTRPRVMRFVRRAFSGTGISPQEYMSRVTERIDFLKQKVYAWANRIRRYKRRVDRYSQNRMFQSDERWVYRAWERPELNMTDVCRPDDAATSSFWRSIWSVPVCHTEADWMRDVERVCEPIPEMEPILITPLDIARAVRPLPNWKSPGPDGLHNFWLKWLSSSHTCLASQFQSSLESGSLPQFLTTGVTHLLHKSGSPAEPKNYRPITCLSTVYKLLTSILRAKINTHIDKNSIMSASQNGCRNGSRGTKELLLIDMAISQQVRRSRKDLSTCWIDYKKAYDSVPHTWLMRVLELYKIDATLRAFLESCMGQWRTVLRYPGCRQIQGNDEPVWIKRGIFQGDSLSPLWFCLALNPLSTLLEDSGLGYRLRRGGQVISHLLYMDDLKLFAPNKLQLMELLKVTETFSSAIRMEFGVDKCAVMYVKRGEIMESEGIQLSDFIHLRSLSSSESYKYLGMSEALGINVTDMKQSLKERFFGRLNKVLHSLLSGGNKVRAFNGWVMPVLMYSFGVLKWTQTELDALDRRVRTLLTANRMHHPRSSVMRLYIPRKCGGRGFLNAKSLHNREMCSLREYFLKVEVGMHRDVVAVDKGLTPLSMAKENWRKPEVLTTDDRKEVWQGKELHGRFYRALHGPDVDFLASVSWLRFGDLFGETEGFVCAIMDEVMLTNNYRKYIMKDGTVDVCRACHRPGESIRHIISGCSRLANGEYLHRHNQVARIIHQQLALKYKLVESEVPYYKYVPDPVLEKNHVTLYWDQSIITDRTIVANKPDIVVIDRSARRVMIVDVTIPHDENLVKAEKEKQIKYLDLAHEVVDMWHVNSAIIVPIVVTANGLIAKSLDEHLSKLSLGGWIKGLIQKAVLLDTARIVRRFLSLEP

SEQ ID NO: 29197 - protein, 1203 aa, Atethmia centrago
MLTRAASKRARPPPPDSTLSSASPPPVSSPTVSAVITPAAVVASSSSDEYFSPPTSPTPVRRQGRDRPPKSLGLRGHPAPSRVPAAGGCVQRMRWTQSMNENVMRAYYGSTEGGTNLTAYRVRMLSLFQELEPTVNVSAQRLSDQVRVIQRNRRLDDATLDRLRSEVLSNYIISTPAQTAVHTPIIDVIPPRSNHGVEEEDDRAATVSSQCNVRLRSALEDAFREYRSTPTELRPRLPRLPMHKKNRALMCALDSQLKVFFESSEDLVDTHSILYCAAVAACRLANVKFPNSDGATRPKPAVPAWQCRIERRIDKARVLIGKLFCFREGNTRPRVMRFVRRAFSGTGISPREYMSHITERIDFLKQKVCAWASRIRRYKRRVDRYTQNRMFQSDERWVYRAWEQPKQNVTDVCRPDDATTTAFWRSIWSVPVCHVEADWMRDVERVCETIPEMEVVIITPSDIARAVRPLPNWKSPGPDGLHNFWLKWLTSSHTCLASQFQSSLESGSLPQFMTTGITHLLHKSGSPAEPKNYRPITCLSTVYKLLTSILRAKINTHIDSNSIMSASQNGCRNGSRGTKELLLIDMAISQQVRRSRKDLSTCWIDYKKAYDSVPHTWLMRVLELYKIDTTLRTFLESCMGQWRTVLRYPGCRQIQGNDEPVWIKRGIFQGDSLSPLWFCLALNPLSMQLEDSGLGYRLRRGGQIISHLLYMDDLKIFAPNKLQLMKLLKVTETFSSAIRMEFGVDKCAVMHVKRGEIMESEGIQLSDSIHLRSLSSPESYKYLGMSEALGINVTDMKQSLKERFFGRLKKVLISLLSGGNKVRAFNSWVMPVLTYSFGILKWTQTELDALDRRVRTLLTANRMHHPRSSVMRLYIPRKCGGRGFLNAKTLHNREICSLREYFLKTEVGMHRDVVAVDKGLTPLSMAKENWCKPVVLTTDDRKEIWQSKELHGRFYRALHEPDVDFLASVSWLRFGDLFGETEGFVCAIMDEVILSNNYRRHIMKDGTVDVCRACHRPGESIRHIISGCSRLANGEYLHRHNQVARIIHQQLALKYKLVNSEVPYYEYVPDPVLENDHVTLYWDRSIITDRTIVANKPDIVVIDRLARRAMIVDVTIPHDDNLVKAEKEKQIKYLDLAHEVVDMWNVNSAVIVPIVVTANGLMARSLNHHLSRLALDGWIKGLIQKAVLLDTARIVRRFLSLEP

SEQ ID NO: 29198 - protein, 1111 aa, Atethmia centrago
MRWTQSMNENVMRAYYGSTEGGTNLTAYRVRMLSLFQKLEPTVNVSAQRLSDQVRVIQRNHRLDDAALDRLRSEVLSNHIVSTPAQTATHAPIINAIPPRSNHDVEEEDDRVATVSSQCNVRLRSALEDAFREYRSTPTELRPRLPRLPMHKKNRALVCTLDSLLKDFFESSEDLVDTHSILYCAAVAACRLANVKFPNCDGATRPKPAVPAWQCRIERRIDGARVLIGKLYCFREGNTRPRVMRFVRRAFSGTGISPREYMSRVTERIDFLKQKVCAWASRIRRYKRRVDRYTQNRMFQSDERWVYRAWERPEQNETDVCRPDDATTTAFWRSIWSVPVCHAEADWMRDVERVCETIPEMDVVIITPSDIARAVRPLPNWKSPGPDGLHNFWLKWLTSSHTCLASQFQSSLESGSLPQFLTTGITHLLHKSGSPAEPKNYRPITCLSTVYKLLTSILRAKINTHIDSNSIMSASQNGCRNGSRGTKELLLIDMAISQQVRRFRKDLSTCWIDYKKAYDSVPHTWLMRVLEFYKIDTTLRTFLESCMGQWRTVLRYPGCRQIQGNDEPVWIKRGIFQGDSLSPLWFCLALNPLSTLLEDSGLGYRLRRGGQVISHLLYMDDLKIFAPNKLQLMELLKVTETFSSAIRMEFGVDKCAVMHVKRGEIMESEGIQLSDSIHLRSLSSPESYKYLGMSEALGINVTDMKQSLKERFFGRLKKVLISPLSGGNKVRAFNGWVMPVLMYSFGILKWTQTELDALDRRVRTLLTANRMHHPRSSVMRLYIPRKCGGRGFLNAKTLHNREICSLREYFLKTEVGMHRDVVAVDKGLTPLSMAKENWCKPVILTTDDRKEIWQNKELHGRFYRALHEPDVDFLASVSWLRFGDLFGETEGFVCAIMDEVILTNNYRRHIMKDGTVDVCRACHRPGESIRHIISGCSRLANGEYLHRHNQVARIIHQQLALKYKLVNSEVPYYKYAPDPVLENDHVTLYWDRSIITDRTIVANKPDIVVIDRLARRAMIVDVTIPHDENLVKAEKEKQIKYLDLAHEVVDMWNVDSAVIVPIVVTANGLMAESLNHHLSRLSLGGWIKGLIQKAVLLDTARIVRRFLSLES

SEQ ID NO: 29199 - protein, 1110 aa, Mesoligia furuncula
MRWTQSMNENVMRAYYGSTEGGINLTAYRDRMLSLFQELEPTVNVSAQRLSDQVRVIQRNHRLDDIALDRLRSEVLSNHIVSTSAQTAAQVSTVDAIPPRFNRVEEEDDRVDTVSSQCNVRLRSALEDALREYRSTPTELRPRLPRLPMHKKNRALVCALDSQLKNFFESSEDLVDTHSILYCAAVAACRLANVKFSSCDGATRPKPAVPAWQRRIERRIDGARVLIGKLYCFREGNTRPRVMRFVRRAFSGTGISPREYMSRVTERIDFLKQKVCAWASRIRRYKRRVDRYTQNRMFQSDERWVYRAWERPEQNVTDVCRPDDAATSAFWCSIWSVPVCHTEAGWMQDVERVCESVPEMEKVLITPSDVARAVRPLSNWKSPGPDGLHNFWLKWLISSHTCLASQFQSSLESGSLPQFLTTGVTHLLHKSGSPAEPKNYRPITCLSTVYKLLTSILRAKINKHIESNSIMSASQNGCRNGSRGTKELLLIDMAISQQVRRSRKDLLTCWIDYKKAYDSVPHTWLMRVLELYKIDATLRTFLESCMGQWKTVLRYPGCRQIQGNDEPVWIKRGIFQGDSLSPLWFCLALNPLSTLLEDSGLGYRLRRGGQVISHLLYMDDLKLFAPNKLRLMELLKVTKTFSSAIKMEFGVDKCAVMHVKRGEIMESEGIQLSDSISLRSLSSSESYKYLGMSEALGINDADMKQSLKERFFCRLKKVLISLLSGGNKVRAFNGWVMPVLMYSFGILKWTQTELDALDRRVRTLLTANRMHHPRSSVMRLYIPRKCGGRGFLNAKTLHNREVCSLREYFLKTEVGMHRDVVAVDKGLTPLSMAKENWRKPVVLSTDDRKRLWQSKELHGRFYRALHEPGVDFIASVSWLRFGDLFGETEGFVCAIMDEVILTNNYRRHIMKDGTVDVCRACHRPGESIRHIISGCSRLANGEYLHRHNQVARIIHQQLALKYKLVDSEVPYYKYVPDPVLENDHVTLYWDRSIITDRTIVANKPDIVVIDRLARRTMIVDVTIPHDGNLVKAEKEKQIKYLDLAHEVVDMWNVSSAIIVPIVVSANGLMAESLDQHLSRLSLGGWIKGLIQKAVLLDTARIVRRFLSLEP

SEQ ID NO: 29200 - protein, 868 aa, Xestia c-nigrum
MRFVRRAFSGTDVSFRDYLARITERIDFLKQKICAWASRIRRYKRRVERYTQNRSFQSDERWVYRAWERPDQGLTDTRLPDDDAMCSFWRSIWSMPVSHTEGDWIRKVEQVCDQIQEMGAIIISPQDVACAVRPLPNWKSPGPDGLHNFWIKWFQKSHACLASQFQSALESGSLPQFMTTGITHLLHKSGSTAEPKNYRPITCLPTVYKVLTSILRAKINKHIESNSIMSTSQNGCRNGSRGTKELLLIDMAISQQVRRSRKNLSTCWIDYKKAYDSVPHTWLMRVLELYKINATLRAFLESCMGQWKTVLRYPGCRQIQGSDEPVWIKRGIFQGDSLSPLWFCLALNPLSTLLENSGLGYRLRKDGQVISHLLYMDDLKLFAPNKLQLLELLKVTETFSNAIRMEFGVDKCAVMYVKRGEIMESEGLQLSDSIHLRSLSSSESYKYLGMSEALGINVTDMKQSLKERFFGRLKKVLNSLLSGGNKVRAFNGWVMPVLMYSFGILKWTQTELDALDRRVRTLLTANRMHHPRSSMMRLYIPRKCGGRGFLNAKNLHNREVCSLREYFLEADVGMHRDVVSVDKGLTPLSLANGNWRKPKVLDTNDRREEWQGKELHGRFYRALHGPNVDFLASVSWLRFGDLFGETEGFVCAIMDEVMMTNNYRKYIVKDGTVDICRACHRPGESIRHIISGCSSLANGEYLHRHNLVARIIHQQLALKYNLVESEVPYYKYTPDPVLVNGNITLYWDRPITTDRTVVANRPDIVVIDRLERRTMIVDITVPHDENLVKAEQDKKNKYLDLAREVVDMWDVSTAIIVPIVVSANGLIAKSLDQHLRRLSLGSWIKGLIQKAVLLDTARIVRRFLSQEP

SEQ ID NO: 29201 - protein, 1200 aa, Xestia c-nigrum
MITRAASRRRARPPTPDSSLSSASPPPDPGSPVPPVAAVASSSSDEYFSPPTSPTPVRRAGRGRPPRSLGLRGQQAPSRVPATGGCVQRMRWTQSMNENVMRAYYGSTEGGINLTAYRDRMLSLFQDLEPAVNVSAQRLSDQVRVIQRSHRLDDATLDRLRSEVLSNLITITPTQTAVHMSVVNATLPRSNPVVVEEDDRVALVSSQCNDRLRSALDNALREYRSISAELRPRLPRLPMHKKNRALVCALDSQLKNIFESSEDLVDTHSILFCGAVAACRLANVKFPNCDIAIRPKPAVPAWQRRIERRIDGARVLIGKLYCFREGNTRPRVMRFVRRAFSGTEISPQEYMSRVTERIDFLKQKVYAWASRIRRYKRRVDRYSQNRMFQSDERWVYRAWERPQQNMTDVCRPDDAATSSFWRSIWSVPVCHSEADWMRDVERVCEPIPTMEPILITPLDIARAVRPLPNWKSPGPDGLHNFWLKWFISSHTCLASQFQSSLESGSLPQFLTTGVTHLLHKSGSPAEPKNYRPITCLSTVYKLLTSILRMKINTHVDSNSIMSASQNGCRNGSRGTKELLLIDMAISQQVRRARKDLSICWIDYKKAYDSVPHSWLKRVLELYKIDATLRAFLESCMGQWRTVLRYPGCRQIQGNDEPVWIKRGIFQGDSLSPLWFCLALNPVSTLLENSGLGYRLRKDGQVISHLLYMDDLKLFAPNKLQLMELLKVTETFSSAIGMEFGVDKCAVMYVKRGKIMGSEGLQLSDSIHLRSLSSSESYKYLGMSEALGINVTDMKQSLRERFFGRLKKVLNSLLSGGNKVRAFNGWVMPVLMYSFGILKWTQTELDALDRRVRTLLTENRMHHPRSSVMRLYILRKCGGRGFLNAKTLHNREVCSLREYFLKADVGMHRDVAAVDKGLTPLSMAKENWRKPVVLTTDDRMKEWQGKELHGRFYRALHGPDVDFLASVSWLRFGDLFGETEGFVCAIMDEVMLTNNYRKYIMKDGTVDVCRACHLPGESIRHIISGCSRLANGEYLHRHNQVARIIHQQLALKFNLVELEVPYYKYVPDPVLVKDHVTLYWDQSIITDRTIVANKPDIVVIDRSARRVMIIDVTIPHDENLVKAEKEKQIKYLDLAHEVRDMWNMDSVIIVPIVVSANGLIAKSLDEHLSKLSLGGWIKGLIQKAVLLDTARIVRRFLSLQP

SEQ ID NO: 29202 - protein, 868 aa, Xestia c-nigrum
MRFVRRAFSGTEISPQEYMSRVTERIDFLKQKVYAWASRIRRYRRRVDRYSQNRMFQSDERWVYRAWERPQQNMTDVCRPDDAATSSFWRSIWSVPVCHSEADWMRDVERVCEPIQTMEPILITPLDIARAVRPLPNWKSPGPDGLHNFWLKWFSSSHTCLASQFQSSLESGSLPQFLTTGITHLLHKSGSPAEPKNYRPITCLSTVYKLLTSILRTKINTHVDSNSIMSASQNGCRNGSRGTKELLLIDMAISQQVRRARKDLSTCWIDYKKAYDSVPHSWLRRVLELYKIDATLCTFLESCMGQWRTVLRYPGCRQIQGNDEPVWIKRGIFQGDSLSPLWFCLALNPVSTLLENSGLGYRLRKDGQVISHLLYMDDLKLFAPNKLQLMELLKVTETFSSAIGMEFGVDKCAVMYVKRGKIMGSEGLQLSDSIHLRSLSSSESYKYLGMSEALGINVTDMKQSLKERFFGRLKKVLNSLLSGGNKVRAFNGWVMPVLMYSFGILKWTQTELDALDRRVRTLLTENRMHHPRSSVMRLYIPRKFGGRGFLNAKTLHNREVCSLREYFLKADVGMHRDVVAVDKGLTPLSMAKENWRKPVVLTTDDRKKEWQGKELHGRFYRALHGPDVDFLASVSWLRFGDLFGETEGFVCAIMDEVMLTNNYRKYIMKDGTVDVCRACHCPGESIRHIISGCSRLANGEYLHRHNQVARIIHQQLALKFKLVESEVPYYKYVPDPVLVKDHVTLYWDQSIITDRTIVANKPDIVVIDRSARRVMIIDVTIPHDENLVKAEKEKQMKYLDLAHEVRDMWNMNSVIIVPIVVTANGLIAKSLDEHLSKLSLGGWIKGLIQKAVLLDTARIVRRFLSLQP

SEQ ID NO: 29203 - protein, 1199 aa, Xestia c-nigrum
MITRAALRRARLATPDSSLSSASPPPDPGSPVSPAVAVASSSSDEYFSPPTSPTPVRRAGRGRPPRSLGLRGQQAPSRVPATGGCVQRMRWTQSMNENVMRAYYGSTEGGTNLTVYRVRMLSMFQDLEPTVNASAQRLSDQVRVIQRNHLLDDAVLDRLRSEVLNNRIIFTQAQTAVQASAIHATPPRSNPAVIEEDDRVATISSQCNDRLRSALDNALREYRSISAELRPRLPRLPMHKKNKALVCALDSQLKNIFESSEDLVDTHSILFCGAVAACRLANVKFPNCDIATRPKPAVPAWQRRIERRIDGARVLIGKLYCFREGNTRPRVMRFVRRAFSGTEISPQEYMSRVTERIDFLKQKVYAWASRIRRYKRRVDRYSQNRMFQSDERWVYRAWERPQQNMTDECRPDDAATSSFWRSIWSVPVCHSEADWMRDVERVCEPIPTMEPILITPLDIARAVRPLPNWKSPGPDGLHNFWLKWFSSSHTCLASQFQSSLESGSLPQFLTTGVTHLLHKSGSPAEPKNYRPITCLSTVYKLLTSILRTKINTHVDSNSIMSASQNGCRNGSRGTKELLLIDMAISQQVRRARKDLSTCWIDYKKAYDSVPHSWLKRVLELYKIDATLRAFLESCMGQWRTVLRYPGCRQIQGNDEPVWIKRGIFQGDSLSPLWFCLALNPVSTLLENSGLGYRLRKDGQVISHLLYMDDLKLFAPNKLQLMELLKVTETFSSAIGMEFGVDKCAVMYVKRGKIMGSEGLQLSDSIHLRSLSSSESYKYLGMSEALGINVTDMKQSLKERFFGRLKKVLNSLLSGGNKVRAFNGWVMPVLMYSFGILKWTQTELDALDRRVRTLLTENRMHHPRSSLMRLYIPRKCGGRGFLNAKTLHNREVCSLREYFLKADVGMHRDMVAVDKGLTPLSMAKENWRKPVVLTTDDRKNEWQGKELHGRFYRALHGPDVDFLASVSWLRFGDLFGETEGFVCAIMDEVMLTNNYRKYIMKDGTVDMCRACHCPGESIRHIISGCSRLANGEYLHRHNQVARIIHQQLALKFKLVESEVPYYKYVPDPVLVKDHVTLYWDQSIITDRTIVANKPDIVVIDRSARRVMIIDVTIPHDENLVKAEKEKQMKYLDLAHEVRDMWNMNSVIIVPIVVTANGLIAKSLDEHLSKLSLGGWIKGLIQKAVLLDTARIVRRFLSLQP

SEQ ID NO: 29204 - protein, 1203 aa, Sesamia nonagrioides
MLTRSAARQRARPPSPDSLLSSASPPPVSSATVNAVTTPAAAVALSSSDEYFSPPTSPTPVRRQGRGRPPKSLGLRGHPAPSRVPAAGGCVQRMRWSQTMNENVMRAYYGATEGGTNLTAYRERMLSLFQALEPTVNVSAQRLSDQVRVIQRNHRLDDTALDRLRSEVLSNQIAPTLTQTAALASIIDAVPSRSNRVEEEDDRVETVSSQYNDRLRSTLEDAFREYRSTPTDLRPRLPRLPMHKKNRALVSALDSQLKNVFESSEDLIDTHSILFCAAVAACRLANIKFPNCDEANRPKPAVPAWQHRIERRIDGARVLIGKLYCFREGNTRPRVMRFVRQAFSGTGISPREYLTHVTERIDFLKQKVCAWANRIRRYKRRVDRYTQNRMFQSDERWVYRAWERSELNEADVCRPDVAATSAFWRSIWSVPVCHAEGDWIQNVEQVCEMIPEMDTILITPIDVATAVRSLPNWKSPGPDGLHNFWLKWLSSSHTCLASQFQSSLESGSLPQFLTTGITHLLHKSGSTAEPNNYRPITCLPTVYKVLTSILKAKINKHLDSNSIMSVSQNGCKSGSRGTKELLLIDMAISQQVRRSRKDLSTCWIDYKKAYDSVPHTWLMRVLELYKINATLRTFLRSCMGQWKTVLRYPGSRRIQGTDEPVWIKRGIFQGDSLSPLWFCLALNPLSTLLEDSGLGYRLKRGGQVISHLLYMDDLKLFAPNKLHLMKLLNVTETFSSGIKMEFGVDKCAVMHVERGQIMESEGITLPDSIHLRSLSSFESYKYLGMSEALGINDADMKQSLKERFFGRLKKVLKSLLSGGNKVRAFNGWVMPVLMYSFGILKWTQTELDALDRRVRTLLTANRMHHPRLSVMRLYIPWKCGGRGFLNAKTLHNREVCSLREHFLKTVVGMHHDVVTVDKGLTPLSMAKENWHKPIILTTDDRKMIWQSKELHGRFYRALHGPDVDFLASVSWLRFGDLFGETEGFVCAIMDEVILTNNYRRYIMKDGTIDVCRACHHPGESIRHIISGCSRLANSEYLHRHNQVARIIHQQLALKYKLVDSEVPYYKYVPDPVLENDHVTLYWDRSIITDRTIVANKPDMVVIDRLARLAMIVDVTIPHDGNLVKAEKEKQMKYLDLAHEVVDMWNVNSAVIVPIVVSTNGLIAKSLDQHLLRLALGSWIKGLIQKAVLLDTARIVRRFLSLEP

SEQ ID NO: 29205 - protein, 1202 aa, Sesamia nonagrioides
MLTRQAARRARSPPPDSPPSTASPPPVPSANVSAVTTPAAVVASSSSDEYFSPPTSPRPVRRQGRGRPPKSLGLRGHPAPSRVPAAGGCVQRMRWTQTINENVMRAYYRATEGGTNLTAYRERMLSLFQALEPTVNVLAQRLSDQVRVIQRNHRLDDIALDRLRSEVLSNQITPTLTQTAAQASIIDAGPPRSNRVEEEDDRVETVSSQYNDRLRNALEDAFRDYRSTPTDLRPRLPRLPMHKKNRALVCALDSLLKNFFESSEDLIDTHSILYCAAVAACRLAKVKSPNCEEAARPKPAVPAWQRRIERRIDGTRVLIGKLYCFRDGNTRPRVMRFVRQAFSGTGISPREYINHLTERIDFLKQKVCAWASRIRRYKRRVDRYTQNRMFQSDERWVYRAWERPEQNEAGVCRPDDATTSAFWRGIWSVSVCHTEGNWIRNVEQVCETIPEMDTILITPSDVAAAVRSLPNWKSPGPDGLHNFWLKWLSSSHTCLASQFQSSLESGSLPQFLTTGITHLLHKSGSTAEPKNYRPITCLPTVYKVLTSILKAKINKHLNSNSIMSVSQNGCKSGSRGTKELLLIDMAISQQVRRSRKDLSTCWIDYKKAYDSVPHTWLMRVLELYKINATLRTFLRSCMGQWKTALHYPGSRQIQGNDEPVWIKRGIFQGDSLSPVWFCLALNPLSTLLENSGLGYRLRRGGQVISHLLYMDDLKLFAPNELHLMKLLNVTETFSSGIRMEFGVDKCAVMHVKQGEIMESEGITLPDSIHLRSLSSFESYKYLGMSEALGINDADMKQSLKERFFGRLKKVLNSLLSGGNKVRAFNGWVMPVLMYSFGILKWTQTELDALDRRVRTLLTANRMHHPRSSVMRLYIPRKCGGRGFLNAKTLHNREVCSLREYFLQTVVGMHHDVVTVDKGLTPLSMAKENWHKPIILTTDDRRKVWQSKELHGRFYRALHEPDVDFLASVSWLRFSDLFGETEGFVCAIMDEVILTNNYRRYIMKDGTIDVCRACHHPGESIRHIISGCSRLANSEYLHRHNQVARIIHQQLALKYKLVDSEVPYYKYVPDPVLENDHVTLYWDRSIITDRTIVANKPDIVVIDRLARLAMIVDVTIPHDGNLVKAEKEKKMKYLDLAHEVVDMWNVNSAVIVPIVVSANGLIAKSLDQHLLRLALGSWIKGLIQKAVLLDTARIVRRFLSLEP

SEQ ID NO: 29206 - protein, 1202 aa, Sesamia nonagrioides
MLTRAATRRARPPPLDSSLSTASPPPVSSATVNAVRTPAVVVASSSSDEYFSPPTSPTPVRRQGRGRPPKSLGLRGHPAPSRVPAAGGCVQRMRWTQTMNENVMRAYYGATEGGTNLTAYRERMLSLFQALEPTVNVSAQRLSDQVRVIQRNHRLDDIALDGLRSEVLSNQIAPTLTQTAAQASIIDAVPPRSNRVEEEDDRVETVSSQYNDRLRSALEDAFRDYRSTPTNLRPRLPRLPMHKKNRALVCALDSQLKNFFESSEDLIDTHSILYCAAVAACRLAKVKFPNCDEATRPKLAVPAWQRRIERRIDGTRVLIGKLYCFREGNTRPRVMRFVRQAFSGTGISPREYINNVTERIDFLKQKVCAWASRIRRYKKRVDRYTQNRMFQSDERWVYRAWERPEQNEADECRPDDATTSAFWRGIWSVSVCHTEGDWTQDVEQVCDAIPEMDNILITPLDVATAVRSLPNWKSPGPDGLHNFWLKWLSSSHTCLASQFQSSLESGSLPQFLTTGITHLLHKSGSTAEPKNYRPITCLPTVYKVLTSILKAKINNHLDSNSIMSVSQNGCRSGSRGTKELLLIDMAISQQVRRSRKDLSTCWIDYKKAYDSVPHTWLMRVLELYKINATLRTFLRSCMGQWKTVLRYPGSRQIQGNDEPVWVKRGIFQGDSLSPLWFCLALNPLSTLLEDSGLGYRLKRGGQVISHLLYMDDLKLFAPNKLHLMKLLNVTEIFSSGIKMEFGVDKCAVMHVKGGQIMESEGITLPDSIHLRSLSSFESYKYLGMSEALGINDADMKQSLKERFFGRLRKVLNSLLSAGNKVRAFNGWVMPVLMYSFGILKWTQTELDALDRRVRTLLTANRMHHPRSSVMRLYIPRKCGGRGFLNAKTLHNREVCSLREYFLKTVVGMHHDVVTVDKGLTPLSMGKENWHKPIILTTDDRKMVWQSKELHGRFYRALHGPDVDFLASVSWLRFGDLFGETEGFVCAIMDEVILTNNYRRYIMKDGTIDVCRACHHPGESIRHIISGCSRLANSEYLHRHNQVARIIHQQLVLKYKLVDSEVPYYKYVPDPVLENDHVTLYWDRSIITDRTIVANKPDIVVIDRLARLAMIVDVTIPHDGNLVKAEKEKLMKYLDLAHEVVDMWNVNSAVIVPIVVSANGLIAKSLDQHLLRLSLGSWIKGLIQKAVLLDTARIVRRFLSLEP

SEQ ID NO: 29207 - protein, 1200 aa, Mythimna ferrago
MLTRAAAQRARIPPPDSLLSSASPPPDPGSSVSPAAAVASSSSDEYFSPPTSPTPVRRPGRGRPPNGLGFRGQPAPSRVPAAGGCVQRMKWTQSMNENVMRAYYGSTEGGTNLTAYRVRMLSLFQDLEPTVNVSAQRLSDQVRVIQRNHRLDDAALDRLRSQVLSNPIVSTPQQIQTAGPSTSVTTTPRYAHVEDEADDRVDRVSSQCNDRLRSALEDALREYRSTPTELRPRLPRLPMHKKNRALVCALDSLLKNVFESSDSLLDTHSILYCGAVAACRLANVKFPCYGVATRPTPAAPAWQCRIERRIDEARALIGKLYCFREGNTRPRVMRFVRRAFSGTEISPREYMSRVTERIDFLKQKVCAWANRIRRYKRRVDRYSQNRMFQSDERWVYRAWERPGQNVTDGFRPDSVATNTFWRSIWSEPVCHNEGGWMRDVERVCEAIPEMDKVFITPLDVARAVRPLPNWKSPGPDGLQNFWLKWYSSSHAILASQFQSSLESGSLPQILTTGTTHLLHKTGSTADPKNYRPITCLSTVYKLLTSILRVKITLHIEKNSIMFASQNGCRNGSRGTKELLLIDMAISQQVRRSRKDLSTCWIDYKKAYDSVPHTWLMKVLELYKIDATLRTFLESCMRQWKTVLRYPGCRPIQGNDEPIWIKRGIFQGDSLSPLWFCLALNPLSTLLEDSGLGYRLRRGGQVLSHLLYMDDLKLFAHNNSQLMELLKVTETFSSAIRMEFGVDKCAVMHVRRGEIVESEGIQLSDSIHLRSLSSTETYKYLGMSEALGINVADMKQTLKERFFGRLKKVLNSLLSGGNKVRAFNGWVMPVLMYSFGILKWTQTELDALDRRVRTLLTANRMHHPRSSVMRLYIPRKCGGRGFLNAKTLHNREVCSLREYFLKTDVGMHRDVVAVDKGLTPLSMAKENWRKPVVLTTDDRKEVWKGKELHGRFFRALHEPDVDFSASVAWLRFSNLFGETEGFVCAIMDEVILTNNYRRHIMKDGTVDVCRACHRPGESIRHIISGCSRLANGEYLHRHNQVARILHQQLALKYNLVDSEVPYYRYVPDPVLENDHVTLYWDRSIITDRTIVANKPDIVVIDRLARRAMIVDVTIPHDENLVKAEKEKQIKYLDLAHEVVDMWNVDSAVIVPIVVTANGLIAKSFDDHLSKLSLHGWIKGLIQKAVLLDTARIVRRFLSLEP

SEQ ID NO: 29208 - protein, 868 aa, Mythimna ferrago
MRFVRRAFLGTGVSPQGYMSRVTERIDFLKQKVCAWASRIRRYKRRVDRYSQNRMFQSDERWVYRAWERPEHSVIGECRPDDFATITFWRNIWSVPVSHAEGGWMRDVERVCEAIPEMEKVTITPEDVAKAVRPLPNWKSPGPDGLQNFWLKWYSSSHAPLASQFQSILESGPLPEYLTTGVTHLLHKTGNPVDPKNYRPITCLSTVYKLLTSILRAKINIHIENNQIISPSQNGCRNGSRGTKELLLIDMAISQQTRRSRKDLSTCWIDYKKAYDSVPHTWLMRVLELYKIDTTLRTFLESCMRQWKTVLRYPGCRPIQGNDEPIWIKRGIFQGDSLSPLWFCLALNPLSTLLEDSGLGYRLRRGGQVISHLLYMDDLKLFAPSNLQLMELLKVTETFSSAIRMEFGVDKCAGMHVKRGEIMESEGIQLPDSIHLRSLSSTETYKYLGMSEALGINNADMKQSLKERFFGRLKKVLNSLLSGGNKVRAFNGWVMPVLMYSFGILKWTQTELDALDRRVRTLLTANRMHHPRSSVMRLYIPRKCGGRGFLNAKTLHNREVCSLREYFLKTDVGMHRDVVAVDKGLTPLSMAKEDWHKPVIMTTDNRKEIWKGKELHGRFFRALHEPDVDFLASVAWLRFSDLFGETEGFVCAIMDEVILTNNYRRYIMKDGTVDVCRACHRPGESIRHIISGCSRLANGEYLHRHNQVARIIHQQLALKYNLVDLEVPYYKYVPDPVLENDHVTLYWDRSIITDRTIVANKPDIVVIDRLARRAMIVDITIPHDENLVKAEKEKQMKYLDLAHEVVDMWNVDSAVIVPIVVTANGLIAKSFDDHLSKLSLRGWIKGQIQKAVLLDTARIVRKFLSLEP

SEQ ID NO: 29209 - protein, 1110 aa, Hydraecia micacea
MRWTQFMNENVMRAYYGSTEGGTNLTAYRDRMLSLFQELEPTVNVSAQRLSDQVRVIQRNHRLDDIALDRLRSEVLSNHIVSTPAQTAAQTSTVDAIPPRSNHVEEEDDRVDTVSSQCNVRLRSALEDAFHEYRLTPTELRPRLPRLPMHKKNRALVCALNSQLKNFFESSEDLVDTHSILYCAAVAACRLANVKFPICDGATRPKPAVPAWQHRIERRIDGARVLIGKLYCFREGNTRPRVMRFVKRAFSGTGISPREYISHVTERIDFLKQKVCAWASRIRRYKRRIDRYTQNRMFQSDERWVYRAWERPEQNMTDVCRPDDATTSAFWRSIWSVPVCHTEAGWIQDVERVCETVPEMETILITPLDVARAVRPLPNWKSPGPDGLHNFWLKWLNSSHTCLASQFQSSLESGSLPQFLTTGVTHLLHKSGSPAEPKNYRPITCLSTVYKLLTSILRAKINTHIENNSIMSASQNGCRNGSRGTKELLLIDMAISQQVRRSRKDLSTCWIDYKKAYDSVPHTWLMRVLELYKIDATLRTFLESCMGQWKTVLRYPGCRQIQGNDEPVWIKRGIFQGDSLSPLWFCLALNPLSTLLEDSSLGYRLRRGGQVISHLLYMDDLKLFAPTGLHLMELLKVTETFSSAIRMEFGVDKCAVMHVKRGEIMESEGIQLSDSINLRSLSSSESYKYLGMSEALGINVTDMKQSLKERFFCRLRKVLISLLSGGNKVRAFNGWVMPVLMYSFGILKWTQTELDALDRRVRTLLTANRMHHPRSSVMRLYIPRKCGGRGFLNAKTLHNREVCSLREYFLKAEVGMHRDVVAVDKGLTPLSMAKENWRKPVVLTTDDRKKVWQSKELHGRFYRALHEPGVDFLASVSWLRFGDLFGETEGFVCAIMDEVILTNNYRRHIMKDGTVDVCRACHRPGESIRHIISGCSRLANGEYLHRHNQVARIIHQQLALKYKLVDSEVPYYKYVPDPVLENDHVTLYWDRSIITDRTIVANKPDIVVIDRLARRTMIVDVTIPHDGNLVKAEKEKQMKYLDLAHEVVDMWNVSSAVIVPIVVSANGLMAEGLDEHLSRLSLGGWIKSLIQKAVLLDTARIVRRFLSLEP

SEQ ID NO: 29210 - protein, 962 aa, Ochropleura plecta
MHKKNRALVCALDSQLKNLFESSEDLVDTQSILYCGAVAVCRLANVKFPNCDVATRPKPSVPAWQCRIERRIDEARALIGKLYCFREGNTRPRVMRFVRRAFSGTGISPQEYMSRTTERIDFLKQKVYAWANRIQRYKRRVDRYSQNRMFRSDERWVYRAWERPEQSVTDVCRPDDVATSSFWHSIWSVCVCHTEAGWMRDVERVCETIPEMEPILITSLDIASAVRPLPNWKSPGPDGLHNFWLKWLSSSHTRLASQFQSCLESGSLPQFLTTGVTHLLYKSGSPAEPKNYRPITCLSTVYKLLTSILRAKINSHIVKNSIISASQNGCRNGSRGTKELLLIDMAISQQVRRSRKDLSTCWIDYKKAYDSVPHTWLKRVLELYKIDTTLRTFLESCMGQWRTVLRYPGCRQIQGNDEPVWIKRGIFQGDSLSPLWFCLALNPLSTLLEDSGLGYRLRRGGQVISHLFYMDDLKLFAPNKLRLMELLKVTETFSNAIRMEFGVDKCAVMYVKRGEIMESEGIHLSDSIHLRSLSSSESYKYLGMSEALGINVADMKQLLRERFFGRLKKVLKSLLSGGNKVRAFNSWVMPVLMYSFGILKWTQTELDALDRRVRTLLTANRMHHPRSSVMRLYIPRKCGGRGFLNAKTLHNREVCSLREYFLKTDVGMHRDVVAVDKGLTPLSMAKENWRKPVVLTTDYRKEVWQGKQLHGRFYKALHGPDVDFLASVSWLRFGDLFGETEGFVCAIMDEVMLTNNYRKYIMKDGTVDVCRACHRPGESIRHIISGCSRLANGEYLHRHNQVARIIHQQLALKYNLVESEVPYYKYVPDPVLEKDHVTLYWDRSIITDRTIVANKPDIVVIDRSARRVMIIDVTIPHDENLVKAEKEKQLKYLDLAHEVVDMWNVNSAIIVPIVITANGLIAKSLDEHLSKLSLGGWIKGLIQKAVLLNTARIVRRFLSLKP

SEQ ID NO: 29211 - protein, 1111 aa, Ochropleura plecta
MRWTSSINANVMRAYYGSTEGGTNLTAYRVRMLSLFQDLEPTINVSAQRLSDQVRVIQRNHMLDDAALDRLRSEVLSNRIILTTPQTAMQASVIDGMQPRSDPAVVEEDDRVATVSSQCNERLRSALEDALRDYRSTPAELRPRLPRLPMHKKNRALVCALDSQLKNLFESSEDLVDTHSILYCGAVAVCRLANVKFPSCDVATRPKPSVPAWQCRIERRIDEARVLIGKLYCFREGNTRPRVMRFVRRAFSGTGISPQEYMSRTTERIDFLKQKVYAWANRIRRYKRRVDRYSQNRMFRSDERWVYRAWERPEQSVTDVCRPDDVATSSFWHSIWSVPVCHTEADWMRDVERVCETIPEMEPILITSLDIASAVRPLPNWKSPGPDGLHNFWLKWLSSSHTRLASQFQSCLESGSLPQFLTTGVTHLLYKSGSPAEPKNYRPITCLSTVYKVLTSILRAKINSHIDNNSIMSASQNGCRNGSRGTKELLLIDMAISQQVRRSRKDLSTCWIDYKKAYDSVPHTWLKRVLELYKIDATLRAFLESCMGQWRTVLRYPGCRQIQGNDEPVWIKRGIFQGDSLSPLWFCLALNPLSTLLEDSGLGYRLRRGGQVISHLLYMDDLKLFAPNKLRLMELLKVTETFSNAIRMEFGVDKCAVMYVKRGEIMESEGIQLSDSIHLRSLSSSESYKYLGMSEALGINVADMKQLLRERFFGRLKKVLKSLLSGGNKVRAFNSWVMPVIMYSFGILKWTQTELDALDRRVRTLLTGNRMHHPRSSVMRLYIPRKCGGRGFLNAKTLHNREVCSLRDYFLKTDVGMHRDVVAVDKGLTPLSMAKENWRKPVVLTTDDRKVVWQGKELHGRFYKALHGPDVDFLASVSWLRFGDLFGETEGFVCAIMDEVMLTNNYRKYIMKDGTVDVCRACHRPGESIRHIISGCSRLANSEYLHRHNQVARIIHQQLALKYNLVESEVPYYKYVPDPVLEKDHVTLYWDRSIITDRTIVANKPDIVVIDRSARRVMIIDVTIPHDENLVKAEKEKQLKYLDLAHEVVDMWNVNSAIIVPIVVTANGLIAKSLDEHLSKLSLGGWIKGLIQKAVLLDTARIVRRFLSLEP

SEQ ID NO: 29212 - protein, 1111 aa, Ochropleura plecta
MRWTSFINANVMRAYYGSTEGGTNLTAYRVRMLSLFQDLEPTINVSAQRLSDQVRVIQRNHLLDDAALDRLRSEVLSNRVILTTPQTAVQASAIDVTQPRSNPAVVEEDDRVATVSSQCNDRLRSALEDALRDYRSTPAELRPRLPRLPMHKKNRALVCALDSQLKNLFESSEDLVDTHSILYCGAVAVCRLANVKFPNCDVATRPKPSVPAWQCRIERRIDEARALIGKLYCFREGNTRPRVMRFVRRAFSGTGISPQEYMSRTTERIDFLKQKVYAWANRIQRYKRRVDRYSQNRMFRSDERWVYRAWERPEQSVTDVCRPDDVATSSFWHSIWSVRVCHTEAGWMRDVERVCETIPEMEPILITSLDIASAVRPLPNWKSPGPDGLHNFWLKWLSSSHTRLASQFQSCLESGSLPQFLTTGVTHLLYKSGSPAEPKNYRPITCLSTVYKLLTSILRAKINSHIVKNSIISASQNGCRNGSRGTKELLLIDMAISQQVRRSRKDLSTCWIDYKKAYDSVPHTWLKRVLELYKIDTTLRTFLESCMGQWRTVLRYPGCRQIQGNDEPVWIKRGIFQGDSLSPLWFCLALNPLSTLLEDSGLGYRLRRGGQVISHLFYMDDLKLFAPNKLRLMELLKVTETFSNAIRMEFGVDKCAVMYVKRGEIMESEGIHLSDSIHLRSLSSSESYKYLGMSEALGINVADMKQLLRERFFGRLKKVLKSLLSGGNKVRAFNSWVMPVLMYSFGILKWTQTELDALDRRVRTLLTANRMHHPRSSVMRLYIPRKCGGRGFLNAKTLHNREVCSLREYFLKTDVGMHRDVVAVDKGLTPLSMAKENWRKPVVLTTDFRKEVWQGKELHGRFYKALHGPDVDFLASVSWLRFGDLFGETEGFVCAIMDEVMLTNNYRKYIMKDGTVDVCRACHRPGESIRHIISGCSRLANGEYLHRHNQVARIIHQQLALKYNLVESEVPYYKYVPDPVLEKDHVTLYWDRSIITDRTIVANKPDIVVIDRSARRVMIIDVTIPHDENLVKAEKEKQLKYLDLAHEVVDMWNVNSAIIVPIVITANGLIAKSLDEHLSKLSLGGWIKGLIQKAVLLNTARIVRRFLSLEP

SEQ ID NO: 29213 - protein, 1206 aa, Ochropleura plecta
MLTRRRAQEQKALPPSPGSPLSSASQPPGRATRVSAVSPVAAVASSSSDEFFSPPSSPPPPTRQRRGRGRPPAGLGSRSQQAPIRVPAVGGNVSRMRWTSSINANVMRAYYGSTEGGTNLTAYRVRMLSLFQDLEPTINVSAQRLSDQVRVIQRNHMLDDAALDRLRSEVLSNRIILTTPQTAMQASVIDGMQPRSDPAVVEEDDRVATVSSQCNERLRSALEDALRDYRSTPAELRPRLPRLPMHKKNRALVCALDSQLKNLFESSEDLVDTHSILYCGAVAVCRLANVKFPSCDVATRPKPSVPAWQCRIERRIDEARVLIGKLYCFREGNTRPRVMRFVRRAFSGTGISPQEYMSRTTERIDFLKQKVYAWANRIRRYKRRVDRYSQNRMFWSDERWVYRAWERPEQSVTDVCRPDDVATSSFWHSIWSVPVCHTEADWMRDVERVCETIPEMEPILITSLDIASAVRPLPNWKSPGPDGLHNFWLKWLSSSHTRLASQFQSCLESGSLPQFLTTGVTHLLYKSGSPAEPKNYRPITCLSTVYKVLTSILRAKINSHIDNNSIMSASQNGCRNGSRGTKELLLIDMAISQQVRRSRKDLSTCWIDYKKAYDSVPHTWLKRVLELYKIDATLRAFLESCMGQWRTVLRYPGCRQIQGNDEPVWIKRGIFQGDSLSPLWFCLALNPLSTLLEDSGLGYRLRRGGQVISHLLYMDDLKLFAPNKLRLMELLKVTETFSNAIRMEFGVDKCAVMYVKRGEIMESEGIQLSDSIYLRSLSSSESYKYLGMSEALGINVADVKQLLRERFFGRLKKVLKSLLSGGNKVRAFNSWVMPVIMYSFGILKWTQTELDALDRRVRTLLTGNRMHHPRSSVMRLYIPRKCGGRGFLNAKTLHNREVCSLREYFLKTDVGMHRDVVAVDKGLTPLSMAKENWRKPVVLTTDDRKVVWQGKELHGRFYKALHGPDVDFLASVSWLRFGDLFGETEGFVCAIMDEVMLTNNYRKYIMKDGTVDVCRACHRPGESIRHIISGCSRLANSEYLHRHNQVARIIHQQLALKYNLVESEVPYYKYVPDPVLEKDHVTLYWDRSIITDRTIVANKPDIVVIDRSARRVMIIDVTIPHDENLVKAEKEKQLKYLDLAHEVVDMWNVNSAIIVPIVVTANGLIAKSLDEHLSKLSLGGWIKGLIQKAVLLDTARIVRRFLSLEP

SEQ ID NO: 29214 - protein, 1044 aa, Ochropleura plecta
MPVTRSEGRGRKPSNEQKPSSSEATPETSATGTSTEVTSESTQSGTTATESSQETSTSAATDPTTVTSAATASTAAASAPPAPQPASAVAPSVAPSAATTLTVGTKTKQLMKPPAAVASKENRRDTDASTVKQRVVKNIAAGASKPTGTHALRPPSKKGGGGESTYSKTKEKKIAKAKEDLLRLQVELAAARLAALQTEDTDREDEEEEEEGVEDEVSLYSEVNARVDNWLENQVTRPVLAIANEPHRPPPEPTIVHEEPPKQQEVHRTPAGGQGDLALLAEAITRAVSAAQRPKFVELPFFSGSHQEWLPFRAAYYESEPTFSAVENVNRLRRNLKGKAREAVEGLLITNAHPSEVMKTLESRFGRPESIAMLEMETLRGLPRLTESPREICTFATKISNVVATLKTLGCFNYMYNPEQQQLLIDMAISQQVRRSRKDLSTCWIDYKKAYDSVPHTWLKRVLELYKIDATLRAFLESCMGQWRTVLRYPGCRQIQGNDEPVWIKRGIFQGDSLSPLWFCLALNPLSTLLEDSGLGYRLRRGGQVISHLLYMDDLKLFAPNKLRLMELLKVTETFSNAIRMEFGVDKCAVMYVKRGEIMESEGIQLSDSIHLRSLSSSESYKYLGMSEALGINVADMKQLLRERFFGRLKKVLKSLLSGGNKVRAFNSWVMPVIMYSFGILKWTQTELDALDRRVRTLLTGNRMHHPRSSVMRLYIPRKCGGRGFLNAKTLHNREVCSLREYFLKTDVGMHRDVVAVDKGLTPLSMAKENWRKPVVLTTDDRKVVWQGKELHGRFYKALHGPDVDFLASVSWLRFGDLFGETEGFVCAIMDEVMLTNNYRKYIMKDGTVDVCRACHRPGESIRHIISGCSRLANSEYLHRHNQVARIIHQQLALKYNLVESEVPYYKYVPDPVLEKDHVTLYWDRSIITDRTIVANKPDIVVIDRSARRVMIIDVTIPHDENLVKAEKEKQLKYLDLAHEVVDMWNVNSAIIVPIVVTANGLIAKSLDEHLSKLSLGGWIKGLIQKAVLLDTARIVRRFLSLEP

SEQ ID NO: 29215 - protein, 1199 aa, Hecatera dysodea
MLTRAATLRARHPPPGSPLSSASPPPDIESQVSPAAAVASSSSDEYFSPPTSPPPVRRQGRGRPPRGLGPRGQPAPSRVPATGGCVQRMRWTQSMNENVMRAYYGSTEGGTNLTAYRVRMLSLFQDLEPTVTVSAQRLSDQVRVIQRSHRLDDAALDRLRSEVLSSLIISTPPQAAVQAPTIGAIILRPNNVSDEVDDTAVTVSTQCNDRLRSALEDALREYRSTPSELRPRLPRLPMHKKNRALVCALDSLLKNIFESSENLVDTHSILYCGAVAACRVANVKFTNSDGATRPKNAAPAWQCRIERRIDEARVLIGKLYCFREGNTRPRVMRFVRRAFLGTEISPQEYMSRVTERIDFLKQKVCAWANRIRRYKKRVDRYSQNRMFQSDERWVYRAWERPEQSVMDVCRPDDVTTNTFWRSIWSVPVCHAEGGWMRNVERVCEAIPQMEKITITSLDVAKAVRPLPNWKSPGPDGLHNFWLKWYSSSHALLASQFQSSLESGSLPQLLTTGVTHLLHKTGSPAEPKNYRPITCLSTVYKLLTSILRVKINEHIETNSIMSSSQNGCRKGSRGTKELLLIDMAISQQVRRSRKDLSTCWIDYKKAYDSVPHTWLLKVLELYKIDATLRTFLESCMRQWKTVLRYPGCRPIQGSDEPVWIKRGIFQGDSLSPLWFCLALNPLSTLLEDSDLGYRLRRGGQAISHLLYMDDLKLFAPNKLRLMELLKVTETFSSDIRMEFGVDKCAVMHVKKGKIMESEGIQLSDSIQVRSLSSTETYKYLGMSEALGINVADMKQSLKERFFGRLKKVLNSLLSGGNKVRAFNGWVMPVLMYSFGILKWTQTELDALDRRVRTLLTANRMHHPRSSVMRLYIPRKWGGRGFLNAKTLHNREMCSLREYFLETDVGMHRDVVAVDKGLTPLSMANENWRKPVIQTTDDRKEVWKGKELHGRFYRALYGSDVDFSASVAWLRFGDLFGETEGFVCAIMDEVILTNNYRRHIMKGGTADVCRACHRPGESIRHIISGCSRLANGEYLHRHNQVARIIHQQLALKYKLVDSEVPYYKYVPDPVLENGHVTLYWDRSIITDRTIVANKPDIVVIDRLARRTMIIDVTIPHDENLVKAEKEKQIKYLDLAHEVVDMWNVDSAVIVPIVITANGLMAKSFDDHLSKLALNGWLKGLIQKAVLLDTARIVRRFLSLEP

SEQ ID NO: 29216 - protein, 1199 aa, Hecatera dysodea
MLTRAATLRARHPPPDSPLSSASPPPDIESQVSPAAAVASSSSDEYFSPPTSPPPVRRQGRGRPPRGLGPRGHPAPSRVPATGGCVQRMRWTQSMNENVMRAYYGSTEGGTNLTAYRLRMLSLFQDLEPTVNVSAQRLSDQVRVIQRSHRLDDAALERLRSEVLNNLIISTQTQTAVQAPVSGANTPQANNDSDEVDDRVVTVSSQYNNRLRSALEDALREYRSTPTELRPRLPRLPMHKKNRALVCALDSLLQNTFVSSENLVDTHSILYCGAVAACRLANVKFPSGDEAIRPKPAAPAWQCRIERRIDEARALIGKLYCFREGNTRPRVMRFVRRAFAGTGISPHEYTSRITERIDFLKQKVCAWANRIRRYKRRADRYSQNRMFQSDERWVYRTWERPEQSVTDECRPDDIATTTFWRSIWSVPVRHTEGDWMRDVERVCEAIPQMEKITITPTDIATAVRPLPNWKSPGPDGLHNFWLKWYSSSHAVLASQFQSSLESGSLPQFLTTGITHLLHKTGSPAEPKNYRPITCLSTVYKLLTSILRVKINEHIESNSIMSSSQNGCRKGSRGTKELLLIDMAISQQVRRSRKDLSTCWIDYKKAYDSVPHTWLMKVLELYKIDATLRTFLESCMRQWKTVLRYPGCRPIQGSDEPIWIKRGIFQGDSLSPLWFCLALNPLSTLLEDSGLGYRLRRGGQAISHLLYMDDLKLFAPNNLRLMELLKVTETFSSAIRMEFGVDKCAVMHVKKGEIMESEGIQLSDSIQVRSLSSTETYKYLGMSEALGINGADMKQSLKERFFGRLKKVLNSLLSGGNKVRAFNGWVMPVLMYSFGILKWTQTELDALDRRVRTLLTANRMHHPRSSVMRLYIPRKCGGRGFLNAKTLHNREMCSLREYFLENDVGMHRDVVAVDKGLTPLSMAKENWRKPVIHTTDDRKEVWKGKELHGRFYRALYGSDVDFSASVAWLRFGDLFGETEGFVCAIMDEVILTNNYRRHIMKDGTVDVCRACHRPGESIRHIISGCSRLANSEYLHRHNQVARIIHQQLALKYKLVNSEVPYYKYVPDPVLENDHVTLYWDRSIITDRTIVANKPDIVVIDRLARRTMIIDVSIPHDENLVKAEKEKQIKYLDLAHEVVDMWDVDSAVIVPIIVTANGLMAKSFDDHLSKLALRSWVKGLIQKAVLLDTARIVRRFLSLQP

SEQ ID NO: 29217 - protein, 1112 aa, Mythimna impura
MRWTQSMNENVMRAYYGSTEGGTNLTAYRVRMLSLFQVLEPTVNVTTQRLSDQVRLIQRNHRLDNAALDRLRSEVLSNRIISTPIQTQTAAPRATDGILPQSNHVDDEADDRVVTVSSQCNDRLRSALEDALREYRSTPIDLRPRLPRLPMHKKNRALVCALDSLLENVFESSVNLADTHSILYCGAIAACRLANVKLPSCDGATRPKSVAPAWQCRIEKRIDGARALIGKLYCFREGNTRPRVMRYVRRAFSGTGISPPEYLSRVTERIDFLKQKVCAWANRIRRYKRRVDRYSQNRMFQSDERWVYRAWERPEQNVTDVTRPDAVATNAFWRNIWSVPVCHTEDGWMREVERVCEAIPEMEKVIISPTDVARAVRPLPNWKSPGPDGLQNFWLKWYNSSHALLASKFQSSLESGSLPQFLTTGVTHLLHKTGSTAEPKNYRPITCLSTVYKLLTSILRTKINQHIDNNSIMSASQNGCRNGSRGTKELLLIDMTISQQVRRSRKDLSTCWIDYKKAYDSVPHTWLMRVLELYKIDATLRTFLESCMGQWNTVLRYPGCRSIRRDDEPIWIKRGIFQGDSLSPLWFCLALNPLSTLLEESGLGYRLRRDGQVLSHLLYMDDLKLIAPNKLRLMELLKVTETFSSAIRMEFGVDKCAVMHVKRGEIMESEGIQLSDSIHLRSLSSTETYKYLGMSEALGINVADMKQSLKERFFGRLKKVLNSLLSGGNKVRAFNGWVMPVLMYSFGILKWTQTELEALDRRVRTLLTANRMHHPRSSVMRLYIPRKCGGRGFLNTKTLHNREVCSLREYFHKTDVGMHRDVVAVDKGLTPLSMAKENWRKPVVLTTDDRKEVWKSKELHGRFYRALHESDVDFAASVAWLRFSNLFGETEGFICAIMDEVILTNNYRRYIMKDGTVDVCRACHRPGESIRHIISGCSRLANGEYLHRHNQVARIIHQQLALKYNLVYSEVPYYRYVPDPVLENDHVTLYWDRSIITDRTIVANKPDIVVIDRLARRAMIVDVTIPHDENLVKAEKEKQIKYLDLAHEVVDMWNVDSAVIVPIVVTANGLIAKSFDDHLSKLSLRGWIKGLIQKAVLLDTARIVRRFLSLEP

SEQ ID NO: 29218 - protein, 1200 aa, Mythimna impura
MLTRAAARRARHPPPGSPLSSASPPPDLESPVSPAAAVASSSSDEYFSPPTSPTPVRRPGRGRPPRSLGSRGQPAPSRVPAAGGCVQRMRWTQSMNENVMRAYYGSTEGGTNLTAYRVRMLSLFQVLEPTVNVTTQRLSDQVRVIQRNHRLDDAALDRLRSEVLSNRIISTPIQTQTAAPRATDAILPQSNHVDDEADDRVVTVSSQCNDRLRSALEDALREYRSTPIDLRPRLPRLPMHKKNRALVCALDSLLENVFESSVNLADTHSILYCGAIAACRLANVKLPSCDGATRPKSVAPAWQCRIEKRIDGARALIGKLYCFREGNTRPRVMRYVRRAFSGTGISPPEYLSRVTERIDFLKQKVCAWANRIRRYKRRVDRYSQNRMFQSDERWVYRAWERPEQNVTDVTRPDAVATNAFWRNIWSVPVCHTEDGWMREVERVCEAIPEMEKVIISPTDVARAVRPLPNWKSPGPDGLQNFWLKWYSSSHALLASQFQSSLESGSLPQFLTTGVTHLLHKTGSTAEPKNYRPITCLSTVYKLLTSILRTKINQHIDNNSIMSASQNGCRNGSRGTKELLLIDMTISQQVRRSRKDLSTCWIDYKKAYDSVPHTWLMRVLELYKIDATLRTFLESCMGQWNTVLRYPGCRSIRRDDEPIWIKRGIFQGDSLSPLWFCLALNPLSTLLEESGLGYRLRRDGQVLSHLLYMDDLKLIAPNKLRLMELLKVTETFSSAIRMEFGVDKCAVMHVKRGEIMESEGIQLSDSIHLRSLSSTETYKYLGMSEALGINVADMKQSLKERFFGRLKKVLNSLLSGGNKVRAFNGWVMPVLMYSFGILKWTQTELDALDRRVRTLLTANRMHHPRSSVMRLYIPRKCGGRGFLNTKTLHNREVCSLREYFHKTDVGMHRDVVAVDKGLTPLSMAKENWRKPVVLTTDDRKEVWKSKELHGRFYRALHESDVDFAASVAWLRFSNLFGETEGFICAIMDEVILTNNYRRYIMKDGTVDVCRACHRPGESIRHIISGCSRLANGEYLHRHNQVARIIHQQLALKYNLVYSEVPYYRYVPDPVLENDHVTLYWDRSIITDRTIVANKPDIVVIDRLARRAMIVDVTIPHDENLVKAEKEKQIKYLDLAHEVVDMWNVDSAVIVPIVVTANGLIAKSFDDHLSKLSLRGWIKGLIQKAVLLDTARIVRRFLSLEP

SEQ ID NO: 29219 - protein, 1199 aa, Phlogophora meticulosa
MLTRAAKRRARPPSPDSPLSFASPPPDLGSPVTPTVAAASSSSDEYFSPPTSPTPVRRQGRGRPPKSLGSRGQPAPSQVPATGGCVQRMRWTQSMNENVMRAYYGSTEGGTNLTAYRARMLSLFQVLEPTVNVSAQRLSDQVRVIQRNHRLDDTALDRLRSEVLNNHIVLTSTQTAVQAPIINATPSPSNHVSEEADDRVVTVSSQCNEKLRSALEDALREYRSTPTELRPRLPRLPMHKKNRALVCNLDSLLKDLFESSGDLVDTHSILYCAAVASCRLANVKFPNNDVAIRPKPAVPAWQSRIERRIDGARVLIGKLYCFREGNTRPRVMRFVRRAFAGTGISPREYMSRIVERIDFLKQKVCAWANRIRRYKRRVDRYSQNRMFQSDERWVYRAWERPEQDVADVHRPDDTTTNTFWRNIWSVPVCHTEAHWIRDVERVCETITEMEKNIITPLDVATAVRPLPNWKAPGPDGLHNFWLKWLGSSHTRLASQFQSCLESGSLPQFLTTGITHLLYKSGSTTEPKNYRPITCLSTVYKLLTSILRAKIAEHIVGNSIMSASQNGCRNGSRGTKELLLIDMAISQQVRRSHKDLSTCWIDYKKAYDSVPHAWLMRVLELYKIDATLRTFLESCMGQWRTVLRYLGCRQIQGNDEPIWIKRGIFQGDSLSPLWFCLALNPLSTLLEDSGLGYRLRRGGQVISHLFYMDDLKLFASNNLQLMELLKITESFSSTIRMEFGVDKCAVMHVKRGEIVESEGIQLSDSIQLRSLSSSDNYKYLGMSEALGINVTDMKQSLKERFFGRLKKVLNSLLSGGNKVRAFNGWVMPVLMYSFGILKWTQTELDALDRRVRTLLTANRMHHPRSSVMRLYIPRKCRGRGFLNAKTLYNREVCNLRDYFLKTEVGMHRDVVAVDKGLTPLSMAKENWRKPVVLTTDDRKQVWQSKELHGRFYRALHGPDVDFIASVSWLRFGDLFGETEGFVCAIMDEVILTNNYRKHIMKDGTVDMCRACHRPGESIRHIISGCSRLANGEYLHRHNQVARIIHQQLALRYKLVESEVPYYKYVPDPVLEDDHVTLYWDRSIITDRTIVANKPDIVVIDRLARRAMIVDVTIPHDENLVKAEKEKQIKYLDLAHEVVDMWNVDSAVIVPIVVTANGLLAKSLDDHLSRLSLHGWIKGLIQKAVLLDTARIVRRFLSLQP

SEQ ID NO: 29220 - protein, 1073 aa, Phlogophora meticulosa
MEPTVNVSAQRLADQVRVIQRNHRLDDTALDRLRSEVLNNHIVLTSTHTAVQASIINATPSPSNHVSEEADDRVVTVSSQCNEKLRSALEDALREYRSTPTELRPRLPRLPMHKKNRALVCNLDSLLKDLFESSGDLVDTHSILYCAAVAACRLANVKFPNNDVAIRPKPAVPAWQSRIERRIDGARVLIGKLYCFREGNTRPRVMRFVRRAFAGTGISPREYMSRIVERIDFLKQKVCAWANRIRRYKRRVDRYSQNRMFQSDERWVYRAWERPEQDVADVHRPDDTTTNTFWRNIWSVPVCHTEAHWIRDVERVCETITEMEKNIITPLDVATAVRPLPNWKAPGPDGLHNFWLKWLGSSHTRLASQFQSCLESGSLPQFLTTGITHLLYKSGSTTEPKNYRPITCLSTVYKLLTSILRAKIAEHIVGNSIMSASQNGYRNGSRGTKELLLIDMAISQQVRRSHKDLSTCWIDYKKAYDSVPHAWLMRVLELYKIDATLRTFLESCMGQWRTVLRYPGCRQIQGNDEPIWIKRGIFQGDSLSPLWFCLALNPLSTLLEDSGLGYRLRRGGQVISHLLYMDDLKLFASNNLQLMELLKITESFSSTIRMEFGVDKCAVMHVNRGEIVESEGIQLPDSIQLRSLSSSDNYKYLGMSEALGINVTDMKQSLKERFFGRLKKVLNSLLSGGNKVRAFNGWVMPVLMYSFGILKWTQTELDALDRRVRTLLTANRMHHPRSSVMRLYIPRKCGGRGFLNAKTLYNREVCNLRDYFLKTEVGMHRDVVAVDKGLTPLSMAKENWRKPVVLTTDDRKQVWQSKELHGRFYRALHGPDVDFIASVSWLRFGDLFGETEGFVCAIMDEVILTNNYRKHIMKDGTVDMCRACHRPGESIRHIISGCSRLANGEYLHRHNQVARIIHQQLALRYKLVESEVPYYKYVPDPVLEDDHVTLYWDRSIITDRTIVANKPDIVVIDRLARRAMIVDVTIPHDENLVKAEKEKQIKYLDLAHEVVDMWNVDSAVIVPIVVTANGLLAKSLDDHLSRLSLHGWIKGLIQKAVLLDTARIVRRFLSLQP

SEQ ID NO: 29221 - protein, 868 aa, Phlogophora meticulosa
MRFVRRAFAGTGISPREYMSRIVERIDFLKQKVCAWANRIRRYKRRVDRYSQNRMFQSDERWVYRAWERPEQDVADVHRPDDTTTNTFWCNIWSVPVCHTEAHWMRDVERVCETITEMEKIIITPLDVTTAVRPLPNWKAPGPDGLHNYWLKWLGSSHTRLASQFQSCLESGSLPQFLTTGITHLLYKSGSTTEPKNYRPITCLSTVYKLLTSILRAKIAEHIVGNSIMSASQNGCRNGSRGTKELLLIDMAISQQVRRSHKDLSTCWIDYKKAYDSVPHAWLMRVLELYKIDATLRTFLESCMGQWRTVLRYPGCRQIQGNDEPIWIKRGIFQGDSLSPLWFCLALNPLSTLLEDSGLGYRLRRGGQVISHLLYMDDLKLFAPNNLQLMELLKITESFSSTIRMEFGVDKCAVMHVKRGEIVESEGIQLSDSIQLRSLSSSENYKYLGMSEALGINVTDMKQSLKERFFGRLKKVLNSLLSGGNKVRAFNGWVMPVLMYSFGILKWTQTELDALDRRVRTLLTANRMHHPRSSVMRLYIPRKCGGRGFLNAKTLCNREVCNLRDYFLKTEVGMHRDVVAVDKGLTPLSMAKENWRKPVVLTTDDRKQVWQSKELHGRFYRALHGPDVDFIASVSWLRFGDLFGETEGFVCAIMDEVILTNNYRKHIMKDGTVDMCRACHRPGESIRHIISGCSRLANGEYLHRHNQVARIIHQQLALRYKLVESEVPYYKYVPDPVLEDDHVTLYWDRSIITDRTIVANKPDIVVIDRLARRAMIVDVTIPHDENLVKAEKEKQIKYLDLAHEVVDMWNVDSAVIVPIVVTANGLLAKSLDDHLSRLSLHGWIKGLIQKAVLLDTARIVRRFLSLQP

SEQ ID NO: 29222 - protein, 962 aa, Xestia xanthographa
MHKKNRALVCALDSQLKNIFESSENLVDTHSILFCGAVAACRIANVKFPNCDVATRPKPAVPAWQRRIERRIDGARVLIGKLYCFREGNTRPRVMRFVRRAFSGTEISPQEYMSRATERIDFLKQKVYAWANRIRRYKRRVDRYSQNRMFQSDERWVYRAWERPEQNMTDVCRPDDAATSSFWRSIWSVPVCHTEADWMRDVERVCKPIPEMEPIFITPLDVARAVRPLPNWKSPGPDGLHNFWLKWFSSSHTCLASQFQSSFESGSLPQFLTTGVTHLLHKSGSPAEPKNYRPITCLSTIYKLLTSILRVKINTHIDKNSIMSASQNGCRNGSRGTKELLLIDMAISQQVRRSRKDLSTCWIDYKKAYDSVPHTWLMRVLELYKVDTTLRTFLESCMGQWKTVLRYPRCRQIQGSDEPVWIKRGIFQGDSLSPLWFCLALNPLSTLLENSGLGCRLRKDGQVISHLLYMDDLKLFAPNKLRLMELLKVTETFSSAIRMEFGVDKCAVMYVKRGEIMESEGLQLSDSIHLKSLSSSETYKYLGMSEALGINVTDMKQSLRERFFGRLRKVLNSLLSGGNKVRAFNGWVMPVLMYSFGILKWTQTELDALDRRVRTLLTESRMHHPRSSVMRLYIPRKCGGRGFLNAKTLHNREVCSLREYFFKAEVGMHRDVVAVDKGLTPLSMAKENWHRPEVLTTDDRKEVWQGKELHGRFYRALHGPDVDFIASVSWLRFGDLFGETEGFVCAIMDEVMLTNNYRKYIMKDGTVDVCRACHLPGESIRHIISGCSRLANGEYLHRHNQVARIIHQQLALKYKLVESEVPYYKYVPDPVLENDHVTLYWDRSIITDRTIVANKPDIVMVDRSARRVMIIDVTIPHDENLVKAEKEKQIKYLDLAHEVRGMWNMNSVIIVPIVVTANGLIAKSFDDHLSKLSLGGWIKGLIQKAVLLDTACIVRRFLSLQP

SEQ ID NO: 29223 - protein, 1198 aa, Xestia xanthographa
MLTRAAARRARLPSPESSLSSASPPPDPGSPVSPVAAVASSSSDEYFSPPTSPPPVRRAGRGRPPTSLGLRGQQAPSRVPATGGCVQRMKWTQSINENVMRAYYGSTEGGTNLTAYRVRMLSLFQDLEPTVNVSAQRLSDQVRVIQRNHRLDDAALDRLRSEVLSNLIILTPTQTAVHTSVNNVTLPRSNPDVVEEDDRVATVSSQCNYRLRSALEDFREYRSTPTELRPRLPRLPMHKKNRALVSALDSQLKNIFESSENLVDTHSILFCGAVAACRLANVKFPNCDVATRPKPAVPAWQCRIERRIDEARVLIGKLYCFREGNTRPRVMRFVRRAFSGTEISPQEYMSRVTERIDFLKQKVYAWANRIRRYKRRVDRYSQNRMFQSDERWVYRAWERPEQNMTDVCRPDDAATSSFWRSIWSVPVCHTESDWMRDVERVCEPIPEMEPILITPLDIAKAVRPLPNWKSPGPDGLHNFWLKWFSSSHTCLASQFQSSLESGSLPQFLTTGVTHLLHKSGSPAEPKNYRPITCLSTIYKLLTSILRVKINTHIDKNSIMSASQNGCRNGSRGTKELLLIDMAISQQVRRSRKDLSTCWIDYKKAYDSVPHTWLMRVLELYKIDTTLRAFLESCMGQWKTVLRYPGCRQIQGSDEPVWIKRGIFQGDSLSPLWFCLALNPLSTLLENSGLGCRLRKDGQVISHLLYMDDLKLFAPNKLRLMELLKVTETFSSAIRMEFGVDKCAVMYVKRGEIMESEGLQLSEFIHLRSLSSSETYKYLGMSEALGINVTDMKQSLKERFFGRLRKVLNSLLSGGNKVRAFNGWVMPVLMYSFGILKWTQTELDALDRRVRTLLTETRMHHPRSSVMRLYIPRKCGGRGFLNAKTLHNREVCSLREYFLKAEVGMHRDVVAVDKGLTPLSMAKENWHKPEVLTTDDRKEVWQGKELHGRFYRALHGPDVDFLASVFWLRFGDLFGETEGFVCAIMDEVMLTNNYRKYIMKDGTVDVCRACHLPGESIRHIISGCSRLANGEYLHRHNQVARIIHQQLALKYKLVESEVPYYKYVPDPVLEKDHVTLYWDRSIITDMTIVANKPDIVMIDRSARRVMIIDVTIPHDENLVKAEKEKQIKYLDLAHEVRDMWNMNSVIIVPIVVTANGLIAKSFDDHISKLSLGGWIKGLIQKAVLLDTARIVRRFLSLQP

SEQ ID NO: 29224 - protein, 1202 aa, Cosmia trapezina
MLTRSAARARPPPPDSSLSSASPPPVSSPTVSAVTTPAAVVASSSSDEYFSPPTSPIPVRRQGRGRPPKSLGLGGQPAPSRVPAAGGCVQRMRWTQSMNENVMRAYYGSTEGGTNLTAYRVRMLSLFQELEPTVNVSAQRLSDQVRVIQRNHRLDDAALDRLRSEMLSDRIVSTQAQTAVQDSIIDALPPRSNHVVEEEDDRVATVSSQSNDRLRNALEDAFREYRSTPTELRPRLPRLPMHKKNRALVCALDSHLKDFFESSEDLVDTHSILYCAAVAACRLANVKFPNCDGANRSKPAVPAWQCRIERRIDGARVLIGKLYCFREGNTRPRVMRFVRRAFSGTGISPPEYMSRVTERIDFLKQKVCAWASRIRRYKRRVDRYTQNRMFQSDERWVYRAWERPEQNVTDVCRPDDAATSAFWRSIWSVPVCHAEAGWMQDVERVCETIPEMETVLITPLDVARAVRPFPNWKSPGPDGLHNFWLKWLISSHTCLASQFQSSLESGSLPQFLTTGVTHLLHKSGSPVEPKNYRPITCLSTVYKLLTSILRAKINTHIASNSIISASQNGCRTGSRGTKELLLIDMAISQQVRRSRKDLSTCWIDYKKAYDSVPHTWLLKVLELYKIDATLRTFLESCMGQWRTVLRYPGCQQIRGSDEPVWIKRGIFQGDSLSPLWFCLALNPLSTLLEDSGLGYRLRRGGQVISHLLYMDDLKLFAPNELRLMELLKVTETFSGAIRMEFGVDKCAVMHVKRGEIMESEGIQLTDSIYLRSLSSSETYKYLGMSEALGINVADVKQSLKERFFGRLKKVLISLLSGGNKVRAFNGWVMPVLMYSFGILKWTQTELDALDRRVRTLLTANRMHHPRSSVMRLYIPRKCGGRGFLNAKTLHNREVCSLREYFLKADVGMHRDVVAVDKGLTPLSMAKENWRKPVLLTTDDRRKVWQSKELHGRFYRALHEPGVDFLASVSWLRFSDLFGETEGFVCAIMDEVILTNNYRRYIMKDGTVDVCRACHRPGESIRHIISGCSRLANGEYLHRHNQVARIIHQQLALKYKLVDSEVPYYKYVPDPVLENDHVTLYWDRSIITDRTIVANKPDIVVIDRLARRAMIVDVTIPHDGNLVKAEKEKQIKYLDLAHEVVDMWNVDSAVIVPIVVTANGLIADSLDQHLSRLSLGGWIKGQIQKAVLLDTARIVRRFLSLQP

SEQ ID NO: 29225 - protein, 1199 aa, Mamestra brassicae
MLTRAALQRARPPPPDPSLSSASPPPDIGSPLSPAVAVASSSSDEYFSPPTSPTPVRRQGRGRPPRGLGPRGQPAPSRVPATGGCVQRMRWTQSMNENVMRAYYGSTEGGTNLTAYRVRMLSLFQDLEPTVNVSAQRLSDQVRVIQRNHRLDDAALDRLRSEVLNNLIISTPTQTAVQAPVNGSITPRPNNVSDEVDDRVVTVSSQCNDRLRSALEDALREYRSTPTELRPRLPRLPMHKKNRALVCALDSLLQNIFESSESLVDTHSILYCGAVAACRIANVKFPGCDEAIRPKPAAPAWQRRIERRIDETRALTGKLYCFREGNTRPRVMRFVRRAFSGTEISPRDFTSRVTERIDFLKQKVCAWASRIRRYKRRVDRYSQNRMFQSDERWVYRAWERPEQSVTDVCRPDDVATSIFWRSIWSVPICHAEGGWMRDVERVCEAIPQMEKITITTLDVAKAVRPLPNWKSPGPDGLHNFWLKWYSSSHALLASQFQSSLDSGSLPQFLTTGVTHLLHKTGSPTEPKNYRPITCLSTVYKLLTSILRAKINEHIESNSIMSASQNGCRKGSRGTKELLLIDMSISQQVRRSRKDLSTCWIDYKKAYDSVPHTWLMKVLELYKIDATLRTFLESCMRQWKTVLRYPGCRPIQGSDEPVWIKRGIFQGDSLSPLWFCLALNPLSTLLEDSGLGYRLRRGGQAISHLLYMDDLKLFAPNNLRLMELLKVTETFSSAIRMEFGVDKCAVMHVKKGEIMESEGIHLSDSIQVRSLSSTETYKYLGMLEALGINGTDLKQSLRERFFGRLKKVLNSLLSGGNKVRAFNGWVMPVLMYTFGILKWTQTELDALDRRVRTLLTANRMHHPRSSVMRLYIPRKCGGRGFLNAKTLHNREMCSLREYFLKADVGMHRDVVAVDKGLTPLSMAKENWRTPVILTTDDRKEVWKGKELHGRFYRALHGSDVDFSASVAWLRFGDLFGETEGFVCAIMDEVILTNNYRRHIMKDGTVDMCRACHRPGESIRHIISGCSRLANGEYLHRHNQVARIIHQQLALKYNLVDSEVPYYKYVPDPVLENDHVTLYWDRSIITDRTIVANKPDIVVIDRLARRTMIIDVTIPHDENLVKAEKEKQIKYLDLAHEVVDMWNVDSAVIVPIVVTANGLMAKSFDDHLSKLALRSWVKGLIQKAVLLDTARIVRRFLFLEP

SEQ ID NO: 29226 - protein, 1199 aa, Mamestra brassicae
MLTRAALQRARPPPPDPSLSSASPPPDIGSPLSPAVAVASSSSDEYFSPPTSPTPVRRQGRGRPPRGLGPRGQPAPSRVPATGGCVQRMRWTQSMNENVMRAYYGSTEGGTNLTAYRVRMLSLFQDLEPTVNVSAQRLSDQVRVIQRNHRLDDAALDRLRSEVLNNLIISTPTQTAVQAPVNGRITPRPNNVSDEVDDRVVTVSSQCNDRLRSALEDALREYRSTPTELRPRLPRLPMHKKNRALVCALDSLLQNIFESSESLVDTHSILYCGAVAACRIANVKFPGCDEAIRPKPAAPAWQRRIERRIDETRALIGKLYCFREGNTRPRVMRFVWRAFSGTEISPRDFTSRVTERIDFLKQKVCAWASRIRRYKRRVDRYSQNRMFQSDERWVYRAWERPEQSVTDVCRPDDVATSIFWRSIWSVPICHAEGGWMRDVERVCEAIPQMEKITITTLDVAKAVRPLPNWKSPGPDGLHNFWLKWYSSSHALLASQFQSSLDSGSLPQFLTTGVTHLLHKTGSPAEPKNYRPITCLSTVYKLLTSILRAKINEHIESNSIMSASQNGCRKGSRGTKELLLIDMAISQQVRRSRKDMSTCWIDYKKAYDSVPHTWLMKVSELYKIDATLRTFLESCMRQWKTVLRYPGCRPIQGSDEPVWIKRGIFQGDSLSPLWFCLALNPLSTLLEDSGLGYRLRRGGQAISHLLYMDDLKLFAPNNLRLMELLKVTETFSSAIRMEFGVDKCAVMHVKKGEIMESEGIHLSDSIQVRSLSSTETYKYLGMLEALGINGTDMKQSLRERFFGRLKKVLNSLLSGGNKVRAFNGWVMPVLMYTFGILKWTQTELDALDRRVRTLLTANRMHHPRSSVMRLYIPRKCGGRSFLNAKTLHNREMCSLREYFLKADVGMHRDVVAVDKGLTPLSMAKENWRTPVILTTDDRKEVWKGKELHGRFYRALHGSDVDFSASVAWLRFGDLFGETEGFVCAIMDEVILTNNYRRHIMKDGTVDMCRACHRPGESIRHIISGCSRLANGEYLHRHNQVARIIHQQLALKYNLVDSEVPYYKYVPDPVLENDHVTLYWDRSIITDRTIVANKPDIVVIDRLARRTMIIDVTIPHDENLVKAEKEKQIKYLDLAHEVVDMWNVESAVIVPIVVTANGLMAKSFDDHLSKLALSSWVKGLIQKAVLLDTARIVRRFLSLEP

SEQ ID NO: 29227 - protein, 962 aa, Mamestra brassicae
MHKKNRALVCALDSLLQNIFESSESLVDTHSILFCGAVAACRIANVKFPSCDEAIRPKPAAPAWQCRIERRIDEARALIGKLYCFREGNTRPRVMRFVRRAFSGTGISPREYTFRVTERIDFLKQKVCAWANRIRRYKRRVDRYSQNRMFQSDERWVYRAWERPEQSVTDVYRPDDVATTTFWRSIWSVPICHAEGGWMRDVERVCEAIPQMEKITITTLDVAKAVRPLPNWKSPGPDGLHNFWLKWYSSSHALLASQFQSSLESGSLPQFLTTGITHLLHKTGSPAEPKNYRPITCLSTVYKLLTSILRAKINEHIESNSIMSASQNGCRKGSRGTKELLLIDMAISQQVRRSRKDLSTCWIDYKKAYDSVPHTWLMKVLELYKIDATLRTFLESCMRQWKTVLRYPGCQPIQGSDEPVWIKRGIFQGDSLSPLWFCLALNPLSTLLEDSGLGYRLRRGGQAISHLLYMDDLKLFAPNNLRLMELLKVTETFSSAIRMEFGVDKCAVMHVKKGEIMESEGIQLSDSIQVRSLSSTESYKYLGMSQALGINGTDMKQSLRERFFGRLKKVLNSLLSGGNKVRAFNGWVMPVLMYTFGILKWTQTELDALDRRVRTLLTANRMHHPRSSVMRLYIPRKCGGRGFLNAKTLHNREMCSLREYFLKADVGMHRDVVAVDKGLTPLSMAKENWRKPVILTTDDRKEVWKGKELHGRFYRALYGSDVDFSASVAWLRFGDLFGETEGFVCAIMDEVILTNNYRKHIMKDGTVDVCRACHRPGESIRHIISGCSRLANGEYLHRHNQVARIIHQQLALKYKLVDSEVPYYKYVPDPVLENDHVTLYWDRSIITDRTIVANKPDIVVIDRLARRTMIIDVTIPHDENLVKAEKEKQIKYLDLAHEVVDMWNVDSAVIVPIVVTANGLMAKSFDDHLSKLALRGWIKGLIQKAVLLDTARIVRRFLSLEP

SEQ ID NO: 29228 - protein, 1199 aa, Mamestra brassicae
MITRAAVRRAHPPPPGSSLSSASPTPDIGSQVSPVVAVASSSSDEYFSPPTSPTPVRRQGRGRPPRSLGSRGQPALSRVPAAGGCVQRMRWTQSMNENVMRAYYVSTEGGTNLTAYRVRMLSLFQDLEPTVNVSAQRLSDQVRVIQHNCRLDDAALERLRSEVLSNLIISTPTQTVVQAPASGAITPRPNNGSDEVDDRVVTVSSQCNDRLRSALEDALREYRLTPTELRPRLPRLPMHKKNRALVCALDSLLQNIFESSESLVDTHSILFCGAVAACRIANVKFPSCDEAIRPKPAAPAWQCRIERRIDEARALIGKLYCFREGNTRPRVMRFVRRAFSGTGISPREYTFRVTERIDFLKQKVCAWANRIRRYKRRVDRYSQNRMFQSDERWVYRAWERPEQSVTDVYRPDDVATSTFWRSIWSVPICHAEGGWMRDVERVCEAIPQMEKITITTLDIAKAVRPLPNWKSPGPDGLHNFWLKWYSSSHALLASQFQSSLESGSLPQFLTTGITHLLHKTGSPAEPKNYRPITCLSTVYKLLTSNLRAKINEHIESNSIMSASQNGCRKGSRGTKELLLIDMAISQQVRRSRKDLSTCWIDYKKAYDSVPHTWLMKVLELYKIDATLRTFLESCMRQWKTVLRYPGCQPIQGSDEPVWIKRGIFQGDSLSPLWFCLALNPLSTLLEDSGLGYRLRRGGQAISHLLYMDDLKLFAPNNLRLMELLKVTETFSSAIRMEFGVDKCAVMHVKKGEIMESEGIQLSDSIQVRSLSSTESYKYLGMSEALGINGTDMKQSLRERFFGRLKKVLNSLLSGGNKVRAFNGWVMPVLMYTFGILKWTQTELDALDRRVRTLLTANRMHHPRSSVMRLYIPRKCGGRGFLNAKTLHNREMCSLREYFLKADVGMHRDVVAVDKGLTPLSMAKENWRKPVILTTDDRKEVWKGKELHGRFYRALYGSDVDFSASVAWLRFGDLFGETEGFVCAIMDEVILTNNYRKHIMKDGTVDVCRACHRPGESIRHIISGCSRLANGEYLHRHNQVARIIHQQLALKYKLVDSEVPYYKYVPDPVLENDHVTLYWDRSIITDRTIVANKPDIVVIDRLARRTMIIDVTIPHDENLVKAEKEKQIKYLDLAHEVVDMWNVDSAVIVPIVITANGLMAKSFDDHLSKLALRGWIKGLIQKAVLLDTARIVRRFLSLEP

SEQ ID NO: 29229 - protein, 1202 aa, Noctua fimbriata
MITRAAYRRARLPPPDPSLSSASPPPESSPIVSAVTPAVAVASSSSDEYFSPPTSPTPVRRQGRGRPPRSLGLRGHPAPSRVPAAGGCVQRMRWTHSINENVMRAYYGSTEGGTNLTAYRVGMLSLFQVLEPTVNVSAQRLSDQVRVIQRNHMLDDAVLDRLRSEVLSNRIVLTPAQTAVQASVIDATPPRFNPAVVEEDDRVAVVSSQCNDRLRSALEDALREYRSTPTELRPRLPRLPMHNKNRALVCALDSQLENIFESSENLVDTHSILYCGAVAACRLANVKFSNCDVATRPKPAVPAWQRRIERRIDGARVLIGKLHCFREGNTRPRVMRFVRRAFSGTGISPQEYMSRVTERIDFLKQKVYAWANRIRRYKRRVDRYSQNRMFQSDERWVYRAWERPELNMTDVCRPDDAATSSFWRSIWSVPVCHTEADWMRDVERVCEPIPEMEPILITPLDIARAVRPLPNWKSPGPDGLHNFWLKWLSSSHTCLASQFQSSLESGSLPQFLTTGVTHLLHKSGSPAEPKNYRPITCLSTVYKLLTSILRAKINTHIDKNSIMSASQNGCRNGSRGTKELLLIDMAISQQVRRSRKDLSTCWIDYKKAYDSVPHTWLMRVLELYKIDATLRAFLESCMGQWRTVLRYPGCRQIQGNDELVWIKRGIFQGDSLSPLWFCLALNPLSTLLEDSGLGYRLRRGGQVISHLLYMDDLKLFAPNKLQLMELLKVTETFSSAIRMEFGVDKCAVMYVKRGEIMESEGIQLSDFIHLRSLSSSESYKYLGMSEALGINVTDMKQSLKERFFGRLNKVLHSLLSGGNKVRAFNGWVMPVLMYSFGVLKWTQTELDALDRRVRTLLTANRMHHPRSSVMRLYIPRKCGGRGFLNAKSLHNREMCSLREYFLKVEVGMHRDVVAVDKGLTPLSMAKENWRKPEVLTTDDRKEVWQGKELHGRFYRALHGPDVDFLASVSWLRFGDLFGETEGFVCAIMDEVMLTNNYRKYIMKDGTVDVCRACHRPGESIRHIISGCSRLANGEYLHRHNQVARIIHQQLALKYKLVESEVPYYKYVPDPVLEKNHVTLYWDQSIITDRTIVANKPDIVVIDRSARRVMIVDVTIPHDENLVKAEKEKQIKYLDLAHEVVDMWHVNSAIIVPIVVTANGLIAKSLDEHLSKLSLGGWIKGLIQKAVLLDTARIVRRFLSLEP

SEQ ID NO: 29230 - protein, 1199 aa, Noctua fimbriata
MITRAAYRCARLTTPDSPLRSASPPPDPGSPVSPAAAVASSSSDEYFSPPTSPTPVRRQGRGRPPRSLGLRGHPAPSRVPAAGGCVQRMRWTHSINENVMRAYYGSTEGGTNLTAYRVGMLSLFQVLEPTVNVSAQRLSDQVRVIQRNHMLDEAVLDRLRSEVLSNRIVLTPAQTAVQASVVDATPPRFNPAVVEEDDRVAVVSSQCNDRLRSALEDALREYRSTPTELRPRLPRLPMHNKNRALVCALDSQLKNIFESSENLVDTHSILYCGAVAACRLANVKFPNCDVATRPKPAVPAWQRRIERRIDGARVLIGKLYCFREGNTRPRVMRFVRRAFLGTEISPQEYMSRVTERIDFLKQKVYAWANRIRRYKRRVDRYSQNRMFQSDERWVYRAWERPELNMTDVCRPDDAATCSFWRSIWSVPVCHTEADWMRDVERVCEPIPEMEPILITPLDIARAVRPLPNWKSPGPDGLHNFWLKWLSSSHTCLASQFQSSLESGSLPQFLTTGVTHLLHKSGSPAEPKNYRPITCLSTVYKLLTSILRAKINTHIDKNSIMSASQNGCRSGSRGTKELLLIDMAISQQVRRSRKDLSTCWIDYKKAYDSVPHTWLMRVLELYKIDATLRAFLESCMGQWRTVLRYPVCGQIQGNDEPVWIKRGIFQGDSLSPLWFCLALNPLSTLLEDSGLGYRLRRGGQVISHLLYMDDLKLFAPNKLQLMELLKVTETFSSAIRMEFGVDKCAVMYVKRGEIMESEGIQLSDSIHLRTLSSTESYKYLGMSEALGINVTDMKQSLKERFFGRLNKVLHSLLSGGNKVRAFNGWVMPVLMYSFGVLKWTQTELDALDRRVRTLLTANRMHHPRSSVMRLYIPRKCGVRGFLNAKSLHNREMCSLREYFLKVEVGMHRDVVAVDKGLTPLSMAKENWRKPEVLTTDDRKEVWQGKELHGRFYRALHGPDVDFLASVSWLRFGDLFGETEGFVCAIMDEVMLTNNYRKYIMKDGTVDVCRACHRPGESIRHIISGCSRLANGEYLHKHNQVARIIHQQLAMKYKLVESEVPYYKYVPDPVLEKDHVTLYWDQSIITDRTIVANKPDIVVIDRSARRVMIVDVTIPHDENLVKAEKEKQIKYLDLAHEVVDMWNVNSAIIVPIVVTANGLIAKSLDDHLSKLSLGGWIKGLIQKAVLLDTARIVRRFLSLEP

SEQ ID NO: 29231 - protein, 962 aa, Noctua fimbriata
MHNKNRALVCALDSQLENIFESSENLVDTHSILYCGAVAACRLANVKFSNCDVATRPKPAVPAWQRRIERRIDGARVLIGKLHCFREGNTRPRVMRFVRRAFSGTGISPQEYMSRVTERIDFLKQKVYAWANRIRRYKRRVDRYSQNRMFQSDERWVYRAWERPELNMTDVCRPDDAATSSFWRSIWSVPVCHTEADWMRDVERVCEPIPEMEPILITPLDIARAVRPLPNWKSPGPDGLHNFWLKWLSSSHTCLASQFQSSLESGSLPQFITTGVTHLLHKSGSPAEPKNYRPITCLSTVYKLLTSILRAKINTHIDKNSIMSASQNGCRNGSRGTKELLLIDMAISQQVRRSRKDLSTCWIDYKKAYDSVPHTWLMRVLELYKIDATLRAFLESCMGQWRTVLRYPGCRQIQGNDEPVWIKRGIFQGDSLSPLWFCLALNPLSTLLEDSGLGYRLRRGGQVISHLLYMDDLKLFAPNKLQLMELLKVTETFSSAIRMEFGVDKCAVMYVKRGEIMESEGIQLSDFIHLRSLSSSESYKYLGMSEALGINVTDMKQSLKERFFGRLNKVLHSLLSGGNKVRAFNGWVMPVLMYSFGVLKWTQTELDALDRRVRTLLTANRMHHPRSSVMRLYIPRKCGGRGFLNAKSLHNREMCSLREYFLKVEVGMHRDVVAVDKGLTPLSMAKENWRKPEVLTTDDRKEVWQGKELHGRFYRALHGPDVDFLASVSWLRFGDLFGETEGFVCAIMDEVMLTNNYRKYIMKDGTVDVCRACHRPGESIRHIISGCSRLANGEYLHRHNQVARIIHQQLALKYKLVESEVPYYKYVPDPVLEKNHVTLYWDQSIITDRTIVANKPDIVVIDRSARRVMIVDVTIPHDENLVKAEKEKQIKYLDLAHEIVDMWHVNSAIIVPIVVTANGLIAKSLDDHLSKLSLGGWIKGLIQKAVLLDTARIVRRFLSLEP

SEQ ID NO: 29232 - protein, 1202 aa, Noctua fimbriata
MITRAASRRARLPPPDQSLSSASPPPESSPIVSAVTPAVAVASSSSDEYFSPPTSPTPVRRQGRGRPPRSLGLRGHPAPSRVPAAGGCVQRMRWTHSINENVMRAYYGSTEGGTNLTAYRVGMLSLFQVLEPTINVSAQRLSDQVRVIQRNHMLDDAVLDRLRSEVLSNRIVFTPAQTAVQASVIDATPPRFNPAVVEEDDRVAVVSSQCNDRLRSALEDALREYRSTPTELRPRLPRLPMHNKNRALVCALDSQLKNLFESSENLVDTHSILYCGAVAACRLANVKFPNCDVATRPKPAVPAWQRRIECRIDGARVLIGKLHCFREGNTRPRVMRFVRRAFSGTGISPQEYMSRVTERIDFLKQKVYAWANRIRRYKRRVDRYSQNRMFQSDERWVYRAWERPDQNMTDMCRPDDAATSSFWRSIWSVPVCHTEADWMRDVEQVCEPIPEMEPILITPLDVARAVRPLPNWKSPGPDGLHNFWLKWLSSSHTCLASQFQSSLESGSLPQFLTTGVTHLLHKSGSPAEPKNYRPITCLSTVYKLLTSILRAKINTHIDKNSIMSASQNGCRNGSRGTKELLLIDMAISQQVRRSRKDLSTCWIDYKKAYDSVPHTWLMRVLELYKIDATLRAFLESCMGQWRTVLRYPGCRQIQGNDEPVWIKRGIFQGDSLSPLWFCLALNPLSTLLEDSGLGYRLRRGGQVISHLLYMDDLKLFAPNKLRLMELLKVTETFSSAIRMEFGVDKCAVMYVKQGEIMKSEGIQLSDSIHLRTLSSTESYKYLGMSEALGINVTDMKQSLKERFFGRLNKVLHSLLSGGNKVRAFNGWVMPVLMYSFGVLKWTQTELDALDRRVRTLLTANRMHHPRSSVMRLYIPRKCGGRGFLNAKSLHNREMCSLREYFLKVEVGMHRDVVAVDKGLTPLSMAKENWRKPEVLTTDDRKEVWQGKELHGRFYRALHGPDVDFLASVSWLRFGDLFGETEGFVCAIMDEVMLTNNYRKYIMKDGMVDVCRACHRPGESIRHIISGCSRLANGEYLHRHNQVARIIHQQLALKYKLVESEVPYYKYVPDPVLEKDHVTLYWDQSIITDRTIVANKPDIVVIDRSARRVMIVDVTIPHDENLVKAEKEKQIKYLDLAHEVVDMWNVNSAIIVPIVVTANGLIAKSLDDHLSKLSLGGWIKGLIQKAVLLDTARIVRRFLSLEP

SEQ ID NO: 29233 - protein, 951 aa, Noctua fimbriata
MPDGRARIFESSENLVDTHSILYCGAVAACRLANVKFPNCDVATRPKPTVPAWQRRIERRIDGARVLIGKLHCFREGNTRPRVMRFVRRAFSGTGISPQEYMSRVTERIDFLKQKVYAWANRIRRYKRRVDRYSQNRMFQSDERWVYRAWERPELNMTDVCRPDDAATSSFWRSIWSVPVCHTEADWMRDVERVCEPIPEMEPILITPLDIARAVRPLPNWKSPGPDGLHNFWLKWLSSSHTCLASQFQSSLESGSLPQFLTTGVTHLLHKSGSPAEPKNYRPITCLSTVYKLLTSILRAKINTHIDKNSIMSASQNGCRNGSRATKELLLIDMAISQQVRRSRKDLSTCWIDYKKAYDSVPHTWLMRVLELYKIDATLRAFLESCMGQWRTVLRYPGCRQIQGNDEPVWIKRGIFQGDSLSPLWFCLALNPLSTLLEDSGLGYRLRRGGQVISHLLYMDDLKLFAPNKLQLMELLKVTETFSSAIRMEFGVDKCAVMYVKRGEIMESEGIQLSDSIHLRSLSSSESYKYLGMSEALGINVTDMKQSLKERFFGRLNKVLHSLLSGGNKVRAFNGWVVPVLMYSFGVLKWTQTELDALDRRVRTLLTLNRMHHPRSSVMRLYIPRKCGGRGFLNAKSLHNREMCSLREYFLKVEVGMHRDVVAVDKGLTPLSMAKENWRKPEVLTTDDRKEVWQGKELHGRFYRALHGPDVDFLASVSWLRFGDLFGETEGFVCAIMDEVMLTNNYRKYIMKDGTVDVCRACHRPGESIRHIISGCSRLANGEYLHRHNQVARIIHQQLALKYKLVESEVPYYKYVPDPVLEKDHVTLYWDQSIITDRTIVANKPDIVVIDRSARRVMIVDVTIPHDENLVKAEKEKQIKYLDLAHEVVDMWNVNSAIIVPIVVTANGLIAKSLDDHLSKLSLGGWIKGLIQKAVLLDTARIVRRFLSLEP

SEQ ID NO: 29234 - protein, 1202 aa, Noctua fimbriata
MITRAAYRRARLPPPDPSLSSASPPPESSPIVSAVTPAVAVASSSSDEYFSPPTSPTPVRRQGRGRPPRSLGLRGHPAPSRVPAAGGCVQRMRWTHSINENVMRAYYGSTEGGTNLTAYRVGMLSLFQVLEPTVNVSAQRLSDQVRVIQRNHMLDDAVLDRLRSEVLSNRIVLTPAQTAVQASVIDATPPRFNPAVVEEDDRVAVVSSQCNDRLRSALEDALREYRSTPTELRPRLPRLPMHNKNRALVCALDSQLENIFESSENLVDTHSILYCGAVAACRLANVKFSNCDVATRPKPAVPAWQRRIERRIDEARVLIGKLHCFREGNTRPRVMRFVRRAFSGTGISPQEYMSHVTERIDFLKQKVYAWANRIRRYKRRVDRYSQNRMFQSDERWVYRAWERPELNMTDVCRPDDAATSSFWRSTWSVPVCHTEADWMRDVERVCEPIPEMEPILITPLDIARAVRPLPNWKSPGPDGLHNFWLKWLSSSHTCLASQFQSSLESGSLPQFLTTGVTHLLHKSGSPAEPKNYRPITCLSTVYKLLTSILRAKINTHIDKNSIMSASQNGSRNGSRGTKELLLIDMAISQQVRRSHKDLSTCWIDYKKAYDSVPHTWLMRVLELYKIDATLRAFLESCMGQWRTVLRYPGCRQIQGNDEPVWIKRGIFQGDSLSPLWFCLALNPLSTLLEDSGLGYRLRRGGQVISHLLYMDDLKLFAPNKLQLMELLKVTETFSSAIRMEFGVDKCAVMYVKRGEIMESEGIQLSDFIHLRSFSSSESYKYLGMSEALGINVIDMKQSLKERFFGRLNKVLHSLLSGGNKVRAFNGWVMPVLMYSFGVLKWTQTELDALDRRVRTLLTANRMHHPRSSVMRLYIPRKCGGRGFLNAKSLHNREMCSLREYFLKVEVGMHRDVVAVDKGLTPLSMAKENWRKPEVLTTDDRKEVWQGKELHGRFYRALHGPDVDFLASVSWLRFGDLFGETEGFVCAIMDEVMLTNNYRKYIMKDGTVDVCRACHRPGESIRHIISGCSRLANGEYLHRHNQVARIIHQQLALKYKLVESEVPYYKYVPDPVLEKNHVTLYWDQSIITDRTIVANKPDIVVIDRSARRVMIVDVTIPHDENLVKAEKEKQIKYLDLAHEVVDMWHVNSAIIVPIVVTANGLIAKSLDDHLSKLSLGGWIKGLIQKAVLLDTARIVRRFLSLEP

SEQ ID NO: 29235 - protein, 1202 aa, Noctua fimbriata
MITRAAYRRARLPPPDPSLSSASPPPESSPIVSAVTPAVAVASSSSDEYFSPPTSPTPVRRQGRGRPPRSLGLRGHPAPSRVPAAGGCVQRMRWTHSINENVMRAYYGSTEGGTNLTAYRVGMLSLFQVLEPTVNVSAQRLSDQVRVIQRNHMLDDAVLDRLRSEVLSNRIVLTPAQTAVQASVIDATPPRFNPAVVEEDDRVAVVSSQCNDRLRSALEDALREYRSTPTELRPRLPRLPMHNKNRALVCALDSQLENIFESSENLVDTHSILYCGAVAACRLANVKFSNCDVATRPKPAVPAWQRRIERRIDGARVLIGKLHCFREGNTRPRVMRFVRRAFSGTGISPQEYMSRVTERIDFLKQKVYAWANRIRRYKRRVDRYSQNRMFQSDERWVYRAWERPELNMTDVCRPDDAATSSFWRSIWSVPVCHTEADWMRDVERVCEPIPEMEPILITPLDVARAVRPLPNWKSPGPDGLHNFWLKWLSSSHTCLASQFQSSLESGSLPQFLTTGVTHLLHKSGSPAEPKNYRPITCLSTVYKLLTSILRAKINTHIDKNSIMSASQNGCRNGSRGTKELLLIDMAISQQVRRSRKDLSTCWIDYKKAYDSVPHTWLMRVLELYKIDATLRAFLESCMGQWRTVLRYPGCRQIQGNDEPVWIKRGIFQGDSLSPLWFCLALNPLSTLLEDSGLGYRLRRGGQVISHLLYMDDLKLFAPNKLQLMELLKVTETFSSAIRMEFGVDKCAVMYVKRGEIMESEGIQLSDFIHLRSLSSSESYKYLGMSEALGINVTDMKQSLKERFFGRLNKVLHSLLSGGNKVRAFNGWVMPVLMYSFGVLKWTQTELDALDRRVRTLLTANRMHHPRSSVMRLYIPRKCGGRGFLNAKSLHNREMCSLREYFLKVEVGMHRDVVAVDKGLTPLSMAKENWRKPEVLTTDDRKEVWQGKELHGRFYRALHGPDVDFLASVSWLRFGDLFGETEGFVCAIMDEVMLTNNYRKYIMKDGTVDVCRACHRPGESIRHIISGCSRLANGEYLHRHNQVARIIHQQLALKYKLVESEVPYYKYVPDPVLEKNHVTLYWDQSIITDRTIVANKPDIVVIDRSARRVMIVDVTIPHDENLVKAEKEKQIKYLDLAHEVVDMWHVNSAIIVPIVVTANGLIAKSLDDHLSKLSLGGWIKGLIQKAVLLDTARIVRRFLSLEP

SEQ ID NO: 29236 - protein, 1203 aa, Atethmia centrago
MLTRAASKRARPPPPDSSLSSASPPPVSSPTVSAVITPAAVVASSSSDEYFSPPTSPTPVRRQERDRPPKSLGLRGHPAPSRVPAAGGCVQRMRWTQSMNENVMRAYYGSTEGGTNLTAYRVRMLSLFQELEPTVNVSAQRLSDQVRVIQRNRRLDDATLDRLRSEVLSNYIISTPAQTAVHTPIIDVIPPRSNHGVEEEDDRAATVSSQCNVRLRSALEDAFREYRSTPTELRPRLPRLPMHKKNRALMCALDSQLKVFFESSEDLVDTHSILYCAAVAACRLANVKFPNSDGATRPKPAVPAWQCRIERRIDKARVLIGKLYCFREGNTRPRVMRFVRRAFSGTGISPREYMSHITKRIDFLRQKVCAWASRIRRYKRRVDRYTQNRMFQSDERWVYRAWERPKQNVTDVCRPDDATTTAFWRSIWSVPVCHVEADWMRDVERVCETIPEMEVVIITPSDIARAVRPLPNWKSPGPDGLHNFWLKWLTSSHTCLASQFQSSLESGSLPQFMTTGITHLLHKSGSTAEPKNYRPITCLSTVYKLLTSILRAKINTHIDSNSIMSASQNGCRNGSRGTKELLLIDMAISQQVRRSRKDLSTCWIDYKKAYDSVPHTWLMRVLELYKIDTTLRTFLESCMGQWRTVLRYPGCRQIQGNDEPVWIKRGIFQGDSLSPLWFCLALNPLSMQLEDSGLGYRLRRGGQIISHLLYMDDLKIFAPNKLQLMKLLKVTETFSSAIRMEFGVDKCAVMHVKRGEIMESEGIQLSDSIHLRSLSSPESYKYLGMSEALGINVTDMKQSLKERFFGRLKKVLISLLSGGNKVRAFNSWVMPVLTYSFGILKWTQTELDALDRRVRTLLTANRMHHPRSSVMRLYIPRKCGGRGFLNAKTLHNREICSLREYFLKTEVGMHRDVVAVDKGLTPLSMAKENWCKPVVLTTDDRKEIWQSKELHGRFYRALHEPDVDFLASVSWLRFGDLFGETEGFVCAIMDEVILTNNYRRHIMKDGTVDVCRACHRPGESIRHIISGCSRLANGEYLHRHNQVARIIHQQLALKYKLVNSEVPYYKYVPDPVLENDHVTLYWDRSIITDRTIVANKPDIVVIDRLARRAMIVDVTIPHDDNLVKAEKEKQIKYLDLAHEVVDMWNVNSAVIVPIVVTANGLMARSLNHHLSRLALDGWIKGLIQKAVLLDTARIVRRFLSLEP

SEQ ID NO: 29237 - protein, 868 aa, Atethmia centrago
MRFVRRAFSGTGISPREYMSHITERIDFLKQKVCAWASRIRRYKRRVDRYTQNRMFQSDERWVYRAWERPKQNVTDVCRPDDATTTAFWQSIWSVPVCHVEADWMRDVERVCETIPEMEVVIITPSDIARAVRPLPNWKSPGPDGLHNFWLKWLTSSHTCLASQFQSSLESGSLPQFMTTGITHLLHKSGSPAEPKNYRPITCLSTVYKLLTSILRAKINTHIDSNSIMSASQNGCRNGSRGTKELLLIDMAISQQVRRSRKDLSTCWIDYKKAYDSVPHTWLMRVLELYKIDTTLRTFLESCMGQWRTVLRYPGCRQIQGNDKPVWIKRGIFQGDSLSPLWFCLALIPLCMQLEDSGLGYRLRRGGQVISHLLYMDDLKIFAPNKLQLMKLLKVTETFSSAIRMEFGVDKCAVMHVKRGEIMESEGIQLSDSIHLRSLSSPESYKYLGMSEALGINVTDMKQSLKERFFGRLKKVLISLLSGGNKVRAFNGWVMPVLMYSFGILKWTQTELDALDRRVRTLLTANRMHHPRSSVMRLYIPRKCGGRGFLNAKTLHNREICSLREYFLKTEVGMHRYVVAVDKGLTPLSMAKENWCKPVVLTTDDRKEIWQSKELHGRFYRALHEPDVDFLASVSWLRFGDLFGETEGFVCAIMDEVILTNNYRRHIMKDGTVDVCRACHRPGESIRHIISGCSRLANGEYLHRHNQVARIIHQQLALKYKLVNSEVPYYKYVPDPVLENDHVTLYWDRSIITDRTIVANKPDIVVIDRLARRAMIVDVTIPHDDNLVKAEKEKQIKYLDLAHEVVDMWNVNSAVIVPIVVTANGLMARSLNHHLSRLALDDWIKGLIQKAVLLDTARIVRRFLSLEP

SEQ ID NO: 29238 - protein, 1203 aa, Atethmia centrago
MLTRAASKRARPPPPDSSLSSASPPPVSSPTVSAVITPAAVVASSSSDEYFSPPTSPTPVRRQGRDRPPKSLGLRGHPAPNRVPAAGGCVQRMRWTQSMNENVMRAYYGSTEGGTNLTAYRVRMLSLFQELEPTGNVSAQRLSDQVRVIQRNRRLDDATLDRLRSEVLSNYIISTPAQTAVHTPIIDVIPPRSNHGVEEEDDRAATVSSQCNVRLRSALEDAFREYRSTPTKLRPRLPRLPMHKKNRALMCALDSQLKVFFESSEDLVDTHSILYCAAVAACRLANVKFPNSDGATRPKPAVPAWQCRIERRIDKARVLIGKLFCFREGNTRPRVMRFVRRAFSGTGISPREYMSHITERIDFLKQKVCAWASRIRRYKRRVDRYTQNRMFQSDERWVYRAWERPKQNVTDVCRPDDATTTAFWRSIWSVPVCHVEADWMRDVERVCETIPEMEVVIITPSDIARAVRPLPNWKSPGPDGLHNFWLKWLTSSHTCLASQFQSSLESGSLPQFMTTGITHLLHKSGSPAEPKNYRPITCLSTVYKLLTSILRAKINTHIDSNSIMSASQNGCRNGSRGTKELLLIDMAISQQVRRSRKDLSTRWIDYKKAYDSVPHTWLMRVLELYKIDTTLRTFLESCMGQWRTVLRYPGCRQIQGNDEPVWIKRGIFQGDSLSPLWFCLALNPLSMQLEDSGLGYRLRRGGQIISHLLYMDDLKIFAPNKLQLMKLLKVTETFSSAIRMEFGVDKCAVMHVKRGEIMESEGIQLSDSIHLRSLSSPESYKYLGMSEALGINVTDMKQSLKERFFGRLKKVLISLLSGGNKVRAFNSWVMPVLTYSFGILKWTHTELDALDRRVRTLLTANRMHHPRSSVMRLYIPRKCGGRGFLNAKTLHNREICSLREYFLKTEVGMHRDVVAVDKGLTPLSMAKENWCKPVVLTTDDRKEIWQSKELHGRFYRALHEPDVDFLASVSWLRFGDLFGETEGFVCAIMDEVILTNNYRRHIMKDGTVDVCRACHRPGESIRHIISGCSRLANGEYLHRHNQVARIIHQQLALKYKLVNSEVPYYKYVPDPVLENDHVTLYWDRSIITDRTIVANKPDIVVIDRLARRAMIVDVTIPHDDNLVKAEKEKQIKYLDLAHEVVDMWNVNSAVIVPIVVTANGLMARSLNHHLSRLALDGWIKGLIQKAVLLDTARIMRRFLSLEP

SEQ ID NO: 29239 - protein, 868 aa, Atethmia centrago
MRFVRRAFSGTGISPREYMSHITERIDFLKQKVCAWASRIRRYKRRVDRYMQNRMFQSDERWVYRAWERPKQNVTDVCRPDDATTTAFWRSIWSVPVCHVEADWMRDVERVCETIPEMEVVIITPSDIARAVRPLPNWKSPGPDGLHNFWLKWLTSSHTCLASQFQSSLESGSLPQFMTTGITHLLHKSGSPAEPKNYRPITCLSTVYKLLTSILRAKINTHIDSNSIMSASQNGCRNGSRGTKELLLIDMAISQQVRRSRKDLSTCWIDYKKAYDSVPHTWLMRVLELYKIDTTLRTFLESCMGQWRTVLRYPGCRQIQGNDEPVWIKRGIFQGDSLSPLWFCLALNPLSMQLEDSGLGYRLRRGGQIISHLLYMDDLKIFAPNKLQLMKLLKVTETFSSAIRMEFGVDKCAVMHVKRGEIMESEGIQLSDSIHLRSLSSPESYKYLGMSEALGINVTDMKQSLKERFFGRLKKVLISLLSGGNKVRAFNSWVMPVLTYSFGILKWTQTELDALDRRVRTLLTANRMHHPRSSVMRLYIPRKCGGRGFLNAKTLHNREICSLREYFLKTEVGMHRDVVAVDKGLTPLSMAKENWCKPVVLTTDDRKEIWQSKELHGRFYRALHEPDVDFLASVSWLRFGDLFGETEGFVCAIMDEVILTNNYRRHIMKDGTVDVCRACHRPGESIRHIISGCSRLANGEYLHRHNQAARIIHQQLALKYKLVNSEVPYYKYVPDPVLENDHVTLYWDRSIITDRTIVANKPDIVVIDRLARRAMIVDVTIPHDDNLVKAEKEKQIKYLDLAHEVVDMWNVNSAVIVPIVVTANGLMARSLNHHLSRLALDGWIKGLIQKAVLLDTARIVRRFLSLEP

SEQ ID NO: 29240 - protein, 1201 aa, Mesoligia furuncula
MLTRLAARRARLPPPDSSLSSAPPSPEPSPIESAVTPAVAVASSSSDEYFSPPTSPTPVRRQGRGRPPNSLGLRGHPAPSRVPATGGCVQRMRWTQSMNENVMRAYYGSTEGGINLTAYRDRMLSLFQELEPTVNVSAQRLSDQVRVIQRNHRLDDIALDRLRSEVLSNHIVTTSAQTAAQASTVDAIPPRFNHVEEEDDRVDTVSSQCNVRLRSALEDALREYRSTPTELRPRLPRLPMHKKNRALVCALDSQLKNFFESSEDLVDTHSILYCAAVAACRLANVKFPSCDGATRPKPAVPAWQRRIERRIDGARVLIGKLYCFREGNTRPRVMRFVRRAFSGTGISPREFMSRLTEPIDFLKQKVCAWASRIRRYKRRVDRYTQNRMFQSDERWVYRAWERPEQNVTDVCRPDDAATSAFWCSIWSVPVCHTEAGWMQDVERVCESIPQMEKVLITPSDVARAVRPLPNWKSPGPDGLHNFWLKWLISSHTCLASQFQSSLESGSLPQFLTTGVTHLLHKSGSPAEPKNYRPITCLSTVYKLLTSILRAKINMHIESNSIMSASQNGCRNGSRGTKELLLKDMAISQQVRRSRKDLSTCWIDYKKAYDSVPHTWLMRVLELYKIDATLRTFLESCMGQWKTVLRYPGCRQIQGNDEPVWIKRGIFQGDSLSPLWFCLALNPLSTLLEDSGLGYRLRRGGQVISHLLYMDDLKLFAPNKLRLMEPLKVTETFSSAIRMQFGVDKCAVMHVKRGEIKESDGIQLSDSISLRSLSSSESYKYLGMSEALGINDADMKQSLKERFFCRLKKVLISLLSGGNKVRAFNGWVMPVLMYSFGILKWTQTELDALDRRVRTLLTANRMHHPRSSVMRLYIPRKCGGRGFLSAKTLHNREVCSLREYFLKAEVGMHRDVVAVDKGLTPLSMAKENWRKPVVLSTDDRKKVWQSKELHGRFYRALHEPGVDFIASVSWLRFGDLFGETEGFVCAIMDEVILTNNYRRHIMKDGTVDVCRACHRPGESIRHIISGCSRLANGEYLHRHNQVARIIHQQLALKYKLVDSEVPYYKYVPDPVLENDHVTLYWDRSIITDRTIVANKPDIVVIDRLARRTMIVDVTIPHDGNLVKAEKEKEIKYQDLAHEVVDMWNVSSAIIVPIVVSANGLMAESLDQHLSRLSLGGWIKGLIQKAVLLDTARIVRRFLSLEP

SEQ ID NO: 29241 - protein, 1201 aa, Mesoligia furuncula
MLTRSAARRAHLPPPDSSLSPAPPPPEPSPIESAVTPAVAVASSSSDEYFSPPTSPTPVRRQGRGRPPNSLGLRGHPAPSRVPATGGCVQRMRWTQSMNENVMRAYYGSTEGGINLTAYRDRMLSLFQELEPTVNVSAQRLSDQVRVIQRNHRLDDIALDRLRSEVLSNHIVSTSAQTAAQVSTVDAIPPRFNRVEEEDDRVDTVSSQCNVRLRSALEDALREYRSTPTELRPRLPRLPMHKKNRALVCALDSQLKNFFESSEDLVDTHSILYCAAVAACRLANVKFSSCDGATRPKPAVPAWQRRIERRIDGARVLIGKLYCFREGNTRPRVMRFVRRAFSGTGISPREYMSRVTERIDFLKQKVCAWASRIRRYKRRVDRYTQNRLFQSDERWVYRAWERPEQNVTDVCRPDDAATSAFWCSIWSVPVCHTEAGWMQDVERVCESVPEMEKVLITPSDVARAVRPLSNWKSPGPDGLHNFWLKWLISSHTCLASQFQSSLESGSLPQFLTTGVTHLLHKSGSPAEPKNYRPITCLSTVYKLLTSILRAKINKHIESNSIMSASQNGCRNGSRGTKELLLIDMAISQQVRRSRKDLSTCWIDYKKAYDSVPHTWLMRVLELYKIDATLRTFLESCMGQWKTVLRYPGCRQIQGNDEPVWIKRGIFQGDSLSPLWFCLALNPLSTLLEDSGLGYRLRRGGQVISHLLYMDDLKLFAPNKLRLMELLKVTKTFSSAIKMEFGVDKCAVMHVKRGEIMESEGIQLSDSINLRSLSSSESYKYLGMSEALGINDADMKQSLKERFFCRLKKVLISLLSGGNKVRAFNGWVMPVLMYSFGILKWTQTELDALDRRVRTLLTANRMHHPRSSVMRLYIPRKCGGRGFLNTKTLHNREVCSLREYFLKAEVGMHRDVVAVDKGLTPLSMAKENWRKPVVLSTDDRKRVWQSKELHGRFYRALHEPGVDFIASVSWLRFGDLFGETEGFVCAIMDEVILTNNYRRHIMKDGTVDVCRACHRPGESIRHIISGCSRLANGEYLHRHNQVARIIHQQLALKYKLVDSEVPYYKYVPDPVLENDHITLYWDRSIITDRTIVANKPDIVVIDRLARRTMIVDITIPHDGNLVKAEKEKQIKYLDLAHEVVDMWNVSSAIIVPIVVSANGLMAESLDQHLSRLSLGGWIKGLIQKAVLLDTARIVRRFLSLEP

SEQ ID NO: 29242 - protein, 1201 aa, Mesoligia furuncula
MLTRSAARRAHLPPPDSSLNPAPPPPEPSPIESAVTPAAAVASSSSDEYFSPPTSPTPVRRQGRGRPPNCLGLRGHPAPSRVPATGGCVQRMRWTQSMNENVMRAYYGSTEGGINLTAYRDRMLSLFQELEPTVNVSAQRLSDQVRVIQRNHRLDDIALDRLRSEVLSNHIVSTSAQTAAQVSSVDAIPPRFNHVEEEDDRVDTVSSQCNVRLRSALEDALREYRSTPTELRPRLPRLPMHKKNRALVCALDSQLKNFFESSVDLVDTHSILYCAAVAACRLANVKFPSCDGATRPKPAVPAWQRRIERRIDGARVLIGKLYCFREGNTRPRVMRFVRRAFSGTGISPREYMSRVTERIDFLKQKVCAWASRIRRYKRRVDRYTQNRMFQSDERWVYRAWERPEQNVTDVCRPDDAATSAFWCSIWSVPVCHTEAGWMQDVERVCESVPEMETVLITPSDVARAVRPLSNWKSPGPDGLHNFWLKWLISSHTCLASQFQSSLESGSLPQFLTTGVTHLLHKSGSPAEPKNYRPITCLSTVYKLLTSILRAKINKHIESNSIMSTSQNGCRNGSRGTKELLLIDMAISQQVRRSRKDLSTCWIDYKKAYDSVPHTWLMRVLELYKIDATLRTFLESCMGQWKTVLRYPGCRQIQGNDEPVWIKRGIFQGDSLSPLWFCLALNPLSTLLEDSGLGYRLRRGGQVISHLLYMDDLKLFAPNKLRLMELLKVTKTFSSAIRMEFGVDKCAVMHVKRGEIMESEGIQLSDSISLRSLSSSESYKYLGMSEALGINDADMKQSLKERFFCRLKKVLISLLSGGNKVRAFNGWVMPVLMYSFGILKWTQTELDALDRRVRTLLTANRMHHPRSSVMRLYIPRKCGGRGFLNAKTLHNREVCSLREYFLKTEVGMHRDVVAVDKGLTPLSMAKENWRKPVVLSTDDRKKVWQSKELHGRFYRALHEPGVDFIASVSWLRFGDLFGETEGFVCAIMDEVILTNNYRRHIMKDGTVDVCRACHRPGESIRHIISGCSRLANGEYLHRHNQVARIIHQQLALKYKLVDSEVPYYKYVPDPVLENDHVTLYWDRSIITDRTIVANKPDIVVIDRLARRTMIVDVTIPHDGNLVKAEKEKKIKYLDLAHEVVDMWNVSSAVIVPIVVSANGLMAESLDQHLSRLSLGGWIKGLIQKAVLLDTARIVRRFLSLEP

SEQ ID NO: 29243 - protein, 1199 aa, Xestia c-nigrum
MITRAASRRALIPSPDSSLSSASPPPDPGSPVSPVAAVASSSSDEYFSPPTSPTPVRRAGRGRPPKGLGLRGQQAPSRVPATGGCVQRMKWTQLMNENVMRAYYGSTEGGTNLTAYRVRMLSLFQDLEPTVNASAQRLSDQVRVIQRNHLLDGAALDRLRSEVLSNRIILTPAQTAVQASSIDANPPRSNPAVVEEDDRVATVSSQCNDRLRSALEDALHEYRSTSAELRPRLPRLPMHKKNRALVCALDSQLKNVFESSEDLVDTHSILFCGAVAACRLANVKFPNCDLATRPKPAVPAWQRRIERRIDGARVLIGKLHCFREGNTRPRVMRFVRRAFSGTEISPQEYMSRVTERIDFLKQKVYAWASRIRRYKRRVDRYSQNRMFQSDERWVYRAWERPQQNMTDVCRPDDAATSSFWRSIWSVPVCHSEADWMRDVERVCEPISTMEPILITPLDIARAVRPLPNWKSPGPDGLHNFWLKWFSSSHTCLASQFQSSLESGSLPQFLTTGITHLLHKSGSPAEPKNYRPITCLSTVYKLLTSILRTKINTHVDSNSIMSASQNGCRNGSRGTKELLLIDMAISQQVRRARKDLSICWIDYKKAYDSVPHSWLKRVLELYKIDATLRTFLESCMGQWRTVLRYPGCRQIQGNDEPVWIKRGIFQGDSLSPLWFCLALNPVSTLLENSGLGYRLRKDGQVISHLLYMDDLKLFAPNKLQLMELLKVTETFSSAIGMEFGVDKCAVMYVKRGKIMGSEGLQLSDSIHLRSLSSSESYKYLGMSEALGINVTDMKQSLKERFFGRLKKVLNSLLSGGNKVRAFNGWVMPVLMYSFGILKWTQTELDALDRRVRTLLTENRMHHPRSSVMRLYIPRKCGGRGFLNAKTLHNHEVCSLREYFLKVDVGMHRDVVAVDKGLTPLSMAKENWRKPVVLTTDDRKKEWQGKELHGRFYRALHGPDVDFLASVSWLRFGDLFGETEGFVCAIMDEVMLTNNYRKYIMKDGTVDVCRACHCPGESIRHIISGCSRLANGEYLHRHNQVARIIHQQLALKFKLVESEVPYYKYVPDPVLVKDHVTLYWDQSIITDRTIVANKPDIVVIDRSARRVMIIDVTIPHDENLVKAEKEKQMNYLDLAHEVRDMWNMNSVIIVPIVVTANGLIAKSLDEHLSKLSLGGWIKGLIQKAVLLDTARIVRRFLSLQP

SEQ ID NO: 29244 - protein, 1200 aa, Xestia c-nigrum
MITRAASRRRARLPSPDSSLSSASPPPDPGSPVSTVAAVASSSSDEYFSPPTSPTPVRRAGRGRPPRSLGLRGQQAPSRVPATGGCVQRMRWTQSMNENAMRAYYGSTEGGTNLTAYRVRMLSLFQDLEPAVNVSAQRLSDQVRVIQRNHMLDDAALDRLRSEVLSNRIILTPAQTAVQASAIDATPPRSNPAVVEEDGRVATVSSQCNDRLRSALEDALREYRSTPTELRPRLPRLPMHKKNRALVCALDSQLKNVFESSEDLVDTHSILFCGAVAACRLANVKFPNCDLATRPKPAVPVWQRRIERRIERARVLIGKLCCFREGNTRPRVMRFVRRAFSGTEISPQEYMSRVTERIDFLKQKVYAWASRIRRYKRRVDRYSQNRMFQCDERWVYRAWERPDQNVTDVCHPGDAATSSFWRSIWSVPVCHSEADWMRDVERVCEPIPEMAPVVITSLDIARAVRPLPNWKSPGPDGLHNFWLKWLSSSHTCLASQFQSSLESGSLPQFLTTGVTHLLHKSGSPMEPQNYRPITCLSTVYKLLTSILRTKINTHIDNNSIMSASQNGCRNGSRGTKELLLIDMAISQQVRRSRKDLSTCWIDYKKAYDSVPHSWLMRVLELYKIDATLCTFLKSCMGQWRTVLRYPGCRQIQGNDESVWIKRGIFQGDSLSPLWFCLALNPLSTLLENSGLGYQLRKDGQVISHLLYMDDLKLFAPNKLRLMELLKVTETFSNAIRMEFGVDKCAVMYVKRGEIMESEGLQLSDSIHLRSLSSSESYKYLGMSEALGINVTDMKQSLRERFFGRLKKVLNSLLSGGNKVRAFNGWVMPVLMYSFGILKWTQTELDALDRRVRTLLTENRMHHPRSSVMRLYIPRKCGGRGFLNAKTLHNREVCSLREYFLKAEVGMHRDVVAVDKGLTPLSMAKENWRKPVILTTDDRKKEWQGKVLHGRFYRALHGPDVDFLASVSWLRFGDLFGETEGFVCAIMDEVMLTNNYRKYIMKDGTVDVCRACHCPGESIRHIISGCSRLANGEYLHRHNQVARIIHQQLALKFKLVESEVPYYKYVPDPVLVKDHITLYWDQSIITDRTIVANKPDIVVIDRSARRVMIIDVTIPHDENLVKAEKEKQIKYLDLAHEVRDMWNMNSVIIVPIVVTANGLIAKSLDEHLSRLSLGGWIKGLIQKAVLLDTARIVRRFLSLQP

SEQ ID NO: 29245 - protein, 1100 aa, Xestia c-nigrum
MTDVKTCQTIQSKYENYRVRMLSLFQDLEPAVNVSAQRLSDQVRVIQRNHMLDDAALDRLRSEVLSNRIILTPAQTAVQASAIDATPPRSNPAVVEEDGRVATVSSQCNDRLRSALEDALREYRSTPTELRPRLPRLPMHKKNRALVCALDSQLKNVFESSEDLVDTHSILFCGAVAACRLANVKFPNCDLATRPKPAVPVWQRRIERRIDGARVLIGKLYCFREGNTRPRVMRFVRRAFSGTEISPQEYMSRVTERIDFLKQKVYAWASRIRRYKRRVDRYSQNRMFQCDERWVYRAWERPDQNVTDVCHPGDAATSSFWRSIWSVPVCHSEADWMRDVERVCEPIPEMAPVVITSLDIARAVRPLPNWKSPGPDGLHNFWLKWLSSSHTCLASQFQSSLESGSLPQFLTTGVTHLLHKSGSPTEPQNYRPITCLSTVYKLLTSILRTKINTHIDNNSIMSASQNGCRNGSRGTKELLLIDMAISQQVRRSRKDLSTCWIDYKKAYDSVPHSWLMRVLELYKIDATLCTFLKSCMGQWRTVLRYPGCRQIQGNDESVWIKRGIFQGDSLSPLWFCLALNPLSTLLENSGLGYQLRKDGQVISHLLYMDDLKLFAPNRLRLMELLKVTETFSNAIRMEFGVDKCAVMYVKRGEIMESEGLQLSDSIHLRSLSSSESYKYLGMSEALGINVTDMKQSLRERFFGRLKKVLNSLLSGGNKVRAFNGWVMPVLMYSFGILKWTQTELDALDRRVRTLLTENRMHHPRSSVMRLYIPRKCGGRGFLNAKTLHNREVCSLREYFLKAEVGMHRDVVAVDKGLTPLSMAKENWRKPVILTTDDRKKEWQGKVLHGRFYRALHGPDVDFLASVSWLRFGDLFGETEGFVCAIMDEVMLTNNYRKCIMKDGTVDVCRACHCPGESIRHIISGCSRLANGEYLHRHNQVARIIHQQLALKFKLVESEVPYYKYVPDPVLVKDHITLYWDQSIITDRTIVANKPDIVVIDRSARRVMIIDVTIPHDENLVKAEKEKQIKYLDLAHEVRDMWNMNSVIIVPIVVTANGLIAKSLDEHLSKLSLGGWIKGLIQKAVLLDTARIVRRFLSLQP

SEQ ID NO: 29246 - protein, 1209 aa, Xestia c-nigrum
MLTRHRAKLLRDAHPPSPGSSLSSASQPPGRATPVSTVSPVAAVASSSSDEFFSPPSTPPPPPSRGRRRGRGRPPAGLGPRGQQASSRVPAAGGNVSRMRWTQSMNENVMRAYYGATEGGSNLIAYRGQMLSLFQVLEPAVNVDAQRLSDQVRVIQRNHMLDDTVLDRLRSESRSNLVTPASPMIAVQLQTIPSTPLRSDYDGEEDGDEVISVSTQCNAQLRSALEGAFREYRSTPPELRPRLPRLPMHKKNKALVCALDSQLSNCFDSSKDLADTHSILYCGAVAACRVAHVKFPNNDRTTRPKLAVPAWQCRIERRIGEARVLIGKLICFREGNTRPRVMRFVRRAFSGTDVSFRDYLARITERIDFLKQKICAWASRIRRYKRRVERYTQNRSFQSDERWVYRAWERPDQGVTDTRLPDDDAMCSFWRSIWSVPVSHTEGDWIRKVEQVCDQIQEMGAIIISPQDVACAVRPLPNWKSPGPDGLHNFWIKWFQRSHACLASQFQSALESGSLPQFLTTGITHLLHKSGSTAEPKNYRPITCLPTVYKVLTSILRAKINKHIESNSIMSTSQNGCRNGSRGTKELLLIDMAISKQVRRSRKNLSTCWIDYKKAYDSVPHTWLMRVLELYKINATLRAFLESCMGQWKTVLRYPGCRQIQGNDEPVRIKRGIFQGDSLSPLWFCLALNPLSTLLENSGLGYRLRKDGQVISHLLYMDDLKLFAPNKLQLLELLKVTETFSNAIRMEFGVDKCAVMYVKRGEIMESEGLQLSDSIHLRSLSSSESYKYLGMSEALGINVTDMKQSLRERFFGRLKKVLNSLLSGGNKVRAFNGWVMPVLMYSFGILKWTQTELDALDRRVRTLLTANRMHHPRSSMMRLYIPRKCGGRGFLNAKNLHNREVCSLREYFLEADVGMHRDVVSVDKGLTPLSLANENWRKPKVLDTNDRREEWQGKELHGRFYRALHGPDVDFLASVSWLRFGDLFGETEGFVCAIMDEVMMTNNYRKYIVKDGTVDICRACHRPGESIRHIISGCSSLANGEYLHRHNLVARIIHQQLALKYDLVESEVPYYKYAPDPVLVNGNITLYWDRPITTDRTVVANRPDIVVIDRLERRTMIVDITVPHDENLVKAEQDKKNKYLDLAREVVDMWDVSTAIIVPIVVSANGLIAKSLDQHLRRLSLGSWIKGLIQKAVLLDTARIVRRFLSQEP

SEQ ID NO: 29247 - protein, 983 aa, Omphaloscelis lunosa
MRFASIGTLRPNLDHDYHAYPCTKKNRALVCALDSQLTNFFESSEDLIDTHSILYCAAVAACRLANVKFPNYDGATRPKPVVPAWQCRIERRIDGARVLIGKLYCFREGNTRPRVMRFVRRAFLGTGISPQEYMSRVTERIDFLKQKVCAWASRIRRYKRRVDRYTQNRMFQSDERWVYRAWERPEQNVTDVCRPDDAATSAFWRSIWSVPVCHTEAGWMQDVERVCETIPEMDAVFITPLDVARAVRPLPNWKSPGPDGLHNFWLKWLSSSHTRLASQFQSSLESGLLPQFLTTGVTHLLHKSGNPAEPKNYRPITCLPTVYKLLTSILRTKINTHIDSNSIMSASQNGCRNGSRGTKELLLIDMAISQQVRRSRKDLSTCWIDYKKAYDSVPHTWLMRVLELYKVHTTLRTFLMSCMGQWRTVLRYPGCRQTQGNDEPVWIKRGIFQGDSLSPLWFCLALNPLSTLLEGSGLGYRLRRGGQVISHLLYMDDLKLFAPNKLRLMELLKVTETFSGAIRMEFGVDKCAVMHVKRGEIMESEGTQLSDSIHLRSLSSAENYRYLGMSESLGINVADMKQSLKERFFGRLKKVLISFLSGGNKVRAFNGWVMPVLMYSFGILKWTQTELDALDRRVRTLLTANRMHHPRSSVMRLYIPRKCGGRGFLNAKTLHNREVCSLREYFFKADVGMHRDVVAVDNGLTPLSMAKENWRKPVVLTTDDRKEVWQSKALHGRFYRALHEPGVDFLASVSWLRFGDLFGETEGFICAIMDEVILTNNYRRHIMKDGTVDVCRACHRPGESIRHIISGCSRLANGEYLHRHNQVARIIHQQLALKYKLVDSEVPYYKYVPDPVLENDHVTLYWDRSIITDRTIIANKPDIVVIDRLARRAMIVDVTIPHDENLVKAEKEKQIKYLDLAHEVVDMWNVSSAIIVPIVVTANGLMAESLDQHLSRLSLGGWIKRLIQKAVLLDTARIVRRFLSLQP

SEQ ID NO: 29248 - protein, 1181 aa, Omphaloscelis lunosa
MPPPVPSPIVNAVSTPAAVVASSSSDEYFSPPTSPTPVRRQGRGRPPKSLGLRGQPAPSRVPAAGGCVQRMRWTQSMNENVMRAYYGSTEGGTNLTAYRVRMLSLFQELEPTVNVSAQRLSDQVRVIQRNHRLDDTALDRLRSEVLSNHIVSAREQTAAEASNIDPTPPRFNHGVEEEDDRVATVSSQCNNRLRSALEDAFREYRYTPTELRLRLPRLPMHKKNRALMCALDSQLTNFFESSEDLIDTHSILYCAAVAACRLANVKFPNCDGATRPKPAVPAWQCRIERRIDGARVLIGKLYCFREGNTRPRVMRFVRRAFSGTEISPQDYMSRVTERIDFLKQKVCAWASRIRRYKRRVDRYTQNRMFQSDERWVYRACERPEQNVTDVCRPDDAATSAFWRSIWSVPVCHTEAGWMQDVERVCETIPEMDAVFITPLDVARAVRPLPNWKSPGPDGLHNFWLKWLSSSHTCLASQFQSSLESGSLPQFLTTGVTHLLHKSGNPAEPKNYRPITCLSTVYKLLTSILRTKINTHIDSNSIMSVSQNGCRNGSRGTKELLLIDMAISQQVRRSRKDLSTCWIDYKKAYDSVPHTWLMRVLELYKVDTTLRNFLMSCMGQWRTVLRYPGCRRTQGNDEPVWIKRGIFQGDSLSPLWFCLALNPLSTLLEDSGLGYRLRRGGQVISHLLYMDDLKLFAPNKLRLMELLKVTETFSGAIRMEFGVDKCAVMHVKRGEIMESEGIQLSDSIHLRPLSSAENYRYLGMLESLGINVADMKQSLKERFFGHLKKVLISFLSGGNKVRAFNGWVMPVLMYSFGILKWTQTELDALDRRVRTLLTANRMHHPRSSVMRLYIPRKCRGRGFLNAKTLHNREVCSLREYFFKADVGMHRDVVAVDNGLTPLSMAKENWRKPVVLTTDDRKEIWQSKALHGRFYRALHEPSVDFLASVSWLRFGDLFGETEGFICAIMDEVILTNNYRRHIMKDGTVDVCRACHRPGESIRHIISGCSRLANGEYLHRHNQVARIIHQQLALKYKLVDSEVPYYKYVPDPVLENDHATLYWDRSIITDRTIVANKPDIVVIDRLARHAMIVDVTIPHDENLVKAEKEKQIKYLDLAHEVVGMWNVSSAIIVPIVVTANGLMAKSLDHHLSRLSLGGWIKRLIQKAVLLDTARIVRRFLSLQP

SEQ ID NO: 29249 - protein, 1202 aa, Sesamia nonagrioides
MLTRAAKRRARPPPPDSSLSTASPPPVSSATVNAVRTPAVVVASSSSDEYFSPPTSPTPVRRQGRGRPPKSLGLRGHPAPSRVPAAGGCVQRMRWTQTMNENVMRAYYGATEGGTNLTAYRERMLSLFQALEPTVNVSAQRLSDQVRVIQRNHRLDDIALDRLRSEVLSNQIAPTLTQTAAQASIIDAVPPRSNRVEEEDDRVETVSSQYNDRLRSALEDAFRDYRSTPTNLRPRLPRLPMHKKNRALVCALDSQLKNFFESSEDLIDTHSILYCAAVAACRLAKVKFPNCEEATRPKLAVPAWQRRIERRIDGTRVLIGKLYCFREGNTRPRVMRFVRQAFSGTGISPREYINNVTERIDFLKQKVCAWASRIRRYKKRVDRYTQNRMFQSDERWVYRAWERSEQNEADECRPDDATTSAFWRGIWSVSVCHTEGDWTQDVEQVCEAIPEMDNILITPLDVATAVRSLPNWKSPGPDGLHNFWLKWLSSSHTCLASQFQSSLESGSLPQFLTTGITHLLHKSGSTAEPKNYRPITCLPTVYKVLTSILKAKINNHLDSNSIMSVSQNGCRSGSRGTKELLLIDMAISQQVRRSRKDLSTCWIDYKKAYDSVPHTWLMRVLELYKINATLRTFLRSCMGQWKTVLRYPGSRQIQGNDEPVWIKRGIFQGDSLSPLWFCLALNPLSTLLEDSGLGYRLKRGGQVISHLLYMDDLKLFAPNKLHLMKLLNVTETFSSGIKMEFGVDKCAVMHVKRGQIMESEGITLPDSIHLRSLSSIESYKYLGMSEALGINDADMKQSLKERFFGRLKKVLNSLLSGGNKVRAFNGWVMPVLMYSFGILKWTQTELDALDRRVRTLLTANRMHHPRSSVMRLYIPRKCGGRGFLNAKTLHNREVFSLREYFLKTVVGMHHDVVTVDKGLTPLSMAKENWHKPIILTTDDRKIVWQSKELHGRFYRALHGPDVDFLASVSWLRFGDLFGETEGFVCAIMDEVILTNNYRRYIMKDGTIDVCRACHHPGESIRHIISGCSRLANSEYLHRHNQVARIIHQQLALKYKLVDSEVPYYKYVPDPVLENDHVTLYWDRSIITDRTIVANKPDIVVIDRLARLAMIVDVTIPHDGNLVKAEKEKQMKYLDLAHEVVDMWNVNSAVIVPIVVSANGLIAKSLDQHLLRLSLGSWIKGLIQKAVLLDTARIVRRFLSLEP

SEQ ID NO: 29250 - protein, 1202 aa, Sesamia nonagrioides
MLTRQAARRARSAPPDSSPSSASPPPVPSANVSAVTTPVAVVASSSSDEYFSPPTSPRPVRRQGRGRPPKSLGLRGHPAPSRVLAAGGCVQRMRWTQTMNENVMRAYYRATEGGTHLTAYRERMLSLFQALEPTVNVSAQRLSDQVRVIQRNHRLDDIALDRLRSEVLSNQITPTLTQTAAQASIIDAAPPRSNRVEEEDDRVERVSSQYNDRLRNALEDAFRDYRSTPTDLRPRLPRLPMHKKNRALVCALDSLLKNFFESSEDLIDTHSILYCAAVAACRLAKVKFPNCEEAARPKPAVPAWQRRIERRIDGTRVLIGKLYCFRDGNTRPRVMRFVRQAFSGTGISPREYINHLTERIDFLKQKVCAWASRIRRYKRRVDRYTQNRMFQSDERWVYRAWERPEQNEADVCRPDDATTSAFWRGIWSVSVCHTEGNWIQNVEQVCETIPEMDTILITPSDVAAAVRSLPNWKSPGPDGLHNFWLKWLSSSHTCLASQFQSSLESGSLPLFLTTGITHLLHKSGSTAEPKNYRPITYLPTVYKVLTSILKAKINKHLISNSIMSVSQNGCKSGSRGTKELLLIDMAISQQVRRSRKDLSTCWIDYKKAYDSVPHTWLMRVLELYKVNATLRTFLRSCMGQWKTVLRYPGSRRIQGNDVPVWIKRGIFQGDSLSPLWFCLALNPLSTLLEDSGLGYRLKRGGQVISHLLYMDDLKLFAPNKLHLMKLLNVTETFSSGIKMEFGVDKCAVMHVKRGQIMESEGITLPDSIHLRSLSSFESYKYLGMSEALGINDADMKHSLKERFFGRLKKVLKSLLSGGNKVRAFNGWVMPVLMYSFGILKWTQTELDALDRRVRTLLTANRMHHPRSSVMRLYIPRKCGGRGFLNAKTLHNREVCSLREHFFKTVVGMHHDVVTVDKGLTPLSMAKENWHKPIILTTDDRKLIWQSKELHGRFYRALHEPDVDFLASVSWLRFSDLFGETEGFVCAIMDEVILTNNYRRYIMKDGTIDVCRACHHPGESIRHIISGCSRLANSEYLHRHNQVARIIHQQLALKYKLMDSEVPYYKYVPDPVLENDHVTLYWDRSIITDRTIVANKPDIVVIDRLARLAMIVDVTIPHDGNLVKAEKEKQIKYLDLAHEIVDMWNVNSAVIVPIVVSANGLIAKSLDQHLLRLSLGSWIKGLIQKAVLLDTARIVKRFLSLEP

SEQ ID NO: 29251 - protein, 1204 aa, Apamea monoglypha
MLKMLTRSATRARLLPPDSSLSPAPPPPESSPIESAVTPAVAVASSSSAEYFSPPTSPTPVRRQGRGRPPRSLGLRGHPAPSRVPAAGGCVQRMRWTQSMNENVMRAYYGSTEGGINLTAYRDRLLSLFQELEPTVNVSAQRLSDQVRVIQRNHRLDDIALDRLRSEVLSNQIVSTLAQTAAQASTIDAIPPRSNHVEEEDDDRVDTVSSQCNVRLRSALEDAFREYRSTPTELRPRIPRLPMHKKNRALVCALDSQLKNFFESSEDLVDTHSILYCAAVAACRLANVKFPNCDGATRPKPAVPAWQYRIERRIDGARVLIGKLYCFREGNTRPRVMRFVRQAFSGTGISPREYISNVTERIDFLKQKVCAWASRIRRYKRRVDRYTQNRMFQSDERWVYRAWERPEQNVTDVCRPDDANTNAFWRSIWSVPVYHADGGWMQDIERVCETIPEMDPVLITPLDVARAVRPLPNWKSPGPDGLHNFWLKWLISSHSRLASQFQSSLESGSLPQFLTTGVTHLLHKSGSPAEPKNYRPITCLSTVYKLLTSILRAKINTHIDNNSIMSASQNGCRNGSRGTKELLLIDMAISQQVRRSRKDLSTCWIDYKKAYDSVPHAWLMRVLELYKIDATLRTFLESCMGQWRTVLRYPGCRQIQGNDEPVWIKRGIFQGDSLSPLWFCLALNPLSTLLEDSGLGYRLKRGGQVISHLLYMDDLKLFAPNNLRLLELLKVTETFSSAIRMEFGVDKCAVMHVKRGEIMESEGIQLSDSIHLRSLSSSESYKYLGMSEALGINVADMKQTLRERFFGRLKKVLVSLLSGGNKVRAFNSWVMPVLMYSFGILKWTQTELDALDRRVRTLLTANRMHHPRSSVMRLYIPRKCGGRGFLNAKTLHNREVCNLREYFIKAEVGMHRDVVAVDKGLTPLSMAKENWRKPVILTTDDRKEVWQSKELHGRFYRALHEPGVDFLASVSWLRFGDLFGETEGFVCAIMDEVVLTNNYRRYIMKDGTVDVCRACHRPGESIRHIISGCSRLANGEYLHRHNQVARIIHQQLALKYKLVDSEVPYYKYVPDPVLENDHVTLYWDRSIITDRTIVANKPDIVVIDRLARRTMIVDVTIPHDGNLVKAEKEKQIKYLDLAHEVVDMWNVSSAIIVPIVVSANGLMAESLDQHLSRLSLSGWIKGLIQKAVLLDTARIVRRFLSLEP

SEQ ID NO: 29252 - protein, 1199 aa, Mamestra configurata
MLTRAASRRARPPSPDPSLSSASPPPDSGSPMSPAVAVASSSSDEYFSPPTSPTPVRWQGRGRPPRGLGPRGQPAPSRVPATGGCVQRMRWTQSMNENVMRAYYGSTEGGTNLTAYRVRMLSLFQDLEPTVNVSAQRLSDQVRVIQRNHRLDDAALDRLRSEVLNNLIISTPTQTAVQAPVNGRITPRPNNVSDEVDDRVVTVSSQCNDRLRSALEDALREYRSTPTELRPRLPRLPMHKKNRALVCALDSLLQNIFESSESLVDTHSILYCGAVAACRIANVKFPGCDEAIRPKPAAPAWQRRIERRIDETRALIGKLYCFREGNTRPRVMRFVRRAFSGTEISPRDFTSRVTERIDFLKQKVCAWASRIRRYKRRVDRYSQNRMFQSDERWVYRAWERPEQSVTDVCRPDDVATSIFWRSIWSVPICHAEGGWMRDVERVCEAIPQMEKITITTLDVAKAVRPLPNWKSPGPDGLHNFWLKWYSSSHALLASQFQSSLDSGSLPQFLTTGVTHLLHKTGSPTEPKNYRPITCLSTVYKLLTSILRAKINEHIESNSIMSASQNGCRKGSRGTKELLLIDMAISQQVRRSRKDLSTCWIDYKKAYDSVPHTWLMKVLELYKIDATLRTFLESCMRQWKTVLRYPGCRPIQGSDEPVWIKRGIFQGDSLSPLWFCLALNPLSTLLEDSGLGYRLRRGGQAISHLLYMDDLKLFAPNNLRLMELLKVTETFSSAIRMEFGVDKCAVMHVKKGEIMESEGIQLSDSIQVRSLSSTETYKYLGMSEALGINGTDMKQSLRERFFGRLKKVLNSLLSGGNKVRAFNGWVMPVLMYTFGILKWTQTELDALDRRVRTLLTANRMHHPRSSVMRLYIPRKCGGRGFLNAKTLHNREMCSLREYFLKADVGMHRDVVAVDKGLTPLSMAKENWRTPVILTTDDRKEVWKGKELHGRFYRALHGSDVDFSASVAWLRFGDLFGETEGFVCAIMDEVILTNNYRRHIMKDGTVDMCRACHRPGESIRHIISGCSRLANGEYLHRHNQVARIIHQQLALKYKLVDSEVPYYKYVPDPVLENDHVTLYWDRSIITDRTIVANKPDIVVIDRLARRTMIIDVTIPHDENLVKAEKEKQIKYLDLAHEVVDMWNVESAVIVPIVVTANGLMAKSFDDHLSKLALRSWVKGLIQKAVLLDTARIVRRFLSLEP

SEQ ID NO: 29253 - protein, 977 aa, Mythimna ferrago
MSTPTELRPRLPRLPMHKKNRALVCALDSLLKNIFESSENLVDTHSILYCGAVAACRLAKIKFPNIDGTIRPKTAVPAWQCRIERRIDEARVLIGKLHCFREGNTRPRVMRFVRRAFLGTGISPQGYMSRVTERIDFLKQKVCAWASRIRRYKRRVDRYSQNRMFQSDERWVYRAWERPEHSVTDGCRPDDLATITFWRNIWSVPVSHTEGGWMRDVERVCEAIPEMEKVTITPEDVARAVRPLPNWKSPGPDGLQNFWLKWYSSSHAPLASQFQSILESGSLPEYLTTGVTHLLHKTGNPVDPKNYRPITCLSTVYKLLTSILRAKINIHIENNQIISPSQNGCRNGSRGTKELLLIDMAISQQTRRSRKDLSTCWIDYKKAYDSVPHTWLMRVLELYKIDITLRTFLESCMRQWKTVLRYPGCRPIQGNDEPIWIKRGIFQGDSLSPLWFCLALNPLSTLLEDSGLGYRLRRGGQVISHFLYMDDLKLFAPSNLQLMELLKVTETFSSAIRMEFGVDKCAGMHVKRGEIMESEGIQLPDSIHLRSLSSTETYRYLGMSEALGINNADMKQSLKERFFGRLKKVLNSLLSGGNKMRAFNGWVMPVLMYSFGILKWTQTELDALDRRVRTLLTANRMHHPRSSVMRLYIPRKCGGRGFLNAKTLHNREVCSLREYFLKTDVGMHRDVVAVDKGLTPLSMAKEDWHKPVIMTTDNRKEIWKGKELHGRFFRALHEPDVDFLASVAWLRFSDLFGETEGFVCAIMDEVILTNNYRRYIMKDGTVDVCRACHRPGESIRHIISGCSRLANGEYLHRHNQVARIIHQQLALKYNLVDLEVPYYKYVPDPVLENDHVTLYWDRSIITDRTIVANKPDIVVIDRLARRAMIVDITIPHDENLVKAEKEKQMKYLDLAHEVVDMWNVDSAIIVPIVVTANGLIAKSFDDHLSKLSLRGWIKGQIQKAVLLDTARIVRKFLSLEP

SEQ ID NO: 29254 - protein, 1200 aa, Mythimna ferrago
MLTRTAARRARHPPPGSSLSSASPPPDPGSPVSPAAAVASSSSDEYFSPPTSPTPVRRPGRGRPPKSMGPRGQPAPSRVPAAGGCVQRMRWTQSMNENVMRAYYGSTEGGTNLTAYRERMLSLFQVLEPTVNVSAQRLSDQVRVIQRNHRLDDAALDRLRSEILSNQIVSTSTQTQTAATPTTNAISPRSDHNNDDADDRVVTVSSQCNERLRSALEDALCEYMSTPTELRPRLPRLPMHKKNRALVCALDSLLKNIFESSENLVDTHSILYCGAVAACRLAKIKFPNIDGTIRPKTAVPAWQCRIERRIDEARVLIGKLHCFREGNTRPRVMRFVRRAFLGTGISPQGYMSRVTERIDFLKQKVCAWASRIRWYKRRVDRYSQNRMFQSDERWVYRAWERPEHSVIDECRPDDLATITFWRNIWSVPVSHTEGDWMRDVERVCEAIPEMEKVTITPEDVAKAVRPLPNWKSPGPDGLQNFWLKWYSSSHAPLASQFQSILESGSLPEYLTTGVTHLLHKTGNPVDPKNYRPITCLSTVYKLLTSILRAKINIHIENNQIISPSQNGCRNGSRGTKELLLIDMAISQQTRRSRKDLSTCWIDYKKAYDSVPHTWLMRVLELYKIDITLRTFLESCMRQWKTVLRYPGCRPIQGNDEPIWIKRGIFQGDSLSPLWFCLALNPLSTLLEDSGLGYRLRRGGQVISHLLYMDDLKLFAPNKLRLMELLKVTENFSSAIRMEFGVDKCAVMHVKRGEIMESEGVQLSDSIHLRSLSSTESYKYLGMSEALGINVTDMKQSLKERFVGRLKKVLNSLLSGGNKVRAFNGWVMPVLMYSFGILKWTQTELDALDRRVRTLLTANRMHHPRSSVMRLYIPRKCGGRGFLNAKTLHNREVCSLREYFLKTDVGMHRDVVAVDKGLTPLSMAKENWRKPVVLTTDDRKEVWKGKELHGRFFRALHEPDVDFSASVAWLRFSNLFGETEGFVCAIMDEVILTNNYRRHIMKDGTIDVCRACHRPGESIRHIISGCSRLANGEYLHRHNQVARILHQQLALKYNLVDSEVPYYRYVPDPVLENDHVTLYWDRSIITDRTIVANKPDIVVIDRLARRAMIVDVTIPHDENLVKAEKEKQIKYLDLAHEVVDMWNVDSAIIVPIVVTANGLIAKSFDDHLSKLSLHGWIKGLIQKAVLLDTARIVRRFLSLEP

SEQ ID NO: 29255 - protein, 1200 aa, Mythimna ferrago
MLTRTAARRARHPPPGSSLSSASPPPDPGSPVSPAAAVASSSSDEYFSPPTSPTPVRRPGRGRPPKSMGPRGQPAPSRVPAAGGCVQRMRWTQSMNENVMRAYYGSTEGGTNLTAYRERILSLFQVLEPTVNVSAQRLSDQVRVIQRNHRLDDAALDRLRSEILSNQIVSTSTQTQTAATPTTNAISPRSDHNNDDADDRVVTVSSQCNERLRSALEDALCEYMSTPTELRPRLPRLPMHKKNRALVCALDSLLKNIFESSENLVDTHSILYCGAVAACRLAKIKFPNIDGTIRPKTAVPAWQCRIERRIDEARVLIGKLHCFREGNTRPRVMRFVRRAFLGTGISPQGYMSRVTERIDFLKQKVCAWASRIRRYKRRVDRYSQNRMFQSDERWVYRAWERPEHSVIDECRPDDLATITFWRNIWSVPVSHTEGGWMRDVERVCEAIPEMEKVTITPEDVAKAVRPLPNWKSPGPDGLQNFWLKWYSSSHAPLASQFQSILESGSLPEYLTTGVTHLLHKTGNPVDPKNYRPITCLSTVYKLLTSILRAKINIHIENNQIISPSQNGCRNGSRGTKELLLIDMAISQQTRRSRKDLSTCWIDYKKAYDSVPHTWLMRVLELYKIDITLRTFLESCMRQWKTVLRYPGCRPIQGNDEPIWIKRGIFQGDSLSPLWFCLALNPLSTLLEDSGLGYRLRRGGQVISHLLYMDDLKLFAPSNLQLMELLKVTETFSSAIRMEFGVDKCAGMHVKRGEIMESEGIQLSDSIHLRSLSSTETYKYLGMSEALGINTDDVKQSLKERFFGRLNKLLNSLLSGGNKVRAFNGWVMPVLMYFFGILKWTQTELDALDRRVRTLLTANRMHHPRSSVMRLHIPRKCGGRGFLNAKTLHNREVCSLREYFLKTDVGMHRDVVAVDKGLSPLSMAKEDWHKPVIMTTDNRKEIWKGKELHGRFFRALHEPDVDFLASVAWLRFSDLFGETEGFVCAIMDEVILTNNYRRYIMKDGTVDVCRACHRPGESIRHIISGCSRLANGEYLHRHNQVARIIHQQLALKYNLVDLEVPYYKYVPDPVLENDHVTLYWDRSIITDRTIVANKPDIVVKDRLARRAMIVDITIPHDENLVKAEKEKQMKYLDLAHEVVDMWNVDSAIIVPIVVTANGLIAKSFDDHLSKLSLRGWIKGQIQKAVLLDTARIVRKFLSLEP

SEQ ID NO: 29256 - protein, 1206 aa, Ochropleura plecta
MLTRRRAQEQQTLPPSPGSSLSSASQPPGRATRVSAVSPVAAVASSSSDEFFSPPSSPPPPTRQRRGRGRPPAGLGSRGQQVPIRVPAAGGNVSRMRWTSFINENVMRAYYGSTEGGTNLTAYRVRMLSLFQDLEPTINVSAQRLSDQVRVIQRNHLLDDAALDRLRSEVLSNRVILTTPQTAVQASAIDVTQPRSNPAVVEEDDRVATVSSQCNERLRSALEDALRDYRSTPTELRPRLPRLPMHKKNRALVCALDSQLKNLFESSENLVDTHSILYCGAVAVCRVANVKFQNSDVATRPKPSVPVWQCRIERRIDEARVLIGKLYCFREGNTRPRVMRFVRRAFSGTGISPQEYLSCTTERIDFLKQKVYAWANRIRRYKRRVDRYSQNRMFRSDERWVYRAWERPEQSVTDVCRPDDVATSSFWHSIWSVPVCHTEADWMRDVERVCETIPEMEPILITSIDIASAVRPLPNWKSPGPDGLHNFWLKWLSSSHTRLASQFQSCLESGSLPQFLTTGITHLLYKSGSPAEPKNYRPITCLSTVYKLLTSILRAKINSHIDKNSIMSASQNGCRNGSRGTKELLLIDMAISQQVRRSRKDLSTCWIDYKKAYDSVPHTWLKRVLELYKIDATLRAFLESCMGQWRTVLRYPGCRQIQGNDEPVWIKRGIFQGDSLSPLWFCLALNPLSTLLEDSGVGYRLRRGGKVISHLLYMDDLKLFAPNKLRLMELLKVTETFSNAIRMEFGVDKCAVMYVKRGEIMESEGIQLSDSIHLRSLSSSESYKYLGMSEALGINVADMKQLLRERFFGRLKKVLKSLLSGGNKVRAFNSWVMPVLMYSFGILKWTQTELDALDRRVRTLLTGNRMHHPRSSVMRLYIPRKCGGRGFLNAKTLHNREVCSLREYFLKTDVGMHRDVVAVDKGLTPLSMAKENWRKPVVLTTNDRKVVWQGKELHGRFYKALHGPDVDFLASVSWLRFGDLFGETEGFVCAIMDEVMLTNNYRKYIMKDGTVDVCRACHRPGESIRHIISGCSRLANSEYLHRHNQVARVIHQQLALKYNLVESEVPYYKYVPDPVLEKDHVTLYWDRSIITDRTIVANKPDIVVIDRSARRVMIIDVTIPHDENLVKAEKEKQLKYLDLAHEVVDMWNVNSAIIVPIVVTANGLIAKSLDEHLSKLSLGGWIKGLIQKAVLLDTARIVRRFLSLEP

SEQ ID NO: 29257 - protein, 1199 aa, Hecatera dysodea
MITRAASRRARPPSPDPSLSSASPPPDNGSPVPPAAAVASSSSDEYFSPPTSPTPVRRQGRGRPPRSLGSRGQPAPSRVPAAGGCVQRMRWTQSINENVMRAYYGSTEGGTNLTAYRARMLSLFQDLEPTVDVSAQRLSDQVRVIQRNHRLDDAALDRLRSEVLDNPIISTSTQTVVPVPSSGAITSRTINVCDEVDDRIVTVSSQCNDRLRSALEDALREYRSTPTELRPRLPRLPMHKRNRALVCALDSLLQNIFESSENLIDTHSILYCGAVAACRVANVKFSNSDEATRPKTAAPAWQCRIERRIDEARALIGKLYCFREGNTRPRVMRFVRRAFSGTEISPQEYMSRVTERIDFLKQKVCAWANRIRRYKRRVDRYSQNRMFQSDERWVYRAWERPEQSVTDVCRPDDIVTSTFWRSIWSVPVRHTEGDWMRGVERVCEAIPQMEKISITPTDVATAVRPLPNWKSPGPDGLHNFWLKWYSSAHAVLASQFQSSLESGSLPQFLTTGVTHLLHKTGSPAEPKNYRPITCLSTVYKLLTSILRVKINEHIEANSIMSSSQNGCRKGSRGTKELLLIDMAISQQVRRTRKDLSTCWIDYKKAYDSVPHTWLMKVLELYKIDATLRTFLESCMRQWKTVLCYPGCRPIQGNDEPVWIKRGIFQGDSLSPLWFCLALNPLSTLLEDSGLGYRLRRGGQAISHLLYMDDLKLFAHNKLRLMELLKITETFSSAIRMEFGVDKCAVMHVKKGEIMESEGVQLSDSIQVRSLSSTETYKYLGMSEALGINVADMKQSLKERFFGRLKKVLNSLLSGGNKVRAFNGWVMPVLMYSFGILKWTQTELDALDRRVRTLLTANRMHHPRSSVMRLYIPRKCGGRGFLNAKTLHNREMCSLREYFLKVDVGMHRDVVAVDKGLTPLSMANENWRKPVIHTTDDRKEVWKGKELHGRFYRALYGSDVDFSASVAWLRFGDLFGETEGFVCAIMDEVILTNNYRRHIMKDGTVDVCRACHRPGESIRHIISGCSRLANGEYLHRHNQVARIIHQQLALKYKLVDSEVPYYKYVPDPVLENGHVTLYWDRSIITDRTIVANKPDIVVIDRLARRTMIIDVTIPHDENLVKAEKEKQIKYLDLAHEVVDMWNVDSAIIVPIVVTANGLMAKSFDDHLSKLPLHGWLKGLIQKAVLLDTARIVRRFLSLEP

SEQ ID NO: 29258 - protein, 1109 aa, Hecatera dysodea
MDSVYERERHARILRVYRGGTNLTAYRVRMLSLFQDLEPAVNVSAQRLSDQVRVIQRSHRLDDAALERLRSEVLNNLIISTQTQTAVQAPVSGANTPRANNDSDEVDDRVVTVSSQYNNRLRSALEDALREYRSTPTELRPRLPRLPMHKKNRALVCALDSLLQNTFVSSENLVDTHSILYCGAVAACRLANVKFPSGDEAIRPKPAAPAWQCRIERRIDEARALIGKLYCFREGNTRPRVMRFVRRAFAGTGISPHEYTSRITERIDFLKQKVCAWANRIRRYKRRADRYSQNRMFQSDERWVYRAWERPEQSVTDVCRPDDIATTTFWRSIWSVPVRHTEGDWMRDVERVCEAIPQMEKITITPTDIATAVRPLPNWKSPGPDGLHNFWLKWYSSSHAVLASQFQSSLESGSLPQFLTTGITHLLHKTGSPAEPKNYRPITCLSTVYKLLTSILRVKINEHIESNSIMSSSQNGCRKGSRGTKELLLIDMAISQQVCRSRKDLSTCWIDYKKAYDSVPHTWLMKVLELYKIDATLRTFLESCMRQWKTVLRYPGCRPIQGNDEPIWIKRGIFQGDSLSPLWFCLALNPLSTLLEDSGLGYRLRRGGQAISHLLYMDDLKLFAPNNLRLMELLKVTETFSSAIRMEFGVDKCAVMHVKKGEIMESEGIQLSDSIQVRSLSSTETYKYLGMSEALGINGADMKQSLKERFFGRLKKVLNSLLSGGNKVRAFNGWVMPVLMYSFGILKWTQTELDALDRRVRTLLTANRMHHPRSSVMRLYIPRKCGGRGFLNAKTLYNREMCSLREYFLETDVGMHRDVVAVDKGLTPLSMAKENWRKPVIHTTDDRKEVWKGKELHGRFYRALYGSDVDFSASVAWLRFGDLFGETEGFVCAIMDEVILTNNYRRHIMKDGTVDVCRACHRPGESIRHIISGCSRLANSEYLHRHNQVARIIHQQLALKYKLVNSEVPYYKYVPDPVLENDHVTLYWDRSIITDRTIVANKPDIVVIDRLARRTMIIDVSIPHDENLVKAEKEKQIKYLDLAHEVVDMWDVDSAAIVPIIVTANGLMAKSFDDHLSKLALRSWVKGLIQKAVLLDTARIVRRFLSLEP

SEQ ID NO: 29259 - protein, 982 aa, Hecatera dysodea
MSRNLRKSTLEVQYVLSTNPTYIYIYIYNNNNNNNNNNKFVSSENLVDTHSILYCGAVAACRLANVKFPSGDEAIRPKPAAPAWQCRIERRIDEARALIGKLYCFREGNTRPRVMRFVRRAFAGTGISPHEYTSRITERIDFLKQKVCAWANRIRRYKRRVDRYSQNRMFQSDERWVYRTWERPEQSVTDVCRPDDIATTTFWRSIWSVPVRHTEGDWMRDVERVCEAIPQMEKITITPTDIATAVRPLPNWKSPGPDGLHNFWLKWYSSSHAVLASQFQSSLESGSLPQFLTTGITHLLHKTGSPAEPKNYRPITCLSTVYKLLTSILRVKINEHMESNSIMSSSQNGCRKGSRGTKELLLIDMAISQQVRRSRKDLSTCWIDYKKAYDSVPHTWLMKVLELYKIDATLRTFLESCMRQWKTVLRYPGCRPIQGSDEPIWIKRGIFQGDSLSPLWFCLALNPLSTLLEDSGLGYRLRRGGQAISHLLYMDDLKLFAPNNLRLMELLKVTETFSSAIRMEFGVDKCAVMHVKKGEIMESEGIQLSDSIQVRSLSSTETYKYLGMSEALGINGADMKQSLKERFFGRLKKVLNSLLSGGNKVRAFNGWVMPVLMYSFGILKWTQTELDALDRRVRTLLTANRMHHPRSSVMRLYIPRKCGGRGFLNAKTLHNREMCSLREYFLETDVGMHRDVVAVDKGLTPLSMAKENWRKPVIHTTDDRKEVWKGKELHGRFYRALYGSDVDFSASVAWLRFGDLFGETEGFVCAIMDEVILTNNYRRHIMKDGTVDVCRACHRPGESIRHIISGCSRLANSEYLHRHNQVARIIHQQLALKYKLVDSEVPYYKYVPDPVLENGHVTLYWDRSIITDRTIVANKPDIVVIDRLARRTMIIDVSIPHDENLVKAEKEKQIKYLDLAHEVVDMWDMDSAVIVPIIVTANGLMAKSFDDHLSKLALRSWVKGLIQKAVLLDTARIVRRFLSLQP

SEQ ID NO: 29260 - protein, 1199 aa, Hecatera dysodea
MLTRAATLRARHPPPDSPLSSASQPPDIESQVSPAAAVASSSSDVYFSPPTSPPPVRRQGRGRPPRVLGPRGQPAPSRVPATGGCVQRMRWTQSMNENVMRAYYGSTEGGTNLTAYRLRMLSLFQDLEPTVNVSAQRLSDQVRVIQRSHRLDDAALERLRSEVLNNLIISTQTQTAVQAPVSGANTPQANNDSDEVDDRVVTVSSQYNNRLRSALEDALREYRSTPTELRPRLPRLPMHKKNRALVCALDSLLQNTFVSSENLVDTHSILYCGAVAACRLANVKFPSGDEAIRPKPAAPAWQCRIERRIDEARALIGKLYCFREGNTRPRVMRFVRRAFAGTGISPHEYTSRITERIDFLKQKVCAWANRIRRYKRRADRYSQNRMFQSDERWVYRTWERPEQSVTDECRPDDIATTTFWRSIWSVPVRHTEGDWMRDVERVCEAIPQMEKITITPTDIATAVRPLPNWKSPGPDGLHNFWLKWYSSSHAVLASQFQSSLESGSLPQFLTTGITHLLHKTGSPAEPKNYRPITCLSTVYKLLTSILRVKINEHIESNSIMSSSQNGCRKGSRGTKELLLIDMAISQQVRRSRKDLSTCWIDYKKAYDSVPHTWLMKVLELYKIDATLRTFLESCMRQWKTVLRYPGCRPIQGSDEPIWIKRGIFQGDSLSPLWFCLALNPLSTLLEDSGLGYRLRRGGQAISHLLYMDDLKLFAPNNLRLMELLKVTETFSSAIRMEFGVDKCAVMHVKKGEIMESEGIQLSDSIQVRSLSSTETYKYLGMSEALGINGADMKQSLKERFFGRLKKVLNSLLSGGNKVRAFNGWVMPVLMYSFGILKWTQTELDALDRRVRTLLTANRMHHPRSSVMRLYIPRKCGGRGFLNAKTLHNREMCSLREYFLETDVGMHRDVVAVDKGLTPLSMAKENWRKPVIHTTDDRKEVWKGKELHGRFYRALYGSDVDFSASVAWLRFGDLFGETEGFVCAIMDEVILTNNYRRHIMKDGTVDVCRACHRPGESIRHIISGCSRLANSEYLHRHNQVARIIHQQLALKYKLVNSEVPYYKYVPDPVLENDHVTLYWDRSIITDRTIVANKPDIVVIDRLARRTMIIDVSIPHDENLVKAEKEKQIKYLDLAHEVVDMWDVDSAVIVPIIVTANGLMAKSFDDHLSKLALRSWVKGLIQKAVLLDTARIVRRFLSLQP

SEQ ID NO: 29261 - protein, 1200 aa, Mythimna impura
MLTRAAARRARHPPPGSPLSSASPPPDLESPVSPAAAVASSSSDEYFSPPTSPTPVRRPGRGRPPRSLGSRGQPAPSRVPAAGGCVQRMRWTQSMNENVMRAYYGSTEGGTNLTAYRVRMLSLFQELEPTVNVTTQRLSDQVRVIQRNHRLDDAALDRLRSEVLSNRIISTPIQTQTAAPRATDAILPQSNHVDDEADDRVVTVSSQCNDRLRSALEDALREYRSTPIDLRPRLPRLPMHKKNRALVCALDSLLENVFESSVNLADTHSILYCGAIAACRLANVKLPSCDGATRPKSVAPAWQCRIEKRIDGARALIGKLYCFREGNTRPRVMRYVRRAFSGTGISPPEYLSRVTERIDFLKQKVCAWANRIRRYKRRVDRYSQNRMFQSDERWVYRAWERPEQNVTDVTRPDAVATNAFWRNIWSVPVCHTEDGWMREVERVCEAIPEMEKVIISPTDVARAVRPLPNWKSPGPDGLQNFWLKWYSSSHALLASQFQSSLESGSLPQFLTTGVTHLLHKTGSTAEPKNYRPITCLSTVYKLLTSILRTKINQHIDNNSIMSASQNGCRNGSRGTKELLLIDMTISQQVRRSRKDLSTCWIDYKKAYDSVPHTWLMRVLELYKIDATLRTFLESCMGQWNTVLRYPGCRSIRRDDEPIWIKRGIFQGDSLSPLWFCLALNPLSTLLEESGLGYRLRRDGQVLSHLLYMDDLKLIAPNKLRLMELLKVTETFSNAIRMEFGVDKCAVMHVKRGEIMESEGIQLSDSIHLRSLSSTETYKYLGMSEALGINVADMKQSLKERFFSRLKKVLNSLLSGGNKVRAFNGWVMPVLMYSFGILKWTQTELDALDRRVRTLLTANRMHHPRSSVMRLYIPRKCGGRGFLNTKTLHNREVCSLREYFHKTDVGMHRDVVAVDKGLTPLSMAKENWRKPVVLTTDDRKEVWKSKELHGRFYRALHESDVDFAASVAWLRFSNLFGETEGFICAIMDEVILTNNYRRYIMKDGTIDVCRACHRPGESIRHIISGCSRLANGEYLHRHNQVARIIHQQLALKYNLVYSEVPYYRYVPDPVLENDHVTLYWDRSIITDRTIVANKPDIVVIDRLARRVMIVDVTIPHDENLVKAEKEKQIKYLDLAYEVVDMWNVDSAVIVPIVVTANGLIAKSFDDHLSKLSLRGWIKGLIQKAVLLDTARIVRRFLSLEP

SEQ ID NO: 29262 - protein, 1202 aa, Mythimna impura
MIMLTRAATRRARPSPLGSSLSSASPPPDLGSPVSPTAAVASSSSDEYFSPPTSPTPVRRPGRGRPPKSLGPRGQPAPSRVPATGGCVQRMKWTQSMNENVMRAYYGSTEGGTNLTAYRVRMLSLFQELEPTVNVTAQRLSDQVRVIQRNHRLDGAALDRLRSEVLSNRIISTPSQTQTEAPQATDAILPRSNHIDDEADDRVVTVSSQCNDRLRSALEDALREYRSTPIALRPRLPRLPMHKKNRALVCALDSLLENVFESSVNLADTHSILYCGAIAACRLANVKLSSCDGATRPKPAAPAWQCRIERRIDEARALIGKLYCFREGNTRPRVMRYVRRAFSGTEISPREYLSRVTERIDFLKQKVCAWANRIRRYKRRVDRYSQNRMFQSDERWVYRAWERPEQNVTDVTRPDAVATNTFWRNIWSVPVCHTEDGWMREVERVCEAIPEMEKIVISPIDVARAVRPLPNWKSPGPDGLQNFWLKWYSSSHALLASQFQSSLESGSLPQFLTTGVTHLLHKTGSTAEPKNYRPITCLSTVYKLLTSILRTKINKHINSNSIMSASQNGCRNGSRGTKELLLIDMAISQQVRRSRKDLSTCWIDYKKAYDSVPHTWLMRVLELYKIDATLRTFLESCMGQWNTVLRYRGCRSILRDDEPIWIKRGIFQGDSLSPLWFCLALNPLSTLLEESGLGYRLRRGGQVLSHLLYMDDLKLIAPNKLRLMELLKVTETFSSAIRMEFGVDKCAVMHVKRGEIMESEGIQLSDSIHVRSLSSTETYKYLGMSEALGINVADMKQSLKERFFGRLKKVLNSLLSGGNKVRAFNGWVMPVLMYSFGILKWTQTELDAVDRRVRTLLTANRMHHPRSSVMRLYIPRKCGGRGFLNAKTLHNREVCSLREYFHKTDVGMHRDVVAVDKGLTPLSMAKENWRKPVVLTTDDRKEVWKSKELHGRFYRALHESDIDFAASVAWLRFSNLFGETEGFICAIMDEVILTNNYRRYIMKDGTVDVCRACHRPGESIRHIISGCSRLANGEYLHRHNQVARIIHQQLALKYNLVDYEVPYYRYVPDPVLENDHVTLYWDRSIITDRTIVANKPDIVVIDRLARRVMIVDVTIPHDENLVKAEKEKQIKYLDLAHEVVDMWNVDSAVIVPIVVTANGLIAKSFDDHLSKLSLRGWIKGLIQKAVLLDTARIVRRFLSLEP

SEQ ID NO: 29263 - protein, 1202 aa, Mythimna impura
MIMLTRAAIRRARPSPLGSSLSSASPPPDLGSPVSPTAAVASSSSDEYFSPPTSPTPVRRPGRGRPPKSLGPRGQPAPSRVPATGGCVQRMKWTQSMNENVMRAYYGSTEGGTNLTAYRVRMLSLFQELEPTVNVTAQRLSDQVRVIQRNHRLDGAALDRLRSEVLSNRIISTPSQTQTEAPQATDATLPRSNHIDDEADDRVVTVSSQCNDRLRSALEDALREYRSTPIALRPRLPRLPMHKKNRALVCALDSLLENVFESSVNLADTHSILYCGAIAACRLANVKLPSCDGATRPKPAAPAWQCRIERRIDEARALIGKLYCFREGNTRPRVMRYVRRAFSGTEISPREYLSRVTERIDFLKQKVCAWANRIRRYKRRIDRYSQNRMFQSDERWVYRAWERPEQNVTDVTRPDAVATNTFWRNIWSVPVCHTEDDWMREVERVCEAIPEMEKIVISPIDVARAVRPLPNWKSPGPDGLQNFWLKWYSSSHALLASQFQSSLESGSLPQFLTTGVTHLLHKTGSTAEPKNYRPITCLSTVYKLLTSILRTKINKHIDSNSIMSASQNGCRNGSRGTKELLLIDMAINQQVRRSRKDLSTCWIDYKKAYDSVPHTWLMRVLELYKIDATLRTFLESCMGQWNTVLRYPGCRSIRRDDEPIWIKRGIFQGDSLSPLWFCLALNPLSTLLEESGLGYRLRRGGQVLSHLLYMDDLKLIAPNKLRLMELLKVTETFSSAIRMEFGVDKCAVMHVKRGEIMESEGIQLSDSIHFRSLSSTETYKYLGMSEALGINVADMKQSLKERFFGRLKKVLNSLLSGGNKVRAFNGWVMPVLMYSFGILKWTQTELDAVDRRVRTLLTANRMHHPRSSVMRLYIPRKCGGRGFLNAKTLHNREVCSLREYFHKTDVGMHRDVVAVDKGLTPLSMAKENWRKPVVLTTDDRKEVWKSKELHGRFYRALHESDIDFAASVAWLRFSNLFGETEGFICAIMDEVILTNNYRRYIMKDGTVDVCRACHRPGESIRHIISGCSRLANGEYLHRHNQVTRIIHQQLALKYNLVDYEVPYYRYVPDPVLENDHVTLYWDRSIITDRTIVANKPDIVVIDRLARRVMIVDVTIPHDENLVKAEKEKQIKYLDLAHEVVDMWNVDSAVIVPIVVTANGLIAKSFDDHLSKLSLRGWIKGLIQKAVLLDTVRIVRRFLSLEP

SEQ ID NO: 29264 - protein, 868 aa, Mythimna impura
MRYVRRAFSGTGISPREYLSRVTERIDFLKQKVCAWANRIRRYKRRVDRYSQNRMFQSDERWVYRAWERPEQNVTDVTRPDAVATNTFWRNILSVPVCHTEDEWMREVERVCEAIPEMEKVVISPIDVARAVRPLPNWKSPGSDGLQNFWLKWYSSSHALLASQFQSSLESGSLPQFLTTGVTHLLHKTGSTAEPKNYRPITCLSTVYKLLTSILRTKINKHIDTNSIMSASQNGCRNGSRGTKELLLIDMAISQQVRRSRKDLSTCWIDYKKAYDSVPHKWLMRVLELYKIDATLRTFLESCMGQWNTVLRYPGCRSIRRDDEPIWIRRGIFQGDSLSPLWFCLALNPLSTLLEESGLGYRLRRGGQVLSHLLYMDDLKLIAPNKLRLMELLKVTETFSSAIRIEFGVDKCAVMHVKRGEIMESEGIQLSDSIYLRSLSSTETYKYLGMSEALGINVADMKQSLKERFFERLKKVLNSLLSGGNTVRAFNGWVMPILMYSFGILKWTQTELDALDRRVRTLLTANRMHHPRSSVMRLYIPRKCVGRGFLNAKTLHNREVCSLREYFHKTDVGMHRDVVAVDKGLTPLSMAKANWRKPVVLTTDDRREIWKSKELHGRFYRALHESDVDFAASVAWLRFSNLFGETEGFICAIMDEVILTNNYRRYIMKDGTVDVCRACHRPGESIRHIISGCSHLANGEYLHRHNQVARIIHQQLALKYNLVYSEVPYYSYVPDPVLENDHVTLYWDRSIITDQTIVANKPDIVVIDRLARRAMIVDVTIPHDENLVKAEKEKQIKYLDLAHEVVDMWNVDSAIIVPIVVTANGLMAKSLDDHLSKLSLRGWIKGLIQKAVLLDTARIVRRFLSLQP

SEQ ID NO: 29265 - protein, 1199 aa, Phlogophora meticulosa
MLTRAAKRRARPPSPDSPLSSASPPPDLGSPVTPTVAAASSSSDEYFSPPTSPTPVRRQGRGRPPKSLGSRGQPAPSQVPATGGCVQRMRWTQSMNENVMRAYYGSTEGGTNLTAYRARMLSLFQVLEPTVNVSAQRLSDQVRVIQRNHRLDDTALDRLRSEVLNNHIVLTSTQTAVQAPIINATPSPSNHVSEEADDRVVTVSSQCNEKLRSALEDALREYRSTPTELRPRLPRLPMHKKNRALVCALDSLLKDLFESSGDLVDTHSILYCAAVAACRLANVKFPNNDVAIRPKPAVPAWQSRIERRIDGARVLIGKLYCFREGNTRPRVMRFVRRAFAGTGISPREYMSRIVERIDFLKQKVCAWANRIRRYKRRVDRYSQNRMFQSDERWVYRAWERPEQDVADVHRPDDTTTNAFWRNIWSVPVCHTEAHWMRDVERVCETITEMEKIIITPLDVATAVRPLPNWKAPGPDGLHNFWLKWLGSSHTRLASQFQSCLESGSLPQFLTTGITHLLYKSGSTTEPKNYRPITCLSTVYKLLTSILRAKIAQHIVGNSIMSASQNGCRNGSRGTKELLLIDMAISQQVRRSHKDLSTCWIDYKKAYDSVPHAWLMRVLELYKIDATLRTFLESCMGQWRTVLRYPGCRQIQGNDEPIWIKRGIFQGDSLSPLWFCLALNPLSTLLEDSGLGYRLRRGGQVISHLLYMDDLKLFAPNNLQLMELLKITESFSSTIRMEFGVDKCAVMHVKRGEIVESEGIQLSDSIQLRSLSSSDNYKYLGMSEALGINVTDMKQSLKERFFGRLKKVLNSLLSGGNKVRAFNGWVMPVLMYSFGILKWTQTELDALDRRVRTLLTANRMHHPRSSVMRLYIPRKCGGRGFLNAKTLYNREVCNLRDYFLKTEVGMHRDVVAVDKGLTPLSMAKENWRKPVVLTTDDRKQVWQSKELHGRFYRALHGPDVDFIASVSWLRFGDLFGETEGFVCAIMDEVILTNNYRKHIMKDGTVDMCRACHRPGESIRHIISGCSRLANGEYLHRHNQVARIIHQQLALRYKLVESEVPYYKYVPDPVLEDDHVTLYWDRSIITDRTIVANKPDIVVIDRLARRAMIVDVTIPHDENLVKAEKEKQIKYLDLAHEVVDMWNVDSAVIVPIVVTANGLLAKSLDDHLSRLSLHGWIKGLIQKAVLLDTARIVRRFLSLQP

SEQ ID NO: 29266 - protein, 1111 aa, Xestia xanthographa
MKWTQSINENVMRAYYGSTEGGTNLTAYRVRMLSLFQDLEPTVNVSAQRLSDQVRVIQRNHRLDDAALDRLRSEVLSNLIILTPTQTAVHTSVNNVTLPRSNPDVVEEDDRVATVSSQCNYRLRSALEDAFREYRSTPTELRPRLPRLPMHKKNRALVCALDSQLKNIFESSENLVDTHSILFCGAVAACRLANVKFPNCDVATRPKPAVPAWQCRIERRIDEARVLIGKLYCFREGNTRPRVMRFLRRAFSGTEISPQEYMSRVTERIDFLKQKVYAWANRIRRYKRRVDRYSQNRMFQSDERWVYRAWERPEQNMTDVCRPDDAATSSFWRSIWSVPVCHTESDWMRDVERVCEPIPEMEPILITPLDIAKAVRPLPNWKSPGPDGLHNFWLKWFSSSHTCLASQFQSSLESGSLPQFLTTGVTHLLHKSGSPAEPKNYRPITCLSTIYKLLTSILRVKINTHIDKNSIMSASQNGCRNGSRGTKELLLIDMAISQQVRRSRKDLSTCWIDYKKAYDSVPHTWLMRVLELYKIDTTLRAFLESCMGQWKTVLRYPGCRQIQGSDEPVWIKRGIFQGDSLSPLWFCLALNPLSTLLENSGLGCRLRKDGQVISHLLYMDDLKLFAPNKLRLMELLKVTETFSSAIRMEFGVDKCAVMYVKRGEIMESEGLQLSDSIHLRSLSSSETYKYLGMSEALGINVTDMKQSLKERFFGRLRKVLNSLLSGGNKVRAFNGWVMPVLMYSFGILKWTQTELDALDRRVRTLLTETRMHHPRSSVMRLYIPRKCGGRGFLNAKTLHNREVCSLREYFLKAEVGMHRDVVAVDKGLTPLSMAKENWHKPEVLTTDDRKEVWQGKELHGRFYRALHGPDVDFLASVFWLRFGDLFGETEGFVCAIMDEVMLTNNYRKYIMKDGTVDVCRACHLPGESIRHIISGCSRLANGEYLHRHNQVARIIHQQLALKYKLVESEVPYYKYVPDPVLEKDHVTLYWDRAIITDRTIVANKPDIVMIDRSARRVMIIDVTIPHDENLVKAEKEKQIKYLDLAHEVRDMWNMNSVIIVPIVVTANGLIAKSFDDHISKLSLGGWIKGLIQKAVLLDTARIVRRFLSLQP

SEQ ID NO: 29267 - protein, 1199 aa, Mamestra brassicae
MLTRAALQRARPPPPDPSLSSASPPPDIGSPLSPAVAVASSSSDEYFSPPTSPTPVRRQGRGRPPKGLGPRGQPAPSRVPATGGCVQRMRWTQSMNENVMRAYYGSTEGGTNLTAYRVRMLSLFQDLEPTVNVSAQRLSDQVRVIQRNHRLDDAALDRLRSEILNNLIISTPTQTAVQAPVNGRITPRPNNVSDEVDDRVVTVSSQCNDRLRSALEDALREYRSTPTELRPRLPRLPMHKKNRALVCALDSLLQNIFESSESLVDTHSILYCGAVAACRIANVKFPGCDEAIRPKPAAPAWQRRIERRIDETRALIGKLYCFREGNTRPRVMRFVRRAFSGTEISPRDFTSRVTERIDFLKQKVCAWASRIRRYKRRVDRCSQNRMFQSDERWVYRAWERPEQSVTDVCRPDDVATSIFWRSIWSVPICHAEGGWMRDVERVCEAIPQMEKITITTLDVAKAVRPLPNWKSPGPDGLHNFWLKWYSSSHALLASQFQSSLDSGSLPQFLTTGVTHLLHKTGSPTEPKNFRPITCLSTVYKLLTSILRAKINEHIESNSIMSASQNGCRKGSRGTKELLLIDMAISQQVRRSRKDLSTCWIDYKKAYDSVPHTWLMKVLELYKIDATLRTFLESCMRQWKTVLRYPGCRPIQGSDEPVWIKRGIFQGDSLSPLWFCLALNPLSTLLEDSGLGYRLRRGGQAISHLLYMDDLKLFAPNNLRLMELLKVTETFSSAIRMEFGVDKCAVMHVKKGEIMESEGIHLSDSIQVRSLSSTETYKYLGMLEALGINGTDMKQSLKERFFGRLKKVLNSLLSGGNKVRAFNGWVIPVLMYTFGILKWTQTELDALDRRVRTLLTANRMHHPRSSVMRLYIPRKCGGRGFLNAKTLHNREMCSLREYFLKAHVGMHRDVVAVDKGLTPLSMAKENWRTPVILTTDDRKEVWKGKELHGRFYRALHGSDVDFSASVAWLRFGDLFGETEGFVCAIMDEVILTNNYRRHIMKDGTVDMCRACHRPGESIRHIISGCSRLANGEYLHRHNQVARIIHQQLALKYNLVDSEVPYYKYVPDPVLENDHVTLYWDRSIITDRTIVANKPDIVVIDRLARRTMIIDVTIPHDENLVKAEKEKQIKYLDLAHEVVDMWNVESAVIVPIVVTANGLMAKSFDDHLSKLALRSWVKGLIQKAVLLDTARIVRRFLSLEP

SEQ ID NO: 29268 - protein, 1199 aa, Mamestra brassicae
MITRAAARRAHPPPPGSSLSSASPTPDIGSQVSPVVAVASSSSDEYFSPPTSPTPVRRQGRGRPPRSLGSRGQPAPSRVPAAGGCVQRMRWTQSMNENVMRAYYGSTEGGTNLTAYRVRMLSLFQDLEPTVNVSAQRLSDQVRVIQHNCRLDDAALERLRSEVLSNLIISTPTQTVVQAPASGAITPRPNNGSDEVDDRVVTVSSQCNDRLRSALKDALREYRLTPTELRPRLPRLPMHKKNRALVCALDSLLQNIFESSESLVDTHSILFCGAVAACRIANVKFPSCDEAIRPKPAAPAWQCRIERRIDEARALIGKLYCFREGNTRPRVMRFVRRAFSGTGISPREYTFRVTERIDFLKQKVCAWANRIRRYKRRVDRYSQNRMFQSDERWVYRAWERPEQSVTDVYRPDDVATSTFWRSIWSVPICHAEGGWMRDVERVCEAIPQMEKITITTLDIAKAVRPLPNWKSPGPDGLHNFWLKWYSSSHALLASQFQSSLESGSLPQFLTTGITHLLHKTGSPAEPKNYRPITCLSTVYKLLTSILRAKINEHIESNSIMSASQNGCRKGSRGTKELLLIDMAISQQVRRSRKDLSTCWIDYKKAYDSVPHTWLMKVLELYKIDATLRTFLESCMRQWKTVLRYPGCQPIQGSDEPVWIKRGIFQGDSLSPLWFCLALNPLSTLLEDSGLGYRLRRGGQAISHLLYMDDLKLFAPNNLRLMELLKVTETFSSAIRMEFGVDKCAVMHVKKGEIMESEGIQLSDSIQVRSLSSTESYKYLGMSEALGINGTDMKQSLRERFFGRLKKVLNSLLSGGNKVRAFNGWVMPVLMYTFGILKWTQTELDALDRRVRTLLTANRMHHPRSSVMRLYIPRKCGGRGFLNAKTLHNREMCSLREYFLKADVGMHRDVVAVDKGLTPLSMAKENWRKPVILTTDDRKEVWKGKELHGRFYRALYGSDVDFSASVAWLRFGDLFGETEGFVCAIMDEVILTNNYRKHIMKDGTVDVCRACHRPGESIRHIISGCSRLANGEYLHRHNQVARIIHQQLALKYKLVDSEVPYYKYVPDPVLENDHVTLYWDRSIITDRTIVANKPDIVVIDRLARRTMIIDVTIPHDENLVKAEKEKQIKYLDLAHEVVDMWNVDSAVIVPIVITANGLMAKSFDDHLSKLALRGWIKGLIQKAVLLDTARIVRRFLSLEP

SEQ ID NO: 29269 - protein, 1199 aa, Mamestra brassicae
MITRAAARRAHPPPPGSSLSSASPTPDIGSQVSPVVAVASSSSDEYFSPPTSPTPVRRQGRGRPPRSLGSRGQPALSRVPAAGVCVQRMRWTQSMNENVMRAYYGSTEGGTNLTAYRVRMLSLFQDLEPTVNVSAQRLSDQVRVIQHNCRLDDATLERLRSEVLSNLIISTPTQTVVQAPASGAITPRPNNGSDEVDDRVVTVSSQCNDRLRSALEDALREYRLTPTELRPRLPRLPMHKKNRALVCALDSLLQNIFESSESLVDTHSILFCGAVAACRIANVKFPSCDEAIRPKPAAPAWQCRIERRIDEARALIRKLYCFREGNTRPRVMRFVRRAFSGTGISPREYTFRVTERIDFLKQKVCAWANRIRRYKRRVDRYSQNRMFQSDERWVYRAWERPEQSVTDVYRPDDVATSTFWRSIWSVPICHAEGGWMRDVERVCEAIPQMEKITITTLDIAKAVRPLPNWKSPGPDGLHNFWLKWYSSSHALLASQFQSSLESGSLPQFLTTGITHLLHKTGSPAEPKNYRPITCLSTVYKLLTSILRAKINEHIESNSIMSASQNGCRKGSRGTKELLLIDMAINQQVRRSRKDLSTCWIDYKKACDSVPHTWLMKVLELYKIDATLRTFLESCMRQWKTVLRYPGCQPIQGSDEPVWIKRGIFQGDSLSPLWFCLALNPLSTLLEDSGLGYRLRRGGQAISHLLYMDDLKLFAPNNLRLMELLKVTETFSSAIRMEFGVDKCAVMHVKKGEIMESEGIQLSDSIQVRSLSSTESYKYLGMSEALGINGTDMKQSLRERFFGRLKKVLNSLLSGGNKVRAFNGWVMPVLMYTFGILKWTQTELDALDRRVRTLLTANRMHHPRSSVMRLYIPRKCGGRGFLNAKTLHNREMCSLREYFLKADVGMHRDVVAVDKGLTPLSMAKENWRKPVILTTDDRKEVWKGKELHGRFYRALYGSDVDFSASVAWLRFGDLFGETEGFVCAIMDEVILTNNYRKHIMKDGTVDVCRACHPPGESIRHIISGCSRLANGEYLHRHNQVARIIHQQLALKYKLVDSEVPYYKYVPDPVLENDHVTLYWDRSIITDRTIVANKPDIVVIDRLARRTMIIDVTIPHDENLVKAEKEKQIKYLDLAHEVVDMWNVDSAVIVPIVITANGLMAKSFDDHLSKLALRGWIKGLIQKAVLLDTARIVRRFLSLEP

SEQ ID NO: 29270 - protein, 1198 aa, Mamestra brassicae
MITRAAARRAHPPPPGSSLSSASPTPDIGSQVSPVVAVASSSSDEYFSPPTSPTPVRRQGRGRPPRSLGSRGQPALSRVPAAGGCVQRMRWTQSMNENVMRAYYGSTEGGTNLTAYRVRMLSLFQDLEPTVNVSAQRLSDQVRVIQHNCRLDDAALERLRSEVLSNLIISTPTQTVVQAPASGAITPRPNNGSDEVDDRVVTVSSQCNDRLRSALEDALREYRLTPTELRPRLPRLPMHKKNRALVCALDSLLQNIFESSESLVDTHSILFCGAVAACRIANVKFPNCDEAIRPKPAAPAWQCRIERRIDEARALIGKLYCFREGNTRPRVMRFVRRAFSGTGISPREYTFRVTERIDFLKQKVCAWANRIRRYKRRVDRYSQNRIFQSDERWVYRAWERPEQSVTDVYRPDDVATSTFWRSIWSVPICHAEGGWMRDVERVCEAIPQMEKITITTLDIAKAVRPLPNWKSPGPDGLHNFWLKWYSSSHALLASQFQSSLESGSLPQFLTTGITHLLHKTGSPAEPKNYRPITCLSTVYKLLTSILRAKINEHIESNSIMSASQNGCRKGSRGTKELLLIDMAISQQVRRSRKDLSTCWIDYKKAYDSVPHTWLMKVLELYKIDATLRTFLESCMRQWKTVLRYPGCQPIQGSDEPVWIKRGIFQGDSLSPLWFCLALNPLSTLLEDSGLGYRLRRGGQAISHLLYMDDLKLFAPNNLRLMELLKVTETFSSAIRMEFGVDKCAVMHVKKWEIMESEGIQLSDSIQVRSLSSTESYKYLGMSEALGINGTDMKQSLRERFFGRLKKVLNSLLSGGNKVRAFNGWVMPVLMYTFGILKWTQTELDALDRRVRTLLTANRMHHPRSSVMRLYIPRKCGGRGFLNAKTLHNREMCSLREYFLKADVGMHRDVVAVDKGLTPLSMAKENWRKPVILTTDDRKEVWKGKELHGRFYRALYGSDVDFSASVAWLRFGDLFGETEGFVCAIMDEVILTNNYRKHIMKDGTVDVCRACHRPGESIRHIISGCSRLANGEYLHRHNQVARIISQQLALKYNLVDSEVPYYKYVPDPVLENDHVTLYWDRSIITDRTIVANKPDIVVIDRLARRTMIIDITIPHDENLVKAEKEKQIKYLDLAHEVVDMWNVDSAVIVPIVITAKGMSKSFDDHLSKLALRGWIKGLIQKAVLLDTARIVRRFLSLEP

SEQ ID NO: 29271 - protein, 1199 aa, Noctua fimbriata
MITRAAYRRARLTTPDSPLSSASPPPDPGSPVLPAAAVASSSSDEYFSPPTSPTPVRRQGRGRPPRSLGLRGHPAPSRVPAAGGCVQRMRWTHSINENVMRAYYGSTEGGTNLTAYRVRMLSLFQVLEPTVNVSAQRLSDQARVIQRNHMLDDAVLDRLRSEVLSNRVILTPAQTAVQASVVDATPPRFNPAVVEEDDRVAVVSNQCNDRLRSALEDALREYRSTPTELRPRLPRLPMHNKNRALVCALDSQLKNIFESSENLVDTHSILYCGAVAACRLANVKFPNCDVATRPKPAVPAWQYRIERRIDGARVLIGKLHCFREGNTRPRVMRFVRRAFSGTGISPQEYMSRVTERIDFLKQKVYAWANRIRRYKRRVDRYSQNRMFQSDERWVYRAWERPELNMTDVCRPDDAATSSFWRSIWSVPVCHTEADWMRDVERVCEPIPEMEPILITPLDIARAVRPLPNWKSPGPDGLHNFWLKWLSSSHTCLASQFQSSLESGSLPQFLTTGVTHLLHKSGSPAEPKNYRPITCLSTVYKLLTSILRAKINTHIDKNSIMSASQNGCRNGSRGTKELLLIDMAISQQVRRSRKDLSTCWIDYKKAYDSVPHTWLMRVLELYKIDATLRAFLESCMGQWRTVLRYPGCRQIQGNDEPVWIKRGIFQGDSLSPLWFCLALNPLGTLLEDSGLGYRLRRGGQVISHLLYMDDLKLFAPNKLQLMELLKVTENFSSAIRMEFGVDKCAVMYVKQGEIMESEGIQLSDSIHLRTLSSTESYKYLGMSEALGINVTDMKQSLKERFFGRLNKVLHSLLSGGNKVRAFNGWVMPVLMYSFGVLKWTQTELDALDRRVRTLLTANRMHHPRSSVMRLYIPRKCGGRGFLNAKSLHNREMCSLREYFLKVEVGMHRDVVAVDKGLTPLSMAKENWRKPEVLTTDDRKEVWQGKELHGRFYRALHGPDVDFLASVSWLRFGDLFGETEGFVCAIMDEVMLTNNYRKYIMKDGTVDVCRACHRPGESIRHIISGCSRLANGEYLHRHNQVARIIHQQLALKYKLVESEVPYYKYVPDPVLEKDHVTLYWDQSIITDRTIVANKPDIVVIDRSARRVMIVDVTIPHDENLVKAEKEKQIKYLDLAHEVVDMWNVNSAIIVPIVVTANGLIAKSLDDHLSKLSLGGWIKGLIQKAVLLDTARIVRRFLSLEP

SEQ ID NO: 29272 - protein, 1202 aa, Noctua fimbriata
MLTRAAARRARLPPPDPSLSSASPPPESSHIVSAVTPAVAVASSSSDEYFSPPSSPTPVRRQGRGRPPRSLGLRGHPAPSRVPAAGGCVQRMRWTHSINENVMRAYYGSTEGGTNLTAYRVGMLSLFQVLEPTVNVSAQRLSDQVRVIQRNHMLDDAVLDRLRSEVLSNRIVLTPAQTAVQASVIDATPPRFNPAVVEEDDRVAVVSSQCNDRLRSALEDALREYRSTPTELRPRLPRLPMHNKNRALVCALDSQLENIFESSENLVDTHSILYCGAVAACRLANVKFPNCDVATRPKPAVPAWQRRIERRIDGARVLIGKLHCFREGNTRPRVMRFVRRTFSGTGISPQEYMSRATERIDFLKQKVYAWANRIRRYKRRVDRYSQNRMFQSDERWVYRAWERPELNMTDVCRPDDAATSSFWRSIWSVPVCHTEADWMCDVERVCEPIPEMEPILITPLDIARAVRPLPNWKSPGPDGLHNFWLKWLSSSHTCLASQFQSSLESGSLPQFLTTGVTHLLHKSGSPAEPKNYRPITCLSTVYKLLTSILRAKINTHIDKNSIMSASQNGCRNGSRGTKELLLIDMAISQQVRRSRKDLSTCWIDYKKAYDSVPHTWLMRVLELYKIDATLRAFLESCMGQWRTVLRYPGCRQIQGNDEPVWIKRGIFQGDSLSPLWFCLALNPLSTLLEDSGLGYRLRRGGQVISHLLYMDDLKLFAPNELRLMELLKVTETFSSAIRMEFGVDKCAVMYVKQGEIMESEGIQLSDSIHLRTLSSTESYKYLGMSEALGINVTDMKQSLKERFFGRLNKVLHSLLSGGNKVRAFNGWVMPVLMYSFGVLKWTQTELDALDRRVRTLLTANRMHHPRSSVMRLYIPRKCGGRGFLNAKSLHNREMCSLREYFLKVEVGMHRDVVAVDKGLTPLSMAKENWRKPEVLTTDDRKEVWQGKELHGRFYRALHGPDVDFLASVSWLRFGDLFGETEGFVCAIMDEVMLTNNYRKYIMKDGTVDVCRACHRPGESIRHIISGCSRLANGEYLHRHNQVARIIHQQLALKYKLVESEVPYYKYVPDPVLEKDHVTLYWDQSIITDRTIVANKPDIVVIDRSARRVMIVDVTIPHDENLVKAEKEKQIKYLDLAHEVVDMWNVNSAIIVPIVVTANGLIAKSLDDHLSRLSLGGWIKGLIQKAVLLDTARIVRRFLSLEP

SEQ ID NO: 29273 - protein, 1202 aa, Noctua fimbriata
MITRAASRRARLPPPDQSLSSASPPPESSPIVSAVTPAVAVASNSSDEYFSPPTSPTSVRRQGRGRPPRSLGLRGHPTPSRVPAAGGCVQRMRWTHSINENVMRAYYGSTEGGTNLTAYRVGMLSLFQVLEPTINVSAQRLSDQVRVIQRNHMLDDAVLDRLRSEVLSNRIVFTPAQTVVQASVIDATPPRFNPAVVEEDDRVAVVSSQCNDRLRSALEDALREYRSTPTELRPRLPRLPMHNKNRALVCALDSQLKNLFESSENLVDTHSILYCGAVAACRLANVKFPNCDVATRPKPAVPAWQRRIECRIDGARVLIGKLHCFREGNTRPRVMRFVRRAFSGTGISPQEYMSRVTERIDFLKQKVYAWANRIRRYKRRVDRYSQNRMFQSDERWVYRAWERPDQNMTDVCRPDDAATSSFWRSIWSVPVCHTEADWMRDVEQVCEPIPEMEPILITPLDVARAVRPLPNWKSPGPDGLHNFWLKWLSSSHTCLASQFQSSLESGSLPQFLTTGVTHLLHKSGSPAEPKNYRPITCLSTVYKLLTSILRAKINTHIDKNSIMSASQNGCRNGSRGTKELLLIDMAISQQVRRSRKDLSTCWIDYKKAYDSVPHTWLMRVLELYKIDATLRAFLESCMGQWRTVLRYPGCRQIQGNDEPVWIKRGIFQGDSLSPLWFCLALNPLSTLLEDSGLGYRLRRGGQVISHLLYMDDLKLFAPNKLRLMELLKVTETFSSAIRMEFGVDKCAVMYVKQGVIMESEGIQFSDSIHLRTLSSTESYKYLGMSEALGINVTDMKQSLKERFFGRLNKVLHSLLSGGNKVRAFNGWVMPVLMYSFGVLKWTQTELDALDRRVRTLLTANRMHHPRSSVMRLYIPRKCGGRGFLNAKSLHNREMCSLREYFFKVEVGMHRDVVAVDKGLTPLSMAKENWRKPEVLTTDDRKEVWQGKELHGRFYRALHGPDVDFLASVSWLRFGDLFGETEGFVCAIMDEVMLTNNYRKYIMKDGTVDVCRACHRPGESIRHIISGCSRLANGEYLHRHNQVARIIHQQLALKYKLVESEVPYYKYVPDPVLEKDHVTLYWDQSIITDRTIVANKPDIVVIDRSARRVMIVDVTIPHDENLVKAEKEKQIKYLDLAHEVVDMWNVNSAIIVPIVVTANGLIAKSLDDHLSKLSLGGWIKGLIQKAVLLDTARIVRRFLSLEP

SEQ ID NO: 29274 - protein, 1202 aa, Noctua fimbriata
MITRAASRRARLPPPDQSLSSASPPPESSPIVSAVTPAVAVASSSSDEYFSPPTSPTPVRRQGRGRPPRSLGLRGHPAPSRVPAAGGCVQRMRWTHSINENVMRAYYGSTEGGTNLTAYRVGMLSLFQVLEPTINVSAQRLSDQVRVIQRNHMLDDAVLDRLRSEVLSNRIVFTPAQTAVQASVIDATPPRFNPAVVEEDDRVAVVSSQCNDRLRSALEDALREYRSTPTELRPRLPRLPMHNKNRALVCALDSQLKNLFESSENLVDTHSILYCGAVAACRLANVKFPNCDVATRPKPAVPAWQRRIECRIDGARVLIGKLHCFREGNTRPRVMRFVRRAFSGTGISPQEYMSRVTERIDFLKQKVYAWANRIRRYKRRVDRYSQNRMFQSDERWVYRAWERPDQNMTDMCRPDNAATSSFWRSIWSVPVCHTEADWMRDVEQVCEPIPEMEPILITPLDVARAVRPLPNWKSPGPDGLHNFWLKWLSSSHPCLASQFQSSLESGSLPQFLTTGVTHLLHKSGSPAEPKNYRPITCLSTVYKLLTSILRAKINTHIDKNSIMSASQNGCRNGSRATKELLLIDMAISQQVRRSRKDLSTCWIDYKKAYDSVPHTWLMRVLELYKIDATLRAFLESCMGQWRTVLRYPGCRQIQGNDETVWIKRGIFQGDSLSPLWFCLALIPLSTLLEDSGLGYRLRRGGQVISHLLYMDDLKLFAPNKVQLMELLKVTETFSSAIRMEFGVDKCAVMYVKQGEIMESEGIQLSDSIHLRTLSSTESYKYLGMSEALGINVTDMKQSLKERFFGRLNKVLHSLLSGGNKVRAFNGWVMPVLMYSFGVLKWTQTELDALDRRVRTLLTANRMHHPRSSVMRLYIPRKCGGRGFLNAKSLHNREMCSLREYFLKVEVGMHRDVVAVDKGLTPLSMAKENWRKPEVLTTDDRKEVWQGKELHGRFYRALHGPDVDFLASVSWLRFGDLFGETEGFVCAIMDEVMLTNNYRKYIMKDGTVDVCRACHRPGESIRHIISGCSRLANGEYLHRHNQVARIIHQQLALKYKLVESEVPYYKYVPDPVLEKDHVTLYWDQSIITDRTIVANKPDIVVIDRSARRVMIVDVTIPHDENLVKAEKEKQIKYLDLAHEVVDMWNVNSAIIVPIVVTANGLIAKSLDDHLSKLSLGGWIKGLIQKAVLLDTARIVRRFLSLEP

SEQ ID NO: 29275 - protein, 1199 aa, Noctua fimbriata
MITRAAYRRARLTTPDSPLSSASPPPDPGSPVLPAAAVASSSSDEYFSPPTSPTPVRRQGRGRPPRSLGLRGHPAPSRVPAAGGCVQRMRWTHSINENVMRAYYGSTEGGTNLTAYRVRMLSLFQVLEPTVNVSAQRLSDQVRVIQRNHMLDDAVLDRLRSEVLSNRVILTPAQTAVQASVIDATPPRFNTAVVEEDSRVAVVSSQCNDRLRSALEDALREYRSTPTEFRPRLPRLPMHNKNRALVCALDSQLKNIFESSENLVDTHSILYCGAVAACRLANVKFPNCDVATRPKPAVPAWQCRIERRIDGARVLIGKLHCFREGNTRPRVMRFVRRAFSGTGISPQEYMSRVTERIDFLKQKVYAWANRIRRYKRRVDRYSQNRMFQSDERWVYRAWERPEQNMTDVCRPDDAATSSFWRSIWSVPVCHTEADWMRDVEQVCEPIPEMEPILITPLDVARAVRPLPNWKSPGPDGLHNFWLKWLSSSHTCLASQFQSSLESGSLPQFLTTGVTHLLHKSGSPAEPKNYRPITCLSTVYKLLTSILRAKINTHIDKNSIMSASQNGCRNGSRGTKELLLIDMAISQQVRRSRKDLSTCWIDYKKAYDSVPHTWLMRVLELYKIDATLRAFLESCMGQWRTVLRYPGCRQIQGNDEPVWIKRGIFQGDSLSPLWFCLALNPLSTLLEDSGLGYRLRRGGQVISHLLYMDDLKLFAPNKLRLMELLKVTETFSSAIRMEFGVDKCAVMYVKQGEIMESEGIQLSDSIHLRTLSSTESYKYLGMSEALGINVTDMKQSLKERFFGRLNKVLHSLLSGGNKVRAFNGWVMPVLMYSFGVLKWTQTELDALDRRVRTLLTANRMHHPRSSVMRLYIPRKCGGRGFLNAKSLHNREMCSLREYFLKVEVGMHRDVVAVDKGLTPLSMAKENWRKPEVLTTDDRKEVWQGKELHGRFYRALHGPDVDFLASVSWLRFGDLFGETEGFVCAIMDEVMLTNNYRKYIMKDGTVDVCRACHRPGESIRHIISGCSRLANGEYLHRHNQVARIIHQQLALKYKLVESEVPYYKYVPDPVLEKDHVTLYWDQSIITDRTIVANKPDIVVIDRSARRVMIVDVTIPHDENLVKAEKEKQIKYLDLAHEVVDMWNVNSAIIVPIVVTANGFIAKSLDDHLSKLSLGGWIKGLIQKAVLLDTARIVRRFLSLEP

SEQ ID NO: 29276 - protein, 1203 aa, Noctua fimbriata
MITRAASRRARLPPPDQSLSSASPPPESSPIVSAVTPAVAVASSSSDEYFSPPTSPTPVRRQGRGRPPRSLGLRGHPAPSRVPAAGGCVQRMRWTHSINENVMRAYYGSTEGGTNLTAYRVGMLSLFQLLEPTINVSAQRLSDQVRVIQRNHMLDDAVLDRLRSEVLSNRIVFTPAQTAVQASVIDATPPRFNPAVVEEDDRVAVVSSQCNDRLRSALEDALREYRSTPTELRPRLPRLPMHNKNRALVCALDSQLKNLFESSENLVDTHSILYCGAVAACRLANVKFPNCDVATRPKPAVPAWQRRIECRIDGARVLIGKLHCFREGNTRPRVMRFVRRAFSGTGISPQEYMSRVTERIDFLKQKIYAWANRIRRYKRRVDRYSQNRMFQSDERWVYRAWERPDQNMTDMCRPDDAATSSFWRSIWSVPVCHTEADWMRDVEQVCEPIPEMEPILITPLDVARAVCPLPNWKSPGPDGLHNFWLKWLSSSHTCLASQFQSSLESGSLPQFLTTGVTHLLHKSGSPAEPKNYRPITCLSTVYKLLTSILRAKINTHIDKNSIMSASQNGCRNGSRATKELLLIDMAISQQVRRSRKDLSTYWIDYKKAYDSVPHTWLMRVLELYKIDATLRAFLESCMGQWRTVLRYPGCRQIQGNDEPVWIKRGIFQGDSLSPLWFCLALNPLSTLLEDSGLGYRLRRGGQVISHLLYMDDLKLFAPNKLQLMELLKVTETFSSAIRMEFGVDKCAVMYVKQGEIMKSEGIQLSDSIHLRTLSSTESYKYLGMSEALGINVTDMKQSLKERFFGRLNKVLHSLLSGGNKVRAFNGWVMPVLMYSFGVLKWTQTELDALDRRVRTLLTANRMHHPRSSVMRLYIPRKCGGRGFLNAKSLHNREMCSLREYFLKVEVGMHRDVVAVDKGLTPLSMAKENWRKPEVLTTDDRKEVWQGKELHGRFYRALHGPDVDFLASVSWLRFGDLFGETEGFVCAIMDEVMLTNNYRKYIMKDGTVDVCRACHRPGESIRHIISGCSRLANGEYLHRHNQVARIIHQQLALKYKLVESEVPYYKYVPDPVLEKDHVTLYWDQSIITDRTIVANKPDIVVIDRSARRVMIVDVTIPHDENLVKAEKEKQIKYLDLAHEVVDMWNVNSAIIVPIVVTANGLIAKSLDDHLSKLSLGGWIKGLIQKAVLLDTIFYIFKCFFIYFF

SEQ ID NO: 29277 - protein, 1202 aa, Noctua fimbriata
MITRAASRRARLPPPDQSLSSASPPPESSPIVSAVTPAVAVASSSSDEYFSPPTSPTPVRRQGRGRPPRSLGLRGHPAPSRVPAAGGCVQRMRWTHSINENVMRAYYGSTEGGTNLTAYRVGMLSLFQVLEPTINVSAQRLSDQVRVIQRNHMLDDAVLDRLRSEVLSNRIVFTPAQTAVQASVIDATPPRFNPAVVEEDDRVAVVSSQCNDRLRSALEDALREYRSTPTELRPRLPRLPMHNKNRALVCALDSQLKNLFESSENLVDTHSILYCGAVAACRLANVKFPNCDVATRPKPAVPAWQRRIECRIDGARVLIGKLHCFREGNTRPRVMRFVRRAFSGTGISPQEYMSRVTERIDFLKQKVYAWANRIRRYKRRVDRYSQNRMFQSDERWVYRAWERPDQNMTDMCRPDDAATSSFWRSIWSVPVCHTEADWMRDVEQVCEPIPEMEPILITPLDVARAVRPLPNWKSPGPDGLHNFWLKWLSSSHTCLASQFQSSLESGSLPQFLTTGVTHLLHKSGSPAEPKNYRPITCLSTVYKLLTSILRAKINTHIDKNSIMSASQNGCRNGSRATKELLLIDMAISQQVRRSRKDLSTCWIDYKKAYDSVPHTWLMRVLELYKIDATLRAFLESCMGQWRTVLRYPGCRQIQGNDEPVWIKRGIFQGDSLSPLWFCLALNPLSTLLVDSGLGYRLRRGGQVISHLLYMDDLKLFAPNKLQLMELLKVTETFSSAIRMEFGVDKCAVMYVEQGEIMESEGIQLSDSIHLRTLSSTESYKYLGMSEALGINVTDMKQSLKERFFGRLNKVLHSLLSGGNKVRAFNGWVMPVLMYSFGVLKWTQTELDALDRRVRTLLTANRMHHPRSSVMRLYIPRKCGGRGFLNAKSLHNREMCSLREYFLKVEVGMHRDVVAVDKGLTPLSMAKENWRKPEVLTTDDRKEVWQGKELHGRFYRALHGPDVDFLASVSWLRFGDLFGETEGFVCAIMDEVMLTNNYRKYIMKDGTVDVCRACHRPGESIRHIISGCSRLANGEYLHRHNQVARIIHQQLALKYKLVESEVPYYKYVPDPVLEKDHVTLYWDQSIITDRTIVANKPDIVVIDRSARRVMIVDITIPHDENLVKAEKEKQIKYLDLAHEVVDMWNVNSAIIVPIVVTANGLIAKSLDDHLSKLSLGGWIKGLIQKAVLLDTALIVRRFLSLEP

SEQ ID NO: 29278 - protein, 1202 aa, Atethmia centrago
MLTRSAARARPPPPDSSLSSASPPPVPSPTVSAVTTPAAVVASSSSDEYFSPPTSPTPVRRQGRGRPPKSLGLRGQLAPSRVPAAGGCVQRMRWTRSMNENVMRAYYGSTEGGTNLTAYRVRMLSLFQKLEPTVNVSAQRLSDQVRVIQRNHRLDNAALDRLRSEVLSNHIVSTPAQTATHAPIINAIPPRSNHDVEEEDDRVATVSSQCNVRLRSALEDAFREYRSTPTELRPRLPRLPMHKKNRALVCTLDSLLKDFFESSEDLVDTHSILYCAAVAACRLANVKFPNCDGATRPKPAVPAWQCRIERRIDGARVLIGKLYCFREGNTRPRVMRFVRRAFSGTGISPREYMSRVTERIDFLKQKVCAWASRIRRYKRRVDRYTPNRMFQSDERWVYRAWERPEQNETDVCRPDDATTTAFWRSIWSVPVCHAEADWMRDVERVCETIPEMDVVIITPSNIARAVRPLPNWKSPGPDGLHNFWLKWLTSSHTCLASQFQSSLESGSLPQFLTTGITHLLHKSGSPAEPKNYRPITCLSTVYKLLTSILRAKINTHIDSNSIMSASQNGCRNGSRGTKELLLIDMAISQQVRRFRKDLSTCWIDYKKAYDSVPHTWLMRVLEFYKIDTTLRTFLESCMGQWRTVLRYPGCRQIQGNDEPVWIKRGIFQGDSLSPLWFCLALNPLSTLLEDSGLGYRLRRGGQVISHLLYMDDLKIFAPNKLQLMELLKVTETFSSAIRMEFGVDKCAVMHVKRGEIMESEGIQLSDSIHLRSLSSPESYKYLGMSEALGINVTDMKQSLKERFFGRLKKVLISPLSGGNKVRAFNGWVMPVLMYSFGILKWTQTELDALDRRVRTLLTANRMHHPRSSVMRLYIPRKCGGRGFLNAKTLHNREICSLREYFLKTEVGMHRDVVAVDKGLTPLSMAKENWCKPVILTTDDRKEIWQNKELHGRFYRALHEPDVDFLAYVSWLRFGDLFGETEGFVCAIMDEVILTNNYRRHIMKDGTVDVCRACHRPGESIRHIISGCSRLANGEYLHRHNQVARIIHQQLALKYKLVNSEVPYYKYAPDPVLENDHVTLYWDRSIITDRTIVANKPDIVVIDRLARRAMIVDVTIPHDENLVKAEKEKQIKYLDLAHEVVDMWNVDSAVIVPIVVTANGLMAESLNHHFSRLSLGGWIKGLIQKAVLLDTARIVRRFLSLES

SEQ ID NO: 29279 - protein, 1203 aa, Atethmia centrago
MLTRAASKRARPPPPDSSLSSASPPPVSSPTVNAVITPAAVVASSSSDEYFSPPTSPTPVCRQGRDRPPKSLGLRGHPAPSRVPAAGGCVQRMRWTQSMNENVMRAYYGSTEGGTNLTAYRVRMLSLFQELEPTVNVSAQRLSDQVRVIQRNRRLDDATLDRLRSEVLSNYIISTPAQTAVHTPIIDVIPPRSNHGVEEEDDRAATVSSQCNVRLRSALEDAFREYRSTPTELRPRLPRLPMHKKNRALMCALDSQLKVFFESSEDLVDTHSILYCAAVAACRLANVKFPNSDGATRPKPAVPAWQCRIERRIDKARVLIGKLYCFREGNTRPRVMRFVRRAFSGTGISPREYMSHITERIDFLKQKVCAWASRIRRYKRRVDRYTQNRMFQSDERWVYRAWERPKQNVTDVCRPDDATTTAFWRSIWSVPVCHVEADWMRDVERVCETIPEMEVVIITPSDIARAVRPLPNWKSPGPDGLHNFWLKWLTSSHTCLASQFQSSLESGSLPQFMTTGITHLLHKSGSPAEPKNYRPITCLSTVYKLLTSILRAKINTHIDSNSIMSASQNGCRNGSRGTKELLLIDMAISQQVRRSRKDLSTCWIDYKKAYDSVPHTWLMRVLELYKIDTTLRTFLESCMGQWRTVLRYPGCRQIQGNDEPVWIKRGIFQGDSLSPLWFCLALNPLSMQLEDSGLGYRLRRGGQIISHLLYMDDLKIFAPNKLQLMKLLKVTETFSSAIRMEFGVDKCALMHVKRGEIMESEGIQLSDSIHLRSLSSPESYKYLGMSEALGINVTDMKQSLKERFFGRLKKVLISLLSGGNKVRAFNSWVMPVLTYSFGILKWTQTELDALDRRVRTLLTANRMHHPRSSVMRLYIPRKCGGRGFLNAKTLHNREICSLREYFLKTEVGMHRDVVAVDKGLTPLSMAKENWCKPVVLTTDDRKEIWQSKELHGRFYRALHEPDADFLASVSWLRFGDLFGETEGFVCAIMDEVILTNNYRRHIMKDGTVDVCRACHRPGESIRHIISGCSRLANGEYLHRHNQVARIIHQQLALKYKLVKSEVPYYKYVPDPVLENDHVTLYWDRSIITDRTIVTNKPDIVVIDRLARRAMIVDVTIPHDDNLVKAEKEKQIKYLDLAHEVVDMWNVNSAVIVPIVVTANGLMARSLNHHLSRLALDGWIKGLIQKAVLLDTARIVRRFLSLEP

SEQ ID NO: 29280 - protein, 1057 aa, Xestia c-nigrum
MALHFLQANINHCTRAQDLLVLSMAQWSINVAVVAEPYFVPPRDNWAGDLDGLVAIIGATLVDVSRGHGWVAALVNGIVTVGAYFSPNRSLADFESFLVELGAVVGRSHPRPILLLGDLNAKSAAWGSPVTDPRGDALEEWAINNNNNNTRPKPAVPVWQRRIERRIDGARVLIGKLYCFREGNTRPRVMRFVRRAFSGTEISPQEYMSRVTERIDFLKRKVYAWASRIRRYKRRVDRYSQNRMFQCDERWVYRAWERPDQNVTDVCHPGDAATSSFWRSIWSVPVCHSEADWMRDVERVCEPIPEMAPVVITSLDIARAVRPLPNWKSPGPDGLHNFWLKWLSSSHTCLASQFQSSLESGSLPQFLTTGVTHLLHKSGSFTEPQNYRPITCLSTVYKLLTSILRTKINTHIDNNSIMSASQNGCRNGSRGTKELLLIDMAISQQVRRSRKDLSTCWIDYKKAYDSVPHSWLMRVLELYKIDATLCTFLKSCMGQWRTVLRYPGCRQIQGNDESVWIKRGIFQGDSLSPLWFCLALNPLSTLLENSGLGYQLRKDGQVISHLLYMDDLKLFAPNKLRLMELLKVTETFSNAIRMEFGVDKCAVMYVKRGEIMESEGLQLSDSIYLRSLSSSESYKYLGMSEALGINVTDMKQSLRERFFGRLKKVLNSLLSGGNKVRAFNGWVMPVLMYSFGILKWTQTELDALDRRVRTLLTENRMHHPRSSVMRLYIPRKCGGRGFLNAKTLHNREVCSLREYFLKAEVGMHRDVVAVDKGLTPLSMAKENWRKPVILTTDDRKKEWQGKVLHGRFYRALHGPDVDFLASVSWLRFGDLFGETEGFVCAIMDEVMLTNNYRKYIMKDGTVDVCRACHCPGESIRHIISGCSRLANGEYLHRHNQVARIIHQQLALKFKLVESEVPYYKYVPDPVLVKDHITLYWDQSIITDRTIVANKPDIVVIDRSARRVMIIDVTIPHDENLVKAEKEKQIKYLDLAHEVRDMWNMNSVIIVPIVVTANGLIAKSLDEHLSKLSLGGWIKGLIQKAVLLDTARIVRRFLSLQP

SEQ ID NO: 29281 - protein, 1200 aa, Xestia c-nigrum
MITRAASRRRARPPTPDSSLSSASPPPDPGSPVPPVAAVASSSSDEYFSPPTSPTPVRRAGRGRPPRSLGLRGQQAPSRVPATGGCVQRMRWTQSMNENVMRAYYGSTEGGINLTAYRDRMLSLFQDLEPAVNVSAQRLSDQVRVIQRSHRLDDTTLDRLRSEVLSNLITISPTQTAVHMSVVNATLPRSNPVVVEEDDRVALVSSQCNDRLRSALDNALREYRSISAELRPRLPRLPMHKKNRALVCALDSQLKNIFESSEDLVDTHSILFCGAVAACRLANVKFPNCDIAIRPKPAVPAWQRRIERRIDGARVLIGKLYCFREGNTRPRVMRFVRRAFSGTEISPQEYMSRVTERIDFLKQKVYAWASRIRRYKRRVDRYSQNRMFQSDERWVYRAWERPQQNMMDVCRPDDAATSSFWRSIWSVPVCHSEADWMRDVERVCEPIPTMEPILITPLDIARAVRPLPNWKSPGPDGLHNFWLKWFSSSHTCLASQFQSSLESGSLPQFLTTGVTHLLHKSGSPAEPKNYRPITCLSTVYKLLTSILRTKINTHVDSNSIMSASQNGCRNGSRGTKELLLIDMAISQQVRRSRKDLSICWIDYKKAYDSVPHSWLKRVLELYKIDATLRAFLESCMGQWRTVLRYPGCRQIQGNDEPVWIKRGIFQGDSLSPLWFCLALNPVSTLLENSGLGYRLRKDGQVISHLLYMDDLKLFAPNKLQLMELLKVTETFSSAIGMEFGVDKCAVMYVKRGKIMGSEGLQLSDSIHLRSLSSSESYKYLGMSEALGINVTDMKQSLRERFFGRLKKVLNSLLSGGNKVRAFNGWVMPVLMYSFGILKWTQTELDALDRRVRTLLTENRMHHPRSSVMRLYIPRKCGGRGFLNAKTLHNREVCSLREYFLKADVGMHRDVAAVDRGLTPLSMANENWRKPVVLTTDDRMKEWQGKELHGRFYRALHGPDVDFLASVSWLRFGDLFGETEGFVCAIMDEVMLTNNYRKYIMKDGTVDVCRACHLPGESIRHIISGCSRLANGEYLHRHNQVARIIHQQLALKFNLVELEVPYYKYVPDPVLVKDHVTLYWDQSIITDRTIVANKPDIVVIDRSARRVMIIDVTIPHDENLVKAEKEKQIKYLDLAHEVRDMWNMDSVIIVPIVVSANGLIAKSLDEHLSKLSLGGWIKGLIQKAVLLDTARIVRRFLSLQP

SEQ ID NO: 29282 - protein, 1199 aa, Xestia c-nigrum
MITRAALRRARFATPDSSLSSASPPPDPGSPVSPAVAVASSSSDEYFSPPTSPTPVRRAGRGRPPRSLGLRGQQAPSRVPATGGCVQRMRWTQSMNENVMRAYYGSTEGGTNLTVYRVRMLSMFQDLEPTVNASAQRLSDQVRVIQRNHLLDDAVLDRLRSEVLNNRIICTQAQTTVQASAIHATPPRSNPAVIEEDDRVATISSQCNDRLRSALDNALREYRSISAELRPRLPRLPMHKKNRALVCALDSQLKNIFESSEDLVDTHSILFCGAVAACRLANVKFPNCDIATRPKPAVPAWQRRIERRIDGARVLIGKLYCFREGNTRPRVMRFVRRAFSGTEISPQEYMSRVTERIDFLKQKVYAWASRIRRYKRRVDRYSQNRMFQSDERWVYRAWERPQQNMTDVCRPDDAATSSFWRSIWSVPVCHSEADWMRDIERVCEPIPTMEPILITPLDIARAVRPLPNWKSPGPDGLHNFWLKWFSSSHTCLASQFQSSLESGSLPQFLTTGVTHLLHKSGSPAEPKNYRPITCLSTVYKLLTSILRTKINTHVDSNSIMSASQNGCRNGSRGTKELLLIDMAISQQVRRARKDLSTCWIDYKKAYDSVPHSWLRRVLELYKIDATLRAFLESCMGQWRTVLRYPGCRQIQGNDEPVWIKRGIFQGDSLSPLWFCLALNPVSTLLENSGLRYRLRKDGQVISHLLYMDDLKLFAPNKLQLMELLKVTETFSSAIGMEFGVDKCAVMYVKRGKIMGSEGLQLSDSIHLRSLSSSESYKYLGMSEALGINVTDMKQSLKERFFGRLKKVLNSLLSGGNKVRAFNGWVMPVLMYSFGILKWTQTELDALDRRVRTLLTENRMHHPRSSVMRLYIPRKCGGRGFLNAKTLHNREVCSLREYFLKADVGMHRDVVAVDKGLTPLSMAKENWRKPVVLTTDDRKKEWQGKELHGRFYRALNGPDVDFLASVSWLRFGDLFGETEGFVCAIMDEVMLTNNYRKYIMKDGTVDVCRACHCPGESIRHIISGCSRLANGEYLHRHNQVARIIHQQLALKFKLVESEVPYYKYVPDPVLVKDHVTLYWDQSIITDRTIVANKPDIVVIDRSARRVMIIDVTIPHDENLVKAEKEKQMKYLDLAHEVRDMWNMNSVIIVPIVVTANGLIAKSLDEHLSKLSLGGWIKGLIQKAVLLDTARIVRRFLSLQP

SEQ ID NO: 29283 - protein, 1200 aa, Omphaloscelis lunosa
MLTRSAARLARPPPPDSSLSFASPLPVPSPTVSATTTPAAVVASSSSDEYFSPPTSPTPVRRQGRGRPPKSLGLRGQPAPSRVPAAGGCVQRMRWTQSMNENVMRAYYGSTEGGTNLTAYRVRMLSLFQELEPTVNVSVQRLSDQVRVIQRNHRLDDTALDRLRSEVLSNHIVSTRAQTAAQASNIDATPPRFNHSVEEEDDRVATVSSQCNNRLRSALENAFREYRYTPTELIPRLPRLPMHNKNRALVCALDSQLTNFFESSEDLIDTHSILYCAAVAACRLANVKFPNGDGAARPKPVVPAWQCRIERRIDGARVLIGKLYCFREGNTRPRVMRFVRRAFSGTGISPQDYMSRVTERIDFLKQKVCAWASRIRRYKRRVDRYTQNRMFQSDERWVYRAWERPEQNVTDVCRPDDAATSAFWRSIWSVPVCHTEAGWMRDVERVCETIPVMDAVFITPLDVARAVRPLPNWKSPGPDGLHNFWLKWLSSSHTRLASQFQSSLESGSLPQFLTTGVTHLLHKSGNPAEPKNYRPITCLSTVYKLLTSILRTKINTHIDSISIMSASQNGCRNGSHGTKELLLIDMAISQQVRRSRKDLSTCWIDYKKAYDSVPHTWLMRVLELYKVDTTLRTFLMSCMGQWRTVLRYPGCRQTQGNDEPVWIKRGIFQGDSLSPLWFCLALNPLSTLLEDSGLGYRLRRGGQVISHLLYMDDLKLFAPNKLRLMELLKVTETFSSAIRMEFGVDKCAVMHVKRGEIMESEGIQLSDSIHLRSLSSAENYRYLGMSESLGINVADMKQSLKERFFGRLNKVLISFLSGGNKVRAFNGWVMPVLMYSFGILKWTQTELDALDRRVRTLLTANRMHHPRSSVMRLYIPRKCGGRGFLNAKTLHNREVCSHREYFFKADVGMHRDVVAVDNRLTPLSMAKENWRKPVVLTKDDRKEVWQSKALHGRFFRALHEPDVDFLASVSWLSFGDLFGETEGFICAIMDEVIFTNNYRRHIMKDGTVDVCRACHRPGESIRHIISGCSRLANGEYLHRHNQVARIIHQQLALKYKLVDSEVPYYKYVPDPVLENDHVTLYWDRSIITDRTIVANKPDIVVIDRLARHAMIVDVTIPHDENLVKAEKEKQIKYLYLAHEVVDMWNVSSAIIVPIVVTANGLMAKSLDQHLSRLSLDGWIKRLIQKAVLLDTARIVRRFLS

SEQ ID NO: 29284 - protein, 1110 aa, Sesamia nonagrioides
MRWTQTMNENVMRAYYRATEGGTNLTAYRERMLSLFQALEPTVNVSAQRLSDQVRVIQRNHRLDDIALDRLRSEVLSNQITPTLTQTAAQASIIDAAPPRSNRVEEEDDRVETVSSQYNDRLRNALEDAFRDYRSTRTDLRPRLPRLPMHKKNRALVCALDSLLKNFFESSEDLIDTHSILYCAAVAACRLAKVKFPNCEEAARPKPAVPAWQRRIERRIDGTRVLIGKLYCFRDGNTRPRVMHFVRQAFSGTGISPREYINHLTERIDFLKQKVCAWASRIRRYKRRVDRYTQNRMFQSDERWVYRAWERPEQNEADVCRPDDATTSAFWRGIWSVSVCHTEVNWIQNVEQVCETIPEMDTILITPSDVAAAVRSLPNWKSPGPDGLHNFWLKWLSSSHTCLASQFQSSLESGSLPQFLTTGITHLLHKSGSTAEPKNYRPITCLPTVYKVLTSILKGKINKHLNSNSIMSVSQNGCKNGSRGTKELLLIDMAISQQVRRSRKDLSTCWIDYKKAYDSVPHTWLMRVLELYKVNATLRTFLRSCMGQWKTVLRYPGSRRIQGNDEPVWIKRGIFQGDSLSPLWFCLALNPLSTLLEDSGLGYRLKRGGQVISHLLYMDDLKLFAPNKLHLMKLLNVTETFSSGIKMEFGVDKCAVMHVKRGQIMESEGITLPDSIYLRSLSSFESYKYLGMSEALGINDADMKQSLKERFFGRLKKVLKSLLSGGNKVRAFNGWVMPVLMCSFGILKWTQTELDALDRRVRTLLTANRMHHPRSSVMRLYIPRKCGGRGFLNAKTLHNREVCSLREYFFKTVVGMHHDVVTVDKGLTPLSMAKENWHKPIILTTDDRKMIWQSKELHGRFYRALHEPDVDFLASVSWLRFSDLFGETEGFVCAIMDEVILTNNYRRYIMKDGTIDVCRACHHPGESIRHIISGCSRLANSEYLHRHNQVARIIHQQLALKYKLVDSEVPYYKYVPDPVLENDHVTLYWDRSIITDRTIVANKPDIVVIDRLARLAMIVDVTIPHDGNLVKAEKEKQIKYLDLAHEIVDMWNLNSAVIVPIVVSANGLIAKSLDQHLLRLSLGSWIKGLIQKAVLLDTARIVRRFLSLEP

SEQ ID NO: 29285 - protein, 1202 aa, Sesamia nonagrioides
MLTRAATRRARPPPPDSSLSSASPPPVSSATVNAVRTPAVVVALSSSDEYFSPPTSPTPVRRQGRGRPPKSLGLRGHPAPSRVPAAGGCVQRMRWTQTMNENVMRAYYGATEGGTNLTAYRERMLSLFQALEPTVNVSAQRLSDQVRVIQRNHRLDDIALDRLRSEVLSNQIAPTLTQTAAQASIIDAVPPRSNRVEEEDDRVETVSSQYNDRLRSALEDAFRDYRSTPTNLRPRLPRLPMHKKNRALVCALDSQLKNFFESSEDLIDTHSILYCAAVAACRLAKVKFPNCDEATRPKLAVPAWQRRIERRIDGTRVLIGKLYCFREGNTRPRVVRFVRQAFSGTGISPREYINNVTERIDFLKQKVCAWASRIRRYKKRVDRYTQNRMFQSDERWVYRAWERPEQNEADECRPDDATTSAFWRGIWSVSVCHTEGDWTQDVEQVCETIPEMDNILITPLDVATAVRSLPNWKSPGPDGLHNFWLKWLSSSHTCLASQFQSSLESGSLPQFLTTGITHLLHKSGSTAEPKNYRPITCLPTVYKVLTSILKAKINNHLDSNSIMSVSQNGCRSGSRGTKELLLIDMAISQQVRRSRKDLSTCWIDYKKAYDSVPHTWLMRVLELYKINATLRTFLRSCMGQWKTVLRYPGSRQIQGNDEPVWIKRGIFQGDSLSPLWFCLALNPLSTLLEDSGLGYRLKRGGQVISHLLYMDDLKLFAPNKLHLMKLLNVTETFSSGIKMEFGVDKCAVIHVKRGQIMESEGITLPDSIHLRSLSSFESYKYLGMSEALGINDADMKQSLKERFFGRLRKVLNSLLSGGNKVRAFNGWVMPVLMYSFGILKWTQTELDALDRRVRTLLTANRMHHPRSSVMRLYIPRKCGGRGFLNAKTLHNREVCSLREYFLKTVVGMHHDVVTVDKGLTPLSMAKENWHKPIILTTDDRRMVWQSKELHGRFYRALHGPDVDFLASVSWLRFGDLFGETEGFVCAIMDEVILTNNYRRYIMKDGTIDVCRACHHPGESIRHIISGCSRLANSEYLHRHNQVARIIHQQLALKYKLVDSEVPYYKYVPDPVLENDHVTLYWDRSIITDRTIVANKPDIVVIDRLARLAMIVDVTIPHDGNLVKAEKEKQMKYLDLAHEVVDMWNVNSAVIVPIVVSANGLIAKSLDQHLLRLSLGSWIKGLIQKAVLLDTARIVRRFLSLEP

SEQ ID NO: 29286 - protein, 1202 aa, Sesamia nonagrioides
MLTRAAKRRARPPPPDSSLSTASPPPVSSATVNAVRTPAVVVALSSSDEYFSPPTSPTPVRRQGRGRPPKSLGLRGHPAPSRVPAAGGCVQRMRWTQTMNENVMRAYYGATEGGTNLTAYRERMLSLFQALEPTVNVSAQRLSDQVRVIQRNHRLDDIALDGLRSEVLSNQIAPTLTQTAAQASIIDAVPPRSNRVEEEDDRVETVSSQYNDRLRSALEDAFRDYRSTPTNLRPRLPWLPMHKKNRALVCALDSQLKNFFESSEDLIDTHSILYCAAVAACRLAKVKFPNCEEATRPKLAVPAWQRRIERRIDGTRVLIGKLYCFRAGNTRPRVMRFVRQAFSGTGISPREYINNVTERIDFLKQKVCAWASRIRRYKKRVDRYTQNRMFQSDERWVYRAWERPEQNEADECRPDDATTSAFWRGIWSVSVCHTEGDWTQDVEQVCEAIPEMDNILITPLDVATAVRSLPNWKSPGPDGLHNFWLKWLSSSHTCLASQFQSSLESSSLPQFLTTGITHLLHKSGSTAEPKNYRPITCLPTVYKVLTSILKAKINNHLDSNSIMSVSQNGCRSGSRGTKELLLIDMAISQQVRRSRKDLSTCWIDYKKAYDSVPHTWLMRVLELYKINATLRTFLRSCMGQWKTVLRYPGSRQIQGNDEPVWIKRGIFQGDSLSPLWFCLALNPLSTLLEDSGLGYRLKRGGQVISHLLYMDDLKLFAPNKLHLMKLLNVTETFSSGIKMEFGVDKCAVMHVKRGQIMESEGITLPDSIHLRSLSSIESYKYLGMSEALGINDADMKQSLKERFFGRLKKVLNSLLSGGNKVRAFNGWVMPVLMYSFGILKWTQTELDALDRRVRTLLTANRMHHPRSSVMRLYIPRKCGGRGFLNAKTLHNREVFSLREYFLKTVVGMHHDVVTVDKGLTPLSMAKENWHKPIILTTDDRKIVWQSKELHGRFYRALHGPDVDFLASVSWLRFGDLFGETEGFVCAIMDEVILTNNYRRYIMKDGTIDVCRACHHPGESIRHIISGCSRLANSEYLHRHNQVARIIHQQLALKYKLVGSEVPYYKYVPDPVLENDHVTLYWDRSIITDRTIVANKPDIVVIDRLARLAMIVDVTIPHDGNLVKAEKEKQMKYLDLAHEVVDMWNVNSAVIVPIVVSANGLIAKSLDQHLLRLSLGSWIKGLIQKAVLLDTARIVRRFLSLEP

SEQ ID NO: 29287 - protein, 868 aa, Sesamia nonagrioides
MRFVRQAFSGTGISPREYINHLTERIDFLKQKVCAWASRIRRYKRRVDRYTQNRMFQSDERWVYRAWERPEQNEADVCRPDDATTSAFWRGIWSVSVCHTEGNWIRNVEQVCETIPEMDTILITPSDVAAAVRSLPNWKSPGPDGLHNFWLKWLSSSHTCLASQFQSSLESGSLPQFLTTGITHLLHKSGSTAEPKNYRPITCLPTVYKVLTSILKAKINKHLNSNSIMSVSQNGCKSGSRGTKELLLIDMAISQQVRRSRKDLSTCWIDYKKAYDSVPHTWLMRVLELYKINATLRTFLRSCMGQWKTALHYPGSRQIQGNDEPVWIKRGIFQGDSLSPVWFCLALNPLSTLLENSGLGYRLRRGGQVISHLLYMDDLKLFAPNELHLMKLLNVTETFSSGIRMEFGVDKCAVMHVKQGEIMESEGITLPDSIHLRSLSSVESYKYLGMSEALGINDADMKQSLKERFFGRLKKVLNSLLSGGNKVRAFNGWVMPVLMYSFGILKWTQTELDALDRRVRTLLTANRMHHPRSSVMRLYIPRKCGGRGFLNAKTLHNREVCSLREYFLQTVVGMHHDVVKVDKGLTPLSMAKENWHKPIILTTDDRRKVWQSKELHGRFYRALHEPDVDFLASVSWLRFSDLFGETEGSVCAIMDEVILTNNYRRYIMKDGTIDVCRACHHPGESIRHIISGCSRLANSEYLHRHNQVARIIHQQLALKYKLVDSEVPYYKYVPDPVLENDHVTLYWDRSIITDRTIVANKPDIVVIDRLARLAMIVDVTIPHDGNLVKAEKEKKMKYLDLAHEVVDMWNVNSAVIVPIVVSANGLIAKSLDQHLLRLALGSWIKGLIQKAVLLDTARIVRRFLSLEP

SEQ ID NO: 29288 - protein, 983 aa, Sesamia nonagrioides
MRSATTDPLQPTLDPGYHGYLCTKKNRALVCALDSQLKNFFESSEDLIDTHSILYCAAVAACRLAKVKFPNCEEATRPKLAVPAWQRRIERRIDGTRVLIGKLYCFREGNTRPRVMRFVRQAFSGTGISPREYINNVTERIDFLKQKVCAWASRIRRYKKRVDRYTQNRMFQSDERWVYRAWERPEQNEADECRPDDATTSAFWRGIWSVSVCHTEGDWTQDVEQVCEAIPEMDNILITPLDVATAVRSLPNWKSPGPDGLHNFWLKWLSSSHTCLASQFQSSLESGSLPQFLTTGITHLLHKSGSTAEPKNYRPITCLPTVYKVLTSILKAKINNHLDSNSIMSVSQNGCRSGSRGTKELLLIDMAISQQVRRSRKDLSTCWIDYKKAYDSVPHTWLMRVLELYKINATLRTFLKSCMGQWKTVLRYPGSRQIQGNDEPVWIKRGIFQGDSLSPLWFCLALNPLSTLLEDSGLGYRLKRGGQVISHLLYMDDLKLFAPNKLHLMKLLNVTETFSSGIKMEFGVDKCAVMHVKRGQIMESEGITLPDSIHLRSLSSIESYKYLGMSEALGINDADMKQSLKERFFGRLKKVLNSLLSGGNKVRAFNGWIMPVLMYSFGILKWTQTELDALDRRVRTLLTANRMHHPRSSVMRLYIPRKCGGRGFLNAKTLHNREVFSLREYFLKTVVGMHHDVVTVDKGLTPLSMAKENWHKPIILTTDDRKMVWQSKELHGRFYRALHGPDVDFLASVSWLRFGDLFGETEGFVCAIMDEVILTNNYRRYIMKDGTIDVCRACHHPGESIRHIISGCSRLANSEYLHRHNQVARIIHQQLALKYKLVDSEVPYYKYVPDPVHENDHVTLYWDRSIITDRTIVANKPDIVVIDRLARLAMIVDVTIPHDGNLVKAEKEKQMKYLDLAHEVVDMWNVNSAVIVPIVVSANGLIAKSLDQHLLRLSLGSWIKGLIQKAVLLDTARIVRRFLSLEP

SEQ ID NO: 29289 - protein, 1202 aa, Sesamia nonagrioides
MLTRQAARRARSPPPDSLPSSASPPSVPSANVSAVTTPAAVVASSSSDEYFSPPTSPRPVRRQGRGRPPKSLGLRGHPAPSRVSAAGGCVQRMRWTQTMNENVMRAYYRATEGGTNLTAYRERMLSLFQALEPTVNVSAQRLSDQVRVIQRNHRLDDIALDRLRSEVLSNQITPTLTQTAAQASIIDAAPPRSNRVEEEDDRVETVSSQYNDRLRNALEDAFRDYRSTPTDRRPRLPRLPMHKKNRALVCALDSLLKNFFESSEDLIDTHSILYCAAVAACRLAKVKFPNCEEAARPKPAVPAWQRRIERRIDGTRVLIGKLYCFRDGNTRPRVMRFVRQAFSGTGISPREYINHLTERIDFLKQKVCAWASRIRRYKRRVDRYTQNRMFQSDERWVYRAWERPELNEADVCRPDDATTSAFWRGIWSVSVCHTEGDWIQNVEQMCETIPEMDTILITTSDVATAVRSLPNWKSPGPDGLHNFWLKWLSSSHTCLASQFQSSLESGSLPQFLTTGITHLLHKSGSTAEPKNYRPITCLPTVYKVLTSILKAKINKHLNSNSIMSVSQNGCKSGSRGTKELLLIDMAISQQVRRSRKDLSTCWIDYKKAYDSVPHTWLMRVLELYKINATLRTFLRSCMGQWKTALHYPGSRQIQGNDEPVWIKRGIFQGDSLSPLWFCLALNPLSTLLENSGLGYRLRRGGQVISHLLYMDDLKLFAPNELHLMKLLNVTETFSSGIRMEFGVDKCAVMHVKQGEIMESEGITLPDSIHLRSLSSFESYKYLGMSEALGINDADMKQSLKERFFGRLKKVLNSLVSGGNKVRAFNGWVMPVLMYSFGILKWTQTELDALDRRVRTLLTANRMHHPRSSVMRLYIPRKCGGRGFLNAKTLHNREVCSLREYFLQTVVGMHHDVVTVDKGLTPLSMAKENWHKPIILTTDDRRKVWQSKELHGRFYRALHEPDVDFLASVSWLRFSDLFGETEGFVCAIMDEVILTNNYRRYIMKDGTIDVCRACHHPGESIRHIISGCSRLANSEYLHRHNQVARIIHQQLALKYKLVDSEVPYYKYVPDPVLENDHVTLYWDRSIITDRTIVANKPDIVVIDRLARLAMIVDVTIPHDGNLVKAEKEKKMKYLDLAHEVVDMWNVNSAVIVPIVVSANGLIAKSLDQHLLRLALGSWIKGLIQKAVLLDTARIVRRFLYLEP

SEQ ID NO: 29290 - protein, 1198 aa, Spodoptera frugiperda
MITRRAAAIQRTRPPSPTSSPSSAPPSSAPPPDAVVSPTVAGASSSSDEYFSPPTSPPPTRRRGRRRPPSGLGPRGPLASGGVPAPGGNVSRMKWTRSINENVMRAYFRATEGGRNLTAYRVRMLALFQELEPTINVSAQRLSDQVRVIQRNRMLDDIVLDRLQSEELRSRVIIPLQQNIEEPTQIESVVAPNDDRTTEVSTHKCSEELRRALEDAIREYRFISPSLRPRLPRLPMHKKNRALVCALDSELSNYFDSSEDLIDSHSILYCGAIAACRVANVKLLERENNSTRQKPAVPAWQCRIERRIDEARTLIAKLICFREGNTRPRVMRFVRRAFLGMDINPQDYVSHITERLDFLKQRIYAWANRIRRYKKRVERYTQNRTFQRDQRWVYRNWELNEQTRTDTCLPDADVTTSFWRSIWSAPVCHTEGDWIEKVRRKCELVPEMEQISITTEDVSNAAYPLANWKAPGPDGLHNFWLRWFTSSHSRLASQFQSALESGSLPQFFTTGLTHLLHKSGSTAEPKNYRPITCLPTIYKLLTSILREKLNKHIEDNNIMSTSQNGCRNRSRGTKELLLIDMSICQQVRRSHKNLSTCWIEYKKAYDSVPHTWLMRVLELYKVDTALRAFLMSCMSQWRTVLRYPGCRQICENDEPIRIERGIFQGDSLSPLWFCLALNPLSTLLEDSGLGYRLRRGGEIISHLLYMDDLKLFAPNNSHLMKLLNVTETFSNAIRMEFGVDKCAIMHVKRGEIVESDETRNSDTTNFRLLSSTETYKYLGMSEALGIDVAVMKQSLRERFFGRLKKVLNSLLSGGNKVRAYNGWVMPVLMYSFGILKWTQTELDALDRKVRSLLTEHRMHHPRSSVMRLYIPRKCGGRGFLNAKTLHNSEVCSLRKYFFKMEVGMHRDVVLVDKGLTPLSLANKDWREPIILSTKDRKNVWQSKELHGRYYRALHGPDTDFLASVSWLRFGNLFGETEGFVCAIMDEVMLTNNYRKYIIKDGTADICRACHRPGESIRHIISGCSHLANGEYLHKHNLVARIIHQQIALKYKLVESEVPYYKYLPDPVLENGDVTLYWDRTIITDRTIVANKPDIVVIDRPSRRTMIIDITIPHDENLVKAEKDKASKYLDLAHEVVDMWNVDSAIIVPIVVSANGLIAKSLDQHLSRLTLDGWIKSLMQKAVLLDTARIVRKFLSLEP

SEQ ID NO: 29291 - protein, 1247 aa, Mamestra configurata
MRHAWDTLIIYLVVSKLDPSTEREWKEYQGTLYKSNTKPPFVKLDELLKFLKDRADMLDIIKLNQSKHPHKKKSSKQINNKKQSTHSYVATNTGDKNNNNMTPVRRQGRGRPPRSLGSRGQPAPSRVPAAGGCVQRMRWTQSMNENVMRAYYGSTEGGTNLTAYRVRMLSLFQDLEPTVNVSAQRLSDQVRVIQHNCRLDDAALERLRSEVLSNLIISTPTQTVVQAPASGAITPRPNNGSDEVDDRVVTVSSQCNDRLRSALEDALREYRLTPTELRPRLPRLPMHKKNRALVCALDSLLQNIFESSESLVDTHSILFCGAVAACRIANVKFPSCDEAIRPKPAAPAWQCRIERRIDEARALIGKLYCFREGNTRPRVMRFVRRAFSGTGISPREYTFRVTERIDFLKQKVCAWANRIRRYKRRVDRYSQNRMFQSDERWVYRAWERPEQSVTDVYRPDDVATSTFWRSIWSVPICHAEGGWMRDVERVCEAIPQMEKITITTLDIAKAVRPLPNWKSPGPDGLHNFWLKWYSSSHALLASQFQSSLESGSLPQFLTTGITHLLHKTGSPAEPKNYRPITCLSTVYKLLTSILRAKINEHIESNSIISASQNGCRKGSRGTKELLLIDMAISQQVRRSRKDLSTCWIDYKKAYDSVPHTWLMKVLELYKIDATLRTFLESCMRQWKTVLRYPGCQPIQGSDEPVWIKRGIFQGDSLSPLWFCLALNPLSTLLEDSGLGYRLRRGGQAISHLLYMDDLKLFAPNNLRLMELLKVTETFSSAIRMEFGVDKCAVMHVKKGEIMESEGIQLSDSIQVRSLSSTETYKYLGMSEALGINGTDMKQSLRERFFGRLKKVLNSLLSGGNKVRAFNGWVMPVLMYTFGILKWTQTELDALDRRVRTLLTANRMHHPRSSVMRLYIPRKCGGRGFLNAKTLHNREMCSLREYFLKADVGMHRDVVAVDKGLTPLSMAKENWRTPVILTTDDRKEVWKGKELHGRFYRALHGSDVDFSASVAWLRFGDLFGETEGFVCAIMDEVILTNNYRRHIMKDGTVDMCRACHRPGESIRHIISGCSRLANGEYLHRHNQVARIIHQQLALKYKLVDSEVPYYKYVPDPVLENDHVTLYWDRSIITDRTIVANKPDIVVIDRLARRTMIIDVTIPHDENLVKAEKEKQIKYLDLAHEVVDMWNVESAVIVPIVITANGLMAKSFDDHLSKLALRGWIKGLIQKAVLLDTARIVRRFLSLEP

SEQ ID NO: 29292 - protein, 998 aa, Noctua janthe
MVSSQCNDRLRSALEDALREYRSTPTKLRPRLPRLPMHNKNRALVCALDSQLKNIFESSENLVDTHSILYCGAVAACRLANVKFPNYDVAIRPKPAVPTWQRRIECRIDEARVLIGKLHCFREGNTRPRVMRFVRRAFSGTGISPQEYMSRVTERIDFLKQKVYAWANRIRRYKRRVDRYSQNRIFQSDERWVYRAWERPEQNMTDVCRPDDAATSSFWRSIWSVPVCHTEADWMRDVERACEPIPEMEPILITSIDITRAVRPLPNWKSPGPDGLHNFWLKWLSSSHTCLASQFQSSLESGSLPQFLTTGVTHLLHKSGSPAEPKNYRPITCLSTVYKLLTSILRVKINTHIDKNFIMSASQNGCRNRSRGTKELLLIDMAISQQVRRSRKDLSTCWIDYKKAYDSVPHTWLMRVLELYKIDATLRAFLESCMGQWRTVLRYPGCRQIQGNDEPVWIKRGIFQGDSLSPLWFCLALNPLSTLLEDSGLGYRLRRGGQVISHLLYMDDLKLFAPNKLRLMELLKVTETFSNAIRMEFGVDKCAVMYVKRGEIMESEGIQLSDSIHLRSLSSSESYKYLGMSESLGINVTDMKQSLRERFFGRLNKVLNSLLSGGNKVRAFNGWVMPVLMYSFGVLKWTQTELDALDRRVRTLLTANRMHHPRSSVMRLYIPRKCGGRGFLNAKTLHNREICSLREYFLKTEVGMHRDVVAVDKGLTPLSMAKENWRKPVVLTTDDRKEVWQGKELHGRFYRALHGPDVDFLASVSWLRFGDLFGETEGFVCAIMDEVMLTNNYRKYIMKDGTVDVCRACHRPGESIRHIIFGCSRLANGEYLHRHNQVARIIHQQLALKYKLVESEVPYYKYVPDPVLEKDHVTLYWDRSIITDRTIVANKPDIVVIDRLARRVMIVDVTIPHDENLVKAEKEKQIKYLDLAHEVVDMWNVNSAIIVPIVVTANGLIAKSLDDHLSRLSLGGWIKGLIQKAVLLDTARIVRRFLSLEP

SEQ ID NO: 29293 - protein, 1199 aa, Noctua janthe
MITRAAYRRARLTTPDSSLSSASPPPDPGSPVSPAAAVASSSSDEYFSPPTSPTPVRRQGRGRPPKSLGLRGHPAPSRVPAAGGCVQRMRWTQTINENVMRAYYGSTEGGTNLTAYRVRMLSLFQVLEPIVNVSAQRLSDQVRVIQRNHMLDDAALDRLRSEVLSNRIVLTPAQTAVQASTIDATPPRSNPAVVEEDDRVAMVSSQCNDRLRSALEDALREYRSTPTKLRPRLPRLPMHNKNRALVCALDSQLKNIFESSENLVDTHSILYCGAVAACRLANVKFPNYDVAIRPKPAVPTWQRRIECRIDEARVLIGKLHCFREGNTRPRVMRFVRRAFSGTGISPQEYMSRVTERIDFLKQKVYAWANRIRRYKRRVDRYSQNRIFQSDERWVYRAWERPEQNMTDVCRPDDAATSSFWRSIWSVPVCHTEADWMRDVERACEPIPEMEPILITSIDIARAVRPLPNWKSPGPDGLHNFWLKWFSSSHTCLASQFQSSLESGSLPQFLTTGVTHLLHKSGSPAEPKNYRPITCLSTVYKLLTSILRVKINTHIDKNFIMSASQNGCRNRSRGTKELLLIDMAISQQVRRSRKDLSTCWIDYKKAYDSVPHTWLMRVLELYKIDATLRAFLESCMGQWRTVLRYPGCRQIQGNDEPVWIKRGIFQGDSLSPLWFCLALNPLSTLLEDSGLGYRLRRGGQVISHLLYMDDLKLFAPNKLRLMELLKVTETFSNAIRMEFGVDKCAVMYVKRGEIMESEGIQLSDPIHLRSLSSPESYKYLGMSESLGINVTDMKQSLRERFFGRLNKVLNSLLSGGNKVRAFNGWVMPVLMYSFGVLKWTQTELDALDRRVRTLLTANRMHHPRSSVMRLYIPRKCGGRGFLNAKTLHNREICSLREYFLKTEVGMHRDVVAVDKGLTPLSMAKENWRKPVVLTTDDRKEVWQGKELHGRFYRALHGPDVDFLASVSWLRFGDLFGETEGFVCAIMDEVMLTNNYRKYIMKDGTVDVCRACHHPGESIRHIISGCSRLANGEYLHRHNQVARIIHQQLALKYKLVESEVPYYKYVPDPVLEKDHVTLYWDRSIITDRTIVANKPDIVVIDRLARRVMIVDVTIPHDENLVKAEKEKQIKYLDLAHEVVDMWNVNSAIIVPIVVTANGLIAKSLDDHLSRLSLGGWIKGLIQKAVLLDTARIVRRFLSLEP

SEQ ID NO: 29294 - protein, 868 aa, Mythimna ferrago
MRFVRRAFLGTGISPQGYMSRVTERIDFLKQKVCAWASRIRRYKRRVDRYSQNRMFQSDERWVYRAWERPEHSVTDECRPDDLATITFWRNIWSVPVSHNEGGWMRDVERVCEAIPEMEKVTITPEDVARAVRPLPNWKSPGPDGLQNFWLKWYSSSHAPLASQFQSILESGSLPEYLTTGVTHLLHKTGNPVDPKNYRPITCMSTVYKLLTSILRAKINIHIENNQIISPSQNGCRNGSRGTKELLLIDMAISQQTRRSRKDLSTCWIDYKKAYDSVPHTWLMRVLELYKIDITLRTFLESCMRQWKTVLRYPGCRPIQGNDEPIWIKRGIFQGDSLSPLWFCLALNPLSTLLEDSGLGYRLRRGGQVISHLLYMDDLKLFAPSNLQLMELLKVTETFSSAIRMEFGVDKCAGMHVKRGEIMESEGIQLPDSIHLRSLSSTETYRYLGMSEALGINNADMKQSLKERFFGRLKKVLNSLLSGGNKMRAFNGWVMPVLMYSFGILKWTQTELDALDRRVRTLLTANRMHHPRSSVMRLYIPRKCGGRGFLNAKTLHNREVCSLREYFLKTDVGMHRDVVAVDKGLTPLSVAKEDWHKPVIMTTDNRMEIWKGKELHGRFFRALHEPDVDFLASVAWLRFSDLFGETEGFVCAIMDEVILTNNYRRYIMKDGTVDVCRACHRPGESIRHIISGCSRLANGEYLHRHNQVARIIHQQLALKYNLVDLEVPYYKYVPDPVLENDHVTLYWDRSIITDRTIVANKPDIVVIDRLARRAMIVDVTIPHDENLVKAEKEKQIKYLDLAHEVVDMWNVDSAIIVPIVVTVNGLIAKSFDDHLSKLSLRGWIKGLIQKAVLLDTARIVRRFLSLEP

SEQ ID NO: 29295 - protein, 1200 aa, Mythimna ferrago
MLTRTAARRARHPPPGSSLSSASPPPDPGSPVSPAAAVASSSSDEYFSPPTSPTPVRRPGRGRPPKSMGPRGQPAPSRVPAAGDCVQRMRWTQSMNENVMRAYYGSTEGGTNLTAYRERMLSLFQVLEPTVNVSAQRLSDQVRVIQRNHRLDDAALDRLRSEILSNQIVSTSTQTQTAATPTTNAISPRSDHNNDDADDRVVTVSSQCNERLRSALEDALCEYMSTPTELRPRLPRLPMHKKNRALVCALDSLLKNIFESSENLVDTHSILYCGAVAACRLAKIKFPNIDGTIRPKTAVPAWQCRIERRIDEARVLIGKLHCFREGNTRPRVMRFVRRAFLGTGISPQGYMSRVTECIDFLKQKVCAWASRIRRYKRRVDRYSQNRMFQSDERWVYRAWERPEHSVIDECRPDDLATITFWRNIWSVPVSHTEGDWMRDVERVCEAIPEMEKVTITPEDVAKAVRPLPNWKSPGPDGLQNFWLKWYSSSHAPLASQFQSILESGSLPEYLTTGVTHLLHKTGNPVDPKNYRPITCLSTVYKLLTSILRAKINIHIENNQIISPSQNGCRNGSRGTKELLLIDMAISQQTRRSRKDLSTCWIDYKKAYDSVPHTWLMRVLELYKIDITLRTFLESCMRQWKTVLRYPGCRPIQGNDEPIWIKWGIFQGDSLSPLWFCLALNPLSTLLEDSGLGYRLRRGGQVISHLLYMDDLKLFAPNKLRLMELLKVTENFSSAIRMEFGVDKCAVMHVKRGEIMESEGVQLSDSIHLRSLSSTETYKYLGMSEALGINVTDVKQSLKERFVGRLKKVLNSLLSGGNKVRAFNGWVMPVLMYSFGILKWTQTELDALDRRVRTLLTANRMHHPRSSVMRLYIPRKCGGRGFLNAKTLHNREVCSLREYFLKTDVGMHRDVVAVDKGLTPLSMAKENWRKPVVLTTDDRKEVWKGKELHGRFFRALHEPDVDFSASVAWLRFSNLFGETEGFVCAIMDEVILTNNYRRHIMKDGTIDVCRACHRPGESIRHIISGCSRLANGEYLHRHNQVARILHQQLALKYNLVDSEVPYYRYVPDPVLENDHVTLYWDRSIITDRTIVANKPDIVVIDRLARRAMIVDVTIPHDENLVKAEKEKQIKYLDLAHEVVDMWNVDSAIIVPIVVTANGLIAKSFDDHLSKLSLHGWIKGLIQKAVLLDMARIVRRFLSLEP

SEQ ID NO: 29296 - protein, 1200 aa, Mythimna ferrago
MLTRTAARRARHPPPGSSLSSASPPPDPGSPVSPAAAVASSSSDEYFSPPTSPTPVRRPGRGRPPKSMGPRGQPAPSRVLAAGGCVQRMRWTQSMNENVMRAYYGSTEGGTNLTAYRERMLSLFQVLEPTVNVSAQRLSDQVRVIQRNHRLDDAALDRLRSEILSNQIVSTSTQTQTAATPTTNAISPRSDHNNDDADDRVVTVSSQCNERLRSALEDALCEYMSTPTELRPRLPRLPMHKTNRALVCALDSLLKNIFESSENLVDTHSILYCGAVAACRLAKIKFPNIDGTIRPKTAVPAWQCRIERRIDEARVLIGKLHCFREGNTRPRVMRFVRRAFLGTGISPQGYMSRVTERIDFLKQKVCAWASRIRRYKRRVDRYSQNRMFQSDERWVYRAWERPEHGVIDECRPDDLATITFWRNIWSVPVSHTEGGWMRDVERVCEAIPEMEKVTITPEDVARAVRPLPNWKSPGPDGLQNFWLKWYSSSHAPLASQFQSILESGSLPEYLTTGVTHLLHKTGNPVDPKNYRPITCLSTVYKLLTSILRAKINIHIENNQIISPSQNGCRNGSRGTKELLLIDMAISQQTRRSRKDLSTCWIDYKKAYDSVPHTWLMRVLELYKIDITLRTFLESCMRQWKTVLRYPGCRPIQGNDEPIWIKRGIFQGDSLSPLWFCLALNPLSTLLEDSGLGYRLRRGGQVISHLLYMDDLKLFAPSNLQLMELLKVTVTFSSAIRMEFGVDKCAGMHVKRGEIMESEGIQLPDSIHLRSLSSTETYRYLGMSEALGINNADMKQSLKERFFGRLKKVLNSLLSGGNKVRAFNGWVMPVLMYSFGILKWTQTELDALDRRVRTLLTANRMHHPRSSVMRLYIPRKCGGRGFLNAKTLHNREVCSLREYFLKTDVGMHRDVVAVDKGLTPLSMAKEDWHKPVIMTTDNRKKIWKGKELHGRFFRALHEPDVDFLASVAWLRFSDLFGETEGFVCAIMDEVILTNNYRRYIMKDGTVDVCRACHRPGESIRHIISGCSRLANGEYLHRHNQVARIIHQQLALKYNLVDLEVPYYKYVPDPVLENDHVTLYWDRSIITDRTIVANKPDILVIDRLARRAMIVDITIPHDENLVKAEKEKQIKYLDLAHEIVAMWSVDSAIIVPIVVTANGLIAKSFDDHLSKLSLRGWIKGQIQKAVLLDTARIVRKFLSLEP

SEQ ID NO: 29297 - protein, 1111 aa, Ochropleura plecta
MRWTSSINANVMRAYYGSTEGGTNLTAYRVRMLSLFQDLEPTINVSAQRLSDQVRVIQRNHMLDDAALDRLRSEVLSNRIILTTPQTAMQASVIDGMQPRSDPAVVEEDDRVATVSSQCNERLRSALEDALRDYRSTPAELRPRLPRLPMHKKNRALVCALDSQLKNLFESSEDLVDTHSILYCGAVAVCRLANVKFPSCDVATRPKPSVPAWQCRIERRIDEARVLIGKLYCFREGNTRPRVMRFVRRAFSGTGISPQEYMSRTTERIDFLKQKVYAWANRIRRYKRRVDRYSQNRMFRSDERWVYRAWERPEQSVTDVCRPDDVATSSFWHSIWSVPVCHTEADWMRDVERVCETIPEMEPILITSLDIASAVRPLPNWKSPGPDGLHNFWLKWLSSSHTRLASQFQSCLESGSLPQFLTTGVTHLLYKSGSPAEPKNYRPITCLSTVYKVLTSILKAKINSHIDNNSIMSASQNGCRNGSRGTKELLLIDMAISQQVRRSRKDLSTCWIDYKKAYDSVPHAWLKRVLELYKIDATLRAFLESCMGQWRTVLRYPGCRQIQGNDEPVWIKRGIFQGDSLSPLWFCLALNPLSTLLEDSGLGYRLRRGGQVISHLLYMDDLKLFAPNKLRLMELLKVTETFSNAIRMEFGVDKCAVMYVKRGEIMESEGIQLSDSIHLRSLSSSESYKYLGMSEALGINVADVKQLLRERFFGRLKKVLKSLLSGGNKVRAFNSWVMPVIMYSFGILKWTQTELDALDRRVRTLLTGNRMHHPRSSVMRLYIPRKCGGRGFLNAKTLHNREVCSLREYFLKTDVGMHRDVVAVDKGLTPLSMAKENWRKPVVLTTDDRKVVWQGKELHGRFYKALHGPDVDFLASVSWLRFGDLFGETEGFVCAIMDEVMLTNNYRKYIMKDGTVDVCRACHRPGESIRHIISGCSRLANSEYLHRHNQVARIIHQQLALKYNLVESEVPYYKYVPDPVLEKDHVTLYWDRSIITDRTIVANKPDIVVIDRSARRVMIIDVTIPHDENLVKAEKEKQLKYLDLAHEVVDMWNVNSAIIVPIVVTANGLIAKSLDEHLSKLSLGGWIKGLIQKAVLLNTARIVRRFLSLEP

SEQ ID NO: 29298 - protein, 1206 aa, Ochropleura plecta
MLTRRRAQEQQALPPSPGSSLSSASQSPGRATRVSAVSPVAAVASSSSDEFFSPPSSPPPPTRQRRGRGRPPAGLGSRGQQAPIRVPAAGGNVSRMRWTSSINANVMRAYYGSTEGGTNLTAYRVRMLSLFQDLEPTINVSAQRLSDQVRVIQRNHMLDDAALDRLRSEVLSNRIILTTPQTAVQASVIDGMQPRSDPAVVEEDDRVATVSSQCNERLRSALEDALRDYRSTPAELRPRLPRLPMHKKNRALVCALDSQLKNLFESSEDLVDTHSILYCGAVAVCRLANVKFPSCDVATRPKPSVPAWQCRIEWRIDEARVLIGKLYCFREGNTRPRVMSFVRRAFSGTGISPQEYMSRTTERIDFLKQKVYAWANRIRRYKRRVDRYSQNRIFRSDERWVYRAWERPEQSVTDVCRPDDVATSSFWHSIWSVPVCHTEADWMRDVERVCETIPDMEPILITSLDIASAVRPLPNWKSPGPDGLHNFWLKWLTSSHTRLASQFQSCLESGSMPQFLTTGVTHLLYKSGSPAEPKNYRPITCLSTVYKLLTSILRAKINSHIDKNSIMSASQNGCRNGSRGTKELLLIDMAISQQVRRSRKDLSTCWIDYKKAYDSVPHTWLKRVLELYKIDATLRAFLESCMGQWRTVLRYPGCRQIQGNDEPVWIKRGIFQGDSLSPLWFCLALNPLSTLLEDSGLGYRLRRGGQVISHLLYMDDLKLFASNKLRLMELLKVTETFSNAIRMEFGVDKCAVMYVKRGEIMESEGIQLSDSIHLRSLSSSESYKYLGMSEALGINVADMKQLLRERFFGRLKKVLKSLLSGGNKVRAFNSWVMPVIMYSFGILKWTQTELDALDRRVRTLLTGNRMHHPRSSVMRLYIPRKCGGRGFLNAKTLHNREVCSLREYFLKTDVGMHRDVVAVDKGLTPLSMAKENWRKPVVLTTDDRKVVWQGKELHGRFYKALHGPDVDFLASVSWLRFGDLFGETEGFVCAIMDEVMLTNNYRKYIMKDGTVDVCRACHRPGESIRHIISGCSRLANSEYLHRHNQVARIIHQQLALKYNLVESEVPYYKYVPDPVLEKDHVTLYWDRSIITDRTIVANKPDIVVIDRSARRVMIIDVTIPHDENLVKAEKEKQLKYLDLAHEVVDMWNVNSAIIVPIVVTANGLIAKSLDEHLSKLSLGGWIKGLIQKAVLLDTARIVRRFLSLEP

SEQ ID NO: 29299 - protein, 1207 aa, Ochropleura plecta
MLTRRRAQEQQALPSSPGSSLSSASQPPGRATRVSAVSPVTAVASSSSDEFFSPPSSPPPPPTRQRRGRGRPPAGLGSRGQQAPIRVPAAGGNVSRMRWTSFINANVMRAYYGSTEGGTNLTAYRVRMLSLFQDLEPTINVSAQRLSDQVRVIQRNHLLDDAALDRLRSEVLSNRVILTTPQTAVQASAIDVTQPRSNPAVVEEDDRVATVSSQCNDRLRSALEDALRDYRSTPAELRPRLPRLPMHKKNRALVCALDSQLKNLFESSEDLVDTHSILYCGAVAVCRLANVKLPNCDVATRPKPSVPAWQCRIERRIDEARALIGKLYCFREGNTRPRVMRFVRRAFSGTGISPQEYMSRTTERIDFLKQKVYAWANRIQRYKRRVDRYSQNRMFRSDERWVYRAWERPEQSVTDVCRPDDVATSSFWHSIWSVRVCHTEAGWMRDVERVCETIPEMEPILITSLDIASAVRPLPNWKSPGPDGLHNFWLKWLSSSHTRLASQFQSCLESGSLPQFLTTGVTHLLYKSGSPAEPKNYRPITCLSTVYKLLTSILRAKINSHIVKNSIISASQNGCRNGSRGTKELLLIDMAISQQVRRSRKDLSTCWIDYKKAYDSVPHTWLKRVLELYKIDTTLRTFLESCMGQWRTVLRYPGCRQIQGNDEPVWIKRGIFQGDSLSPLWFCLALNPLSTLLEDSGLGYRLRRGGQVISHLFYMDDLKLFAPNKLRLMELLKVTETFSNAIRMEFGVDKCAVMYVKRGEIMESEGIHLSDSIHLRSLSSSESYKYLGMSEALGINVADMKQLLRERFFGRLKKVLKSLLSGGNKVRAFNSWVMPVLMYSFGILKWTQTELDALDRRVRTLLTANRMHHPRSSVMRLYIPRKCGGRGFLNAKTLHNREVCSLREYFLKTDVGMHRDVVAVDKGLTPLSMAKENWRKPVVLTTDYRKEVWQGKELHGRFYKALHGPDVDFLASVSWLRFGDLFGETEGFVCAIMDEVMLTNNYRKYIMKDGTVDVCRACHRPGESIRHIISGCSRLANGEYLHRHNQVARIIHQQLALKYNLVESEVPYYKYVPDPVLEKDHVTLYWDRSIITDRTIVANKPDIVVIDRSARRVMIIDVTIPHDENLVKAEKEKQLKYLDLAHEVVDMWNVNSAIIVPIVITANGLIAKSLDEHLSKLSLGGWIKGLIQKAVLLNTACIVRRFLSLEP

SEQ ID NO: 29300 - protein, 1199 aa, Hecatera dysodea
MLTRAAKRRARPPSPDPSLSSASPPPDNGSPVSPAAAVASSSSDEYFSPPTSPTPVRRQGRGRPPRSLGPRGQPAPSRVPAAGGCVQRMRWTQSINENVMRAYYGSTEGGTNLTAYRLRMLSLFQDLEPTVNVSAQRLSDQVRVIQRSHRLDDAALDRLRSEVLNNLIIPTPTQTMEQVPASSTLTPRSINVCDEVDDRVVTVSSQCNDRLRSALEDALREYRSTPTELRPRLPRLPMHKKNRALVCALDSLLKNIFESSENLIDTHSILYCGAVAACRIANVKFINSDGAIRPKSVAPAWQCRIERRIDEARVLIGKLYCFREGNTRPRVMRFVRRAFLGTQISPQEYMSRVTERIDFLKQKVCAWANRIRRYKRRVDRYSQNRMFQSDERWVYRAWERPEQSVTDACRPDDVATNTFWRSIWSVPVCHTEGGWMRDVERVCEAIPQMEKINITSLDVAKAVRPLPNWKSPGPDGLHNFWLKWYSSSHALLASQFQSSLESGSLPQFLTTGVTHLLHKTGSLAEPKNYRPITCLSTVYKLLTSILRVKINEHIETNSIMSYSQNGCRKGSRGTKELLLIDMAISQQVRRSRKDLSTCWIDYKKAYDSVPHTWLLKVLELYKLDATLRTFLESCMRQWKTVLRYPGCRPIQGSDEPVWIKRGIFQGDSLSPLWFCLALNPLSTLLEDSDLGYRLRRGGQAISHLLYMDDLKLFAPNKLRLMELLKVTETFSSDIRMEFGVDKCAVMHVKKGKIMESEGIQLSDSIQVRSLSSTETYKYLGMSEALGINVADMKQSLKERFFGRLKKVLNSLLSGGNKVRAFNGWVMPVLMYSFGILKWTQTELDALDRRVRTLLTANRMHHPRSSVMRLYIPRKCGGRGFLNAKTLHNREMCSLREYFLETDVGMHRDVVAVDKGLTPLSMANENWRKPVIQTTDDRKEVWKGKELHGRFYRALYGSDVDFSASVAWLRFGDLFGETEGFVCAIMDEVILTNNYRRHIMKDGTVDVCRACHRPGESIRHIISGCSRLANGEYLHRHNQVARIIHQQLALKYKLVDSEVPYYKYVPDPVLENGHVTLYWDRSIITDRTIVANKPDIVVIDRLARRTMIIDVTIPHDENLVKAEKEKQIKYLDLAHEVVDMWNVDSAVIVPIVITANGLMAKSFDDHLSKLALHGWLKGLIQKAVLLDTARIVRRFLSLEP

SEQ ID NO: 29301 - protein, 1018 aa, Hecatera dysodea
MNKRNNNNNNVCDEVDDRIVTVSSQCNDRLRSALEDALREYRSTPTELRPRLPRLPMHKRNRALVCALDSLLQNIFESSENLIDTHSILYCGAVAACRVANVKFTNSDEATRPKTAAPAWQCRIERRIDEARVLIGKLYCFREGNTPPRVMRFVRRAFSGTEISPQEYMSRVTERIDFLKQKVCAWANRIRRYKRRVDRYSQNRMFQSDERWVYRAWERPEQSVTDVCRPDDIVTSTFWRSIWSMPVRHTEGDWMRGVERVCEAIPQMEKISITPTDVATAVRPLPNWKSPGPDGLHNFWLKWYSSAHAVLASQFQSSLESGSLPQFLTTGITHLLHKTGSPAEPKNYRPITCLSTVYKLLTSILRVKINEHIETNSIMSSSQNGCRKGSRGTKELLLIDMAISQQVRRTRKDLSTCWIDYKKAYDSVPHTWLMRVLELYKIDATLRTFLESCMRQWKTVLCYPRCRPIQGNDEPVWIKRGIFQGDSLSPLWFCLALNPLSTLLEDSGLGYRLRRGGQAISHLLYMDDLKLFAHNKSRLMELLKVTETFSSAIRMEFGVDKCAVMHVKKGEIMESEGVQLSDSIQVRSLSSTETYKYLGMSEALGINVADMKQSLKERFFGRLKKVLNSLLSGGNKVRAFNGWVMPVLMYSFGILKWTQTELDALDRRVRTLLTANRMHHPRSSVMRLYIPRKCGGRGFLNAKTLHNREMCSLREYFLKVDVGMHRDVVAVDKGLTPLSMANENWRKPVIHTTDDRKEVWKGKELHGRFYRALYGSDVDFSASVAWLRFGDLFGETEGFVCAIMDEVILTNNYRRHIMKDGTVDVCRACHRPGESIRHIISGCSRLANGEYLHRHNQVARIIHQQLALKYKLVDSEVPYYKYVPDPVLENGHVTLYWDRSIITDRTIVANKPDIVVIDRLARRTMIIDVTIPHDENLVKAEKEKQIKYLDLAHEVVDMWNVDSAIIVPVVVTANGLMAKSFDDHLSKLALHGWLKGLIQKAVLLDTARIVRRFLSLEP

SEQ ID NO: 29302 - protein, 1202 aa, Mythimna impura
MIMLTRAATRRTRPSPLGSSLSSASPPPDLGSPVSPTAAVASSSSDEYFSPPTSPTPVRRPGRGRPPKSLGPRGQPAPSRVPATGGCVQRMKWTQSMNENVMRAYYGSTEGGTNLTAYRVRMLSLFQELEPTVNVTAQRLSDQVRVIQRNHRLDGAALDRLRSEVLSNRIISTPSQTQTEAPQATDAILPRSNHIDDEADDRVVTVSSQCNDRLRSALEDALREYRSTPIALRPRLPRLPMHKKNRALVCALDSLLENVFESSVNLADTHSILYCGAIAACRLANVKLPSCDGATRPKPAAPAWQCRIERRIDEARALIGKLYCFREGNTRPRVMRYVRRAFSGTEISPREYLSRVTERIDFLKQKVCAWANRIRRYKRRVDRYSQNRMFQSDERWVYRAWERPEQNVTDVTRPDAVATNTFWRNIWSVPVCHTEDGWMREVERVCEAIPEMEKIVISPIDVARAVRPLPNWKSPGPDGLQNFWLKWYSSSHALLASQFQSSLESGSLPQFLTTGVTHLLHKTGSTAEPKNYRPITCLSTVYKLLTSILRTKINKHIDSNSIMSASQNGCRNGSRGTKELLLIDMAISQQVRRSRKDLSTCWIDYKKAYDSVPHTWLMRVLELYKIDATLRTFLESCMGQWNTVLRYPGCRSIRRDDEPIWIKRGIFQGDSLSPLWFCLALNPLSTLLEESGLGYRLRRGGQVLSHLLYMDDLKLIAPNKLRLMELLKVTETFSSAIRMEFGVDKCAVMHVKRGEIMESEGIQLSDSIHFRSLSSTETYKYLGMSEALGINVADMKQSLKERFFGRLKKVLNSLLSGGNKVRAFNGWVMPVLMYSFGILKWTQTELDAVDRRVRTLLTANRMHHPRSSVMRLYIPRKCGGRGFLNAKTLHNREVCSLREYFHKTDVGMHRDVVAVDKGLTPLSMAKENWRKPVVLTTDDRKEIWKSKELHGRFYRALHESDIDFAASVAWLRFSNLFGETEGFICAIMDEVILTNNYRRYIMKDGTVDVCRACHRPGESIRHIISGCSRLANGEYLHRHNQVARIIHQQLALKYNLVDYEVPYYRYVPDPVLENDHVTLYWDRSIITDRTIVANKPDIVVIDRLARRVMIVDVTIPHDENLVKAEKEKQIKYLDLAHEVVDMWNVDSAVIVPIVVTANGLIAKSFDDHLSKLSLRGWIKGLIQKAVLLDTARIVRRFLSLEP

SEQ ID NO: 29303 - protein, 1200 aa, Mythimna impura
MLTRAAARRARHPPPGSPLSSASPPPDLGSPVSPAAAVASSSSDEYFSPPTSPTPVRRPGRGRPPRSLGSRGQPAPSRVPAAGGCVQRMRWTQSMNENVMRAYYGSTEGGTNLTAYRVRMLSLFQVLEPTVNVTTQRLSDQVRVIQRNHRLDDAALDRLRSEVLSNRIISTPIQTQTAAPRATDAILPQSNHVDDEADDRVVTVSSQCNDRLRSALEDALREYRPTPIDLRPRLPRLPMHKKNRALVCALDSLLENVFESSVNLADTHSILYCGAIAACRLANVKLPSCDGATRPKSVAPAWQCRIEKRIDGARALIGKLYCFREGNTRPRVMRYVRRAFSGTGISPPEYLSRVTERIDFLKQKVCAWANRIRRYKRRVDRYSQNRMFQSDERWVYRAWERPEQNVTDVTRPDAVATNAFWRNIWSVPVCHTEDGWMREVERVCEAIPEMEKVIISPTDVARAVRPLPNWKSPGPDGLQNFWLKWYSSSHALLASQFQSSLESGSLSQFLTTGVTHLLHKTGSTAEPKNYRPITCLSTVYKLLTSILRTKINQHIDNNSIMSASQNGCRNGSRGTKELLLIDMTISQQVRRSRKDLSTCWIDYKKAYDSVPHTWLMRVLELYKIDATLRTFLESCMGQWNTVLRYPGCRSIRRDDEPIWIKRGIFQGDSLSPLWFCLALNPLSTLLEESGLGYRLRRDGQVLSHLLYMDDLKLIAPNKLRLMELLKVTETFSSAIRMEFGVDKCAVMHVKRGEIMESEGIQLSDSIHLRSLSSTETYKYLGMSEALGINVADMKQSLKERFFGRLKKVLNSLLSGGNKVRAFNGWVMPVLMYSFGILKWTQTELDALDRRVRTLLTANRMHHPRSSVMRLYIPRKCGGRGFLNTKTLHNREVCSLREYFHKTDVGMHRDVVAVDKGLTPLSMAKENWRKPVVLTTDDRKEVWKSKELHGRFYRALHESDVDFAASVAWLRFSNLFGETEGFICAIMDEVILTNNYRRYIMKDGTVDVCRACHRPGESIRHIISGCSRLANGEYLHRHNQVARIIHQQLALKYNLVYSEVPYYRYVPDPVLENDHVTLYWDRSIITDRTIVANKPDIVVIDRLARRAMIVDVTIPHDENLVKAEKEKQIKYLDLAHEVVDMWNVDSAVIVPIVVTANGLIAKSFDDHLSKLSLRGWIKGLIQKAVLLDTARIVRRFLSLEP

SEQ ID NO: 29304 - protein, 1199 aa, Xestia xanthographa
MITRAAARRVHLPTPDSSLSSASPPPDPGSPVSPVAAVASSSSDEYFSPPTSPPPVRRAGRGRPPKSLGLRGQQTPSRVPATGGCVQRMKWTQSMNENVMRAYYGSTEGGTNLTAYRVRMLSLFQGLEPTVNVSAQRLSDQVRVIQRSHRLDDAALDRLRSEVLSNLIVLTPTQTAVQVSAIDATPPRLNPVVVEEDDGVATVSSQCNDRLRSALENALHEYRSTPTELRPRLPRLPMHKTNRALVCALDSQLKNIFESSENLVDTHSILFCGAVAACRLANVKFPNCDVANRPKPAVPAWQRRIERRIGGARVLIGKLYCFREGNTRPRVMRFVRRAFSGTEISPQEYMSRVTERIDFLKQKVYAWANRIRRYKRRVDRYSQNRMFQSDERWVYRAWERPEQNMTDVCRPDDAATSSFWRSIWSVPVSHTEADWMRDVERVCEPIPEMEPIFITPLDVARAVRPLPNWKSPGPDGLHNFWLKWFSSSHTCLASQFQSSLESGSLPQFLTTGVTHLLHKSGSPAEPKNYRPITCLSTIYKLLTSILRVKINTHIDKNSIMSASQNGCRNGSRGTKELLLIDMAISQQVRRSRKDLSTCWIDYKKAYDSVPHTWLMRVLELYKIDTTLRTFLESCMGQWRTVLRYPGCRQIQGSDDPVWIKRGIFQGDSLSPLWFCLALNPLSTLLENSGLGCRLRKDGQVISHLLYMDDLKLFASNKLRLMELLKVTETFSNAIRMEFGVDKCAVMYVKRGEIMESEGLQFSDSIQLRSLSSSETYKYLGMSEALGINITDMKQSLKERFFSRLRKVLNSLLSGGNKVRAFNGWVMPVLMYSFGILKWTQTELDALDRRVRTLLTESRMHHPRSSVMRLYIPRKCGGRGFLNAKTLHNREVCSLREYFLKAEVGMHRDVVAVDKGLTPLSMAKENWHKPEVLTTDDRKEVWQGKELHGRFYRALHGPDVDFLASVSWLRFGDLFGETEGFVCAIMDEVMLTNNYRKYIMKDGTVDMCRACHLPGESIRHIISGCSRLANGEYLHRHNQVARIIHQQLALKYKLVESEVPYYKYVPDPVLESDHVTLYWDRSIITDRTIVANKPDIVMIDRSARRVMIIDVTIPHDENLVKAEKEKQIKYLDLAHEVRDMWNMNSVIIVPIVVTANGLIAKSFDDHLSKLSLGGWIKGLIQKAVLLDTARIVRRFLSLQP

SEQ ID NO: 29305 - protein, 920 aa, Xestia xanthographa
MSFSKFPNCDVANRPKPAVPAWQRRIERRIGGARVLIGKLYCFREGNTRPRVMRFVRRAFSGTEISPQEYMSRVTERIDFLKQKVYAWANRIRRYKRRVDRYSQNRMFQSDERWVYRAWERPEQNMTDVCRPDDAATSSFWRSIWSVPVCHTEADWMRDVERVCEPIPEMEPIFITPLDVARAVRPLPNWKSPGPEGLHNFWLKWFSSSHTCLASQFQSSLESGSLPQFLTTGVTHLLHKSGSPAEPKNYRPITCLSTIYKLLTSILRVKINTHIDKNSIMSASQNGCRNGSRGTKELLLIDMAISQQVRRSRKDLSTCWIDYKKAYDSVPHTWLMRVLELYKIDTTLRTFLESCMGQWRTVLRYPGCRQIQGSDDPVWIKRGIFQGDSLSPLWFCLALNPLSTLLENSGLGCRLRKDGQVISHLLYMDDLKLFASNKLRLMELLKVTETFSNAIRMEFGVDKCAVMYVKRGEIMESEGLQLSDSIQLRSLSSSETYKYLGMSEALGINITDMKQSLKERFFSRLRKVLNSLLSGGNKVRAFNGWVMPVLMYSFGILKWTQTELDALDRRVRTLLTESRMHHPRSSVMRLYIPRKCGGRGFLNAKTLHNREVCSLREYFLKAEVGMHRDVVAVDKGLTPLSMAKENWHKPEVLTTDDRKEVWQGKELHGRFYRALHGPDVDFLASVSWLRFGDLFGETEGFVCAIMDEVMLTNNYRKYIMKDGTVDMCRACHLPGESIRHIISGCSRLANGEYLHRHNQVARIIHQQLALKYKLVESEVPYYKYVPDPVLESDHVTLYWDRSIITDRTIVANKPDIVMIDRSARRVMIIDVTIPHDENLVKAEKEKQIKYLDLAHEVRDMWNMNSVIIVPIVVTANGLIAKSFDDHLSKLSLGGWIKGLIQKAVLLDTARIVRRFLSLQP

SEQ ID NO: 29306 - protein, 1111 aa, Xestia xanthographa
MKWTQSMNENVMRAYYGSTEGGTNLTAYRVRMLSLFQGLEPTVNVSAQRLSDQVRVIQRSHRLDDAALDRLRSEVLSNLIVLTPTQTAVQVSAIDATPPRLNPVVVEEDDGVATVSSQCNDRLRSALENALHEYRSTPTELRPRLPRLPMHKKNRALVCALDSQLKNIFESSENLVDTHSILFCGAVAACRLANVKFPNCDVANRPKPAVPAWQRRIERRVDGARVLIGKLYCFREGNTRPRVMRFVRRAFSGTEISPQEYMSRVTERIDFLKQKVYAWANRIRRYKRRVDRYSQNRMFQSDERWVYRAWERPEQNMTDVCRPDDAATSSFWRSIWSVPVCHTEADWMRDVERVCEPIPEMEPIFITPLDVARAVRPLPNWKSPGPDGLHNFWLKWFSSSHTCLASQFQSSLESGSLPQFLTTGVTHLLHKSGSPAEPKNYRPITCLSTIYKLLTSILRVKINTHIDKNSIMSASQNGCRNGSRGTKELLLIDMAISQQVRRSRKDLSTCWIDYKKAYDSVPHTWLMRVLELYKIDTTLRTFLESCMGQWRTVLRYPGCRQIQGSDDPVWIKRGIFQGDSLSPLWFCLALNPLSTLLENSGLGCRLRKDGQVISHLLYMDDLKLFASNKLRLMELLKVTETFSNAIRMEFGVDKCAVMYVKRGEIMESEGLQLSDSIQLRSLSSSQTYKYLGMSEALGINITDMKQSLKERFFSRLRKVLNSLLSGGNKVRAFNGWVMPVLMYSFGILKWTQTELDALDRRVRTLLTESRMHHPRSSVMRLYIPRKCGGRGFLNAKTLHNREVCSLREYFLKAEVGMHRDVVAVDKGLTPLSMAKENWHKPEVLTTDDRKEVWQGKELHGRFYRALHGPDVDFLASVSWLRFGDLFGETEGFVCAIMDEVMLTNNYRKYIMKDGTVDMCRACHLPGESIRHIISGCSRLANGEYLHRHNQVARIIHQQLALKYKLVESEVPYYKYVPDPVLESDHVTLYWDRSIITDRTIVANKPDIVMIDRSARRVMIIDVTIPHDENLVKAEKEKQIKYLDLAHEVRDMWNMNSVIIVPIVVTANGLIAKSFDDHLSKLSLGGWIKGLIQKAVLLDTARIVRRFLSLQP

SEQ ID NO: 29307 - protein, 1202 aa, Cosmia trapezina
MLTRSAARARPPPPDSSLSSASPPPVSSPTVSAVTTPAAVVASSSSDEYFSPPTSPIPVRRQGRGRPPKSLGLGGQPAPSRVPAAGGCVQRMRWTQSMNENVMRAYYGSTEGGTNLTAYRVRMLSLFQELEPTVNVSAQRLSDQVRVIQRNHRLDDAALDRLRSEILSDRIVSTQAQTAVQDSIIDALPPRSNHVVEEEDDRVATVSSQSNDRLRSALEDAFREYRSTPTELRPRLPRLPMHKKNRALVCALDSHLKDFFESSEDLVDTHSILYCAAVAACRLANVKFPNCDGANRSKPAVPAWQCRIERRIDGARVLIGKLYCFREGNTRPRVMRFVRRAFSGTGISPPEYMSRVTERIDFLKQKVCAWASRIRRYKRRVDRYTQNCMFQSDERWVYRAWERPEQNVTDVCRPDDAATSAFWRSIWSVPVCHAEAGWMQDVERVCETIPEMETVLITPLDVARAVRPFPNWKSPGPDGLHNFWLKWLTSSHTCLASQFQSSLESGSLPQFLTTGVTHLLHKSGSPVEPKNYRPITCLSTVYKLLTSILRAKINTHIASNSIISASQNGCRTGSRGTKELLLIDMAISQQVRRSRKDLSTCWIDYKKAYDSVPHTWLLKVLELYKIDATLRTFLESCMGQWRTVLCYPGCRQIRGNDEPVWIKRGIFQGDSLSPLWFCLALNPLSTLLEDSGLGYRLRRGGQVISHLLYMDDLKLFAPNELRLMELLKVTETFSGAIRMEFGVDKCAVMHVKRGEIMESEGIQLTDSIYLRSLSSSETYKYLGMSEALGINVAGVKQSLKERFFGRLKKVLISLLSGGNKVRAFNGWVMPVLMYSFGILKWTQTELDALDRRVRTLLTANRMHHPRSSVMRLYIPRKCGGRGFLNAKTLHNREVCSLREYFLKADVGMHRDVVAVDKGLTPLSMAKENWRKPVLLTTDDRRKVWQSKELHGRFYRALHEPGVDFLASVSWLRFSDLFGETEGFVCAIMDEVILTNNYRRYIMKDGTVDVCRACHRPGESIRHIISGCSRLANGEYLHRHNQVARIIHQQLALKYKLVDSEVPYYKYVPDPVLENDHVTLYWDRSIITDRTIVANKPDIVVIDRLARRAMIVDVTIPHDGNLVKAEKEKEIKYLDLAHEVVDMWNVDSAVIVPIVVTANGLIADSLDQHLSRLSLGGWIKGQIQKAVLLDTARIVRRFLSLQP

SEQ ID NO: 29308 - protein, 962 aa, Cosmia trapezina
MHKKNRALVCALDSHLKDFFESSEDLVDTHSILYCAAVAACRLANVKFPNCDGANRSKPAVPAWQCRIERRIDGARVLIGKLYCFREGNTRPRVMRFVRRAFSGTGISPPEYMSRVTERIDFLKQKVCAWASRIRRYKRRVDRYTQNRMFQSDERWVYRAWERPEQNVTDVCRPDDAATSAFWRSIWSVPVCHAEAGWMQDVERVCETIPEMETVLITPLDVARAVRPFPNWKSPGPDGLHNFWLKWLISSHTCLASQFQSSLESGSLPQFLTTGVTHLLHKSGSPVEPKNYRPITCLSTVYKLLTSILRAKINTHIASNSIISASQNGCRTGSRGTKELLLIDMAISQQVRRSRKDLSTCWIDYKKAYDSVPHTWLLKVLELYKIDATLRTFLESCMGQWRTVLRYPGCRQIRGNDEPVWIKRGIFQGDSLSPLWFCLALNPLSTLLEDSGLGYRLRRGGQVISHLLYMDDLKLFAPNELRLMELLKVTETFSGAIRMEFGVDKCAVMHVKRGEIMESEGIQLTDSIYLRSLSSSETYKYLGMSEALGINVAGVKQSLKERFFGRLKKVLISLLSGGNKVRAFNGWVMPVLMYSFGILKWTQTELDALDRRVRTLLTANRMHHPRSSVMRLYIPRKCGGRGFLNAKTLHNREVCSLREYFLKADVGMHRDVVAVDKGLTPLSMAKENWRKPVLLTTDDRRKVWQSKELHGRFYRALHEPGVDFLASVSWLRFSDLFGETEGFVCAIMDEVILTNNYRRYIMKDGTVDVCRACHRPGESIRHIISGCSRLANGEYLHRHNQVARIIHQQLALKYKLVDSEVPYYKYVPDPVLENDHVTLYWDRSIITDRTIVANKPDIVVIDRLARRAMIVDVTIPHDGNLVKAEKEKEIKYLDLAHEVVDMWNVDSAVIVPIVVTANGLIADSLDQHLSRLSLGGWIKGQIQKAVLLDTARIVRRFLSLQP

SEQ ID NO: 29309 - protein, 1080 aa, Mamestra brassicae
MLSLFQDLEPTVNVSAQRLSDQVRVIQHNCRLDDAALERLRSEVLSNLIISTPTQTVVQAPASGAITPRPNNGSDEVDDRVVTVSSQCNDRLRSALEDALREYRLTPTELRPRLPRLPMHKKNRALVCALDSLLQNIFESSESLVDTHSILFCGAVAACRIANVKFPSCDEAIRPKPAAPAWQCRIERRIDEARALIGKLYCFREGNTRPRVMRFVRRAFSGTGISPREYTFRVTERIDFLKQKVCAWANRIRRYKRRVDRYSQNRMFQSDERWVYRVWERPEQSVTDVYRPDDVATSTFWRSIWSVPICHAEGGWMRDVERVCEAIPQMEKITITTLDVAKAVRPLPNWKSPGPDGLHNFWLKWYSSSHALLASQFQSSLESGSLPQFLTTGITHLLHKTGSPAEPKNYRPITCLSTVYKLLTSILRAKINEHIESNSIMSASQNGCRKGSRGTKELLLIDMAISQQVRRSRKDLSTCWIDYKKAYDSVPHTWLMKVLELYKIDATLRTFLESCMRQWKTVLRYPGCQPIQGSDEPVWIKRGIFQGDSLSPLWFCLALNPLSTLLEDSGLGYRLRRGGQAISHLLYMDDLKLFAPNNLRLMELLKVTETFSSAIRMEFGVDKCAVMHVKKGEIMESEGIQLSDSIQVRSLSSTESYKYLGMSQALGINGTDMKQSLRERFFGRLKKVLNSLLSGGNKVRAFNGWVMPVLMYTFGILKWTQTELDALDRRVRTLLTANRMHHPRSSVMRLYIPRKCGGRGFLNAKTLHNREMCSLREYFLKADVGMHQDVVAVDKGLTPLSMAKENWRKPVILTTDDRKEVWKGKELHGRFYRALYGSDVDFSASVAWLRFGDLFGETEGFVCAIMDEVILTNNYRKHIMKDGTVDVCRACHRPGESIRHIISGCSRLANGEYLHRHNQVARIIHQQLALKYKLVDSEVPYYKYVPDPVLENDHVTLYWDRSIITDRTIVANKPDIVVIDRLARRTMIIDVTIPHDENLVKAEKEKQIKYLDLAHEVVDMWNVDSAVIVPIVVTANGLMAKSFDDHLSKLALRGWIKGLIQKAVLLDTARIVRRFLSLEP

SEQ ID NO: 29310 - protein, 1202 aa, Noctua fimbriata
MITRAAYRRARLLPPDPSLSSASPPPESSPIVSAVTPAVAVASSSSDEYFSPPTSPTPVRRQGRGRPPRSLGLRGHPAPSRVPAAGGCVQRMRWTHSINENVMRAYYGSTEGGTNLTAYRVGMLSLFQVLEPTVNVSAQRLSDQVRVIQRNHMLDDAVLDRLRSEVLSNRIVLTPAQTAVQASVIDATPPRFNPAVVEEDDRVAVVSSQCNDRLRSALEDALREYRSTPTELRPRLPRLPMHNKNRALVCALDSQLENIFESSENLVDTHSILYCGAVAACRLANVKFPNCDVVTRPKPAVPAWQRRIERRIDGARVLIGKLHCFREGNTRPRVMRFVRRAFSGTGISPQEYMSRVTERIDFLKQKVYAWANRIRRYKRRVDRYSQNRMFQSDERWVYRAWERPELNMTDVCRPDDAATSSFWRSIWSVPVCHTEADWMRDVERVCEPIPEMEPILITPLDIARAVRPLPNWKSPGPDGLHNFWLKWLSSSHTCLASQFQSSLESGSLPQFLTTGVTHLLHKSGSPAEPKNYRPITCLSTVYKLLTSILRAKINTHIDKNSIMSASQNGCRNGSRGTKELLLIDMAISQQVRRSRKDLSTCWIDYKKAYDSVPHTWLMRVLELYKIDATLRAFLESCMGQWRTVLRYPGCRQIQGNDEPVWIKRGIFQGDSLSPLWFCLALNPLSTLLEDSGLGYRLRRGGQVISHLLYMDDLKLFAPNKLRLMELLKVTETFSSAIRMEFGVDKCAVMYVKQGEIMESEGIQLSDSIHLRTLSSTESYKYLGMSEALGINVTDMKQSLKERFFGRLNKVLHSLLSGGNKVRAFNGWVMPVLMYSFGVLKWTQTELDALDRRVRTLLTANRMHHPRSSVMRLYIPRKCGGRGFLNAKSLHNREMCSLREYFLKVEVGMHRDVVAVDKGLTPLSMAKENWRKPEVLTTDDRKEVWQGKELHGRFYRALHRPDVDFLASVSWLRFGDLFGETEGFVCAIMDEVMLTNNYRKYIMKDGTVDVCRACHRPGESIRHIISGCSRLANGEYLHRHNQVARIIHQQLALKYKLVESEVPYYKYVPDPVLEKDHVTLYWDQSIITDRTIVANKPDIVVIDRSARRVMIVDVTIPHDENLVKAEKEKQIKYLDLAHEVVDMWNVNSAIIVPIVVTANGLIAKSLDDHLSKLSLGGWIKGLIQKAVLLDTARIVRRFLSLEP

SEQ ID NO: 29311 - protein, 868 aa, Noctua fimbriata
MRFVRRAFSGTGISPQEYMSRVTERIDFLKQKVYAWANRIRRYKRRVDRYSQNRMFQSDERWVYRAWERPELNMTDVCRPDDAATSSFWRSIWSVPVCHTEADWMRDVERVCEPIPEMEPILITPLDIARAVRPLPNWKSPGPDGLHNFWLKWLSSSHTCLASQFQSSLESGSLPQFLTTGVTHLLHKSGSPAEPKNYRPITCLSTVYKLLTSILRAKINTHIDKNSIMSASQNGCRNGSRGTKELLLIDMAISQQVRRSRKDLSTCWIDYKKAYDSVPHTWLMRVLELYKIDATLRAFLESCMGQWRTVLRYPGCRQIQGNDEPVWIKRGIFQGDSLSPLWFCLALNPLSTLLEDSGLGYRLRRGGQVISHLLYMDDLKLFAPNKLQLMELLKVTETFSSAIRMEFGVDKCAVMYVKRGEIMESEGIQLSDFIHLRSLSSSESYKYLGMSEALGINVTDMKQSLKERFFGRLNKVLHSLLSGGNKVRAFNGWVMPVLMYSFGVLKWTQTELDALDRRVRTLLTANRMHHPRSSVMRLYIPRKCGGRGFLNAKSLHNREMCSLREYFLKVEVGMHRDVVAVDKGLTPLSMAKENWRKPEVLSTDDRKEVWQGKELHGRFYRALHGPDVDFLASVSWLRFGDLFGETEGFVCAIMDEVMLTNNYRKYIMKDGTVDVCRACHRPGESIRHIISGCSRLANGEYLHRHNQVARIIHQQLALKYKLVESEVPYYKYVPDPVLEKNHVTLYWDQSIITDRTIVANKPDIVVIDRSARRVMIVDVTIPHDENLVKAEKEKQIKYLDLAHEVVDMWHVNSAIIVPIVVTANGLIAKSLDDHLSKLSLGGWIKGLIQKAVLLDTARIVRRFLSLEP

SEQ ID NO: 29312 - protein, 1202 aa, Noctua fimbriata
MLTRAAARRARLPPPDPSLSSASPPPESSHIVSAVTPAVAVASSSSDEYFSPPTSPTPVRRQGRGRPPRSLGLRGHPAPSRVPAAGGCVQRMRWTHSINENVMRAYYGSTEGVTNLTAYRVGMLSLFQVLEPTVNVSAQRLSDQVRVIQRNHMLDDAVLDRLRSEVLSNRIVLTPAQTAVQASVIDATPPRFNPAVVEEDDRVAVVSSQCNDRLRSALEDALREYRSTPTELRPRLPRLPMHNKNRALVCALDSQLENIFESSENLVDTHSILYCGAVAACRLANVKFPNCDVATRPKPAVPAWQRRIERRIDGARVLIGKLHCFREGNTRPRVMRFVRRAFSGTGISPQEYMSRATERIDFLKQKVYAWANRIRRYKRRVDRYSQNRMFQSDERWVYRAWERPELNMTDVCRPDDAATSSFWRSIWSVPVCHTEADWMCDVERVCEPIPEMEPILITPLDIARAVRPLPNWKSPGPDGLHNFWLKWLSSSHTCLASQFQSSLESGSLPQFLTTGVTHLLHKSGSPAEPKNYRPITCLSTVYKLLTSILRAKINTHIDKNSIMSASQNGCRNGARGTKELLLIDMAISQQVRRSRKDLSTCWIDYKKAYDSVPHTWLMRVLELYKIDTTLRAFLESCMGQWRTVLRYPGCRQIQGNDEPVWIKRGIFQGDSLSPLWFCLALNPLSTLLEDSGLGYRLRRGGQVISHLLYMDDLKLFAPNELRLMELLKVTETFSSAIRMEFGVDKCAVMYVKQGEIMESEGIQLSDSKHLRTLSSTESYKYLGMSEALGINVTDMKQSLKERFFGRLNKVLHSLLSGGNKVRAFNGWVMPVLMYSFGVLKWTQTELDALDRRVRTLLTANRMHHPRSSVMRLYIPRKCGGRGFLNAKSLHNREMCSLREYFLKVEVGMHRDVVAVDKGLTPLSMAKENWRKPEVLTTDDRKEVWQGKELHGRFYRALHGPDVDFLASVSWLRFGDLFGETEGFVCAIMDEVMLTNNYRKYIMKDGTVDVCRACHRPGESIRHIISGCSRLANGEYLHRHNQVARIIHQQLALKNKLVESEVPYYKYVPDPVLEKDHVTLYWDQSIITDRTIVANKPDIVVIDRSARRVMIVDVTIPHDENLVKAEKEKQIKYLDLAHEVVDMWNVNSAIIVPIVVTANGLIAKSLDDHLSRLSLGGWIKGLIQKAVLLDTARIVRRFLSLEP

SEQ ID NO: 29313 - protein, 1202 aa, Noctua fimbriata
MITRAAYRRARLPPPDPSLSSASPPPESSPIVSAVTPAVAVASSSSDEYFSPPTSPTPVRRQGRGRPPRSLGLRGHPAPSRVPAAGGCVQRMRWTHSINENVMRAYYGSTEGGTNLTAYRVGMLSLFQVLEPTVNVSAQRLSDQVRVIQRNHMLDDAVLDRLRSEVLSNRIVLTPAQTAVQASVIDATPPRFNPAVVEEDDRVAVVSSQCNDRLRSALEDALREYRSTPTELRPRLPRLPMHNKNRALVCALDSQLENIFESSENLVDTHSILYCGAVAACRLANVKFPNCDVATRPKPAVPAWQRRIERRIDGARVLIGKLHCFREGNTRPRVMRFVRRAFSGTGISPQEYMSRVTERIDFLKQKVYAWANRIRRYKRRVDRYSQNRMFQSDERWVYRAWERPELNMTDVCRPDDAATSSFWRSIWSVPVCHTEADWMRDVERVCEPIPEMEPILITRLDIARAVRPLPNWKSPGPDGLHNFWLKWLSSSHTCLASQFQSSLESGSLPQFLTTGVTHLLHKSGSPAEPKNYRPITCLSTVYKLLTSILRAKINTHIDKNSIMSASQNGCRSGSRGTKELLLIDMAISQQVRRSRKDLSTCWIDYKKAYDSVPHTWLMRVLELYKIDATLRAFLESCMGQWRTVLRYPGCEQIQGNDEPVWIKRGIFQGDSLSPLWFCLALNPLSTLLEDSGLGYRLRRGGQVISHLLYMDDLKLFAPNKLQLLELLKVTETFSSAIRMEFGVDKCAVMYVKQGEIMESEGIQLSDSIHLRTLSSTESYKYLGMSEALGINVTDMKQSLKERFFGRLNKVLHSLLSGGNKVRAFNGWVMPVLMYSFGVLKWTQTELDALDRRVRTLLTANRMHHPRSSVMRLYIPRKCGGRGFLNAKSLHNREMCSLREYFLKVEVGMHRDVVAVDKGLTPLSMAKENWRKPEVLTTDDRKEVWQGKELHGRFYRALHGPDVDFLASVSWLRFGDLFGETEGFVCAIMDEVMLTNNYRKYIMKDGTVDVCRACHRPGESIRHIISGCSRLANGEYLHRHNQVARIIHQQLALKYKLVESEVPYYKYVPDPVLEKDHVTLYWDQSIITDRTIVANKPDIVVIDRSARRVMIVDVTIPHDENLVKAEKEKQIKYLDLAHEVVDMWNVNSAIIVPIVVTANGLIAKSLDDHLSKLSLGGWIKGLIQKAVLLDTARIVRRFLSLEP

SEQ ID NO: 29314 - protein, 1206 aa, Noctua fimbriata
MITRSRAKQLQEAHTPSPGSSLSSASQPPRRATSVSTVSPVAAVASSSSDEFFSPPSTPPPSPRRRGRGRPPAGLGPRGQPAPNRVPAAGGNVSRMRWTQSINEQVMRAYYGATEGGTNLTAYRVGMLSLFQVLEPTVNVSAQRLSDQVRVIQRNHMLDDAVLDRLRSEVLSNRIVLTPAQTAVQASVIDATPPWFNPAVVEEDDRVAVVSSQCNDRLRSALEDALREYRSTPTELRPRLPRLPMHNKNRALVCALDSQLENIFESSENLVDTHSILYCGAVAACRLANVKFPNCDVATRPKPAAPAWQRRIERRIDGARVLIGKLHCFREGNTRPRVMRFVRRAFSGTGISPQEYMSRVTERIDFLKQKVYAWANRIRRYKRRVDRYSQNRMFQSDERWVYRAWERPELNMTDVCRPDDAATSSFWRSIWSVPVCHTEADWMRDVERVCEPIPEMEPILITPLDIARAVRPLPNWKSPGPDGLHNFWLKWLSSSHTCLASQFQSSLESGSLPQFLTTGVTHLLHKSGSPAEPKNYRPITCLSTVYKLLTSILRAKINTHIDKNSIMSASQNGCRNGSRGTKELLLIDMAISQQVRRSRKDLSTCWIDYKKAYDSVPHTWLMRVLELYKIDATLRAFLESCMGQWRTVLRYPGCRQIQGNDEPVWIKRGIFQGDSLSPLWFCLALNPLSTLLEDSGLGYRLRRGGQVISHLLYMDDLKLFAPNKLQLMELLKVTETFSSAIRMEFGVDKCAVMYVKRWEIMESEGIQLSDFIHLRSLSSSESYKYLGMSEALGINVTDMKQSLKERFFGRLNKVLHSLLSGGNKVRAFNGWVMPVLMYSFGVLKWTQTELDALDRRVRTLLTANRMHHPRSSVMRLYIPRKCGGRGILNAKSLHNREMCSLREYFFKVEVGMHRDVVAVDKGLTPLSMAKENWRKPEVLTTDDRKEVWQGKELHGRFYRALHGPDVDFLASVSWLRFGDLFGETEGLVCAIMDEVMLTNNYRKYIMKDGTVDVCRACHRPGESIRHIISGCSRLANGEYLHRHNQVARIIHQQLALKYKLVESEVPYYKYVPDPVLEKNHVKLYWDQSIITDRTIVANKPDIVVIDRSARRVMIVDVTIPHDENLVKAEKEKQIKYLDLAHEVVDMWHVNSAIIVPIVVTANGLIAKSLDDHLSKLSLGGWIKGLIQKAVLLDTARIVRRFLSLEP

SEQ ID NO: 29315 - protein, 1202 aa, Atethmia centrago
MLTRSAARARPPPPDSSLSSASPPPVPSPTVSAVTTPAAVVASSSSDEYFSPPTSPTPVRRQGRGRPPKSLGLRGQLAPSRVPAAGGCVQRMRWTQSMNENVMRAYYGSIEGGTNLTAYRVRMLSLFQKLEPTVNVSAQRLSDQVRVIQRNHRLDDAALDRLRSEVLSNHIVSTPAQTATHAPIINAIPPRSNHDVEEEDDRVATVSSQCNVRLRSALEDAFREYRSTPTELRPRLPRLPMHKKNRALVCTLDSLLKDFFESSEDLVDTHSILYCAAVAACRLANVKFPNCDGATRPKPAVPAWQCRIERRIDGARVLIGKLYCFREGNTRPRVMRFVRRAFSGTGISPREYMSRVTERIDFLKQKVCAWASRIRRYKRRVDRYTQNRMFQSDERWVYRAWERPEQNETDVCRPDDATTTAIWRSIWSVPVCHAEADWMRDVERVCETIPEMDVVIITPSDIARAVRPLPNWKSPGPDGLHNFWLKWLTSSHTCLASQFQSSLESGSLPQFLTTGITHLLHKSGSPAEPKNYRPITCLSTVYKLLTSILRAKINTHIDSNSIMSASQNGCRNGSRGTKELLLIDMAISQQVRRFRKDLSTCWIDYKKAYDSVPHTWLMRVLEFYKIDTTLRTFLESCMGQWRTVLRYPGCRQIQGNDEPVWIKRGIFQGDSLSPLWFCLALNPLSTLLEDSGLGYRLRRGGQVISHLLYMDDLKIFAPNKLQLMELLKVTETFSSAIRMEFGVDKCAVMHVKRGEIMESEGIQLSDSIHLRSLSSPESYKYLGMSEALGINVTDMKQSLKERFFGRLKKVLISPLSGGNKVRAFNGWVMPVLMYSFGILKWTQTELDALDRRVRTLLTANRMHHPRSSVMRLYIPRKCGGRGFLNAKTLHNREICSLREYFLKTEVGMHRDVVAVDKGLTPLSMAKENWCKPVILTTDDRKEIWQNKELHGRFYRALHEPDVDFLASVSWLRFGDLFGETEGFVCAIMDEVILTNNYRRHIMKDGTVDVCRACHRPGESIRHIISGCSRLANGEYLHRHNQVARIIHQQLALKYKLVNSEVPYYKYAPDPVLENDHVTLYWDRSIITDRTIVANKPDIVVIDRLARRAMIVDVTIPHDENLVKAEKEKQIKYLDLAHEVVDMWNVDSAVIVPIVVTANGLMAESLNHHLSRLSLGGWIKGLIQKAVLLDTARIVRRFLSLES

SEQ ID NO: 29316 - protein, 1202 aa, Atethmia centrago
MLTRSAARARPPPPDSSLSSASPPPVPSPTVSAVTTPAAVVASSSSDEYFSPPTSPTPVRRQGRGRPPKSLGLRGQLAPSRVPAAGGCVQRMRWTQSMNENVMRAYYGSTEGGTNLTAYRVRMLSLFQKLEPTVNVSAQRLSDQVRVIQRNHRLDDAALDRLRSEVLSNHIVSTPAQTATHAPIINAIPPRSNHDVEEEDDRVATVSSQCNVRLRSTLEDAFREYRSTPTELRPRLPRLPMHKKNRALVCTLDSLLKDFFESSEDLVDTHSILYCAAVAACRLANVKFPNCDGATRPKPAVPAWQCRIERRIDGARVLIGKLYCFREGNTRPRVMRFVRRAFSGTGISPREYMSRVTERIDFLKQKVCAWASRIRRYKRRVDRYTQNRMFQSDERWVYRAWERPEQNETDVCRPDDATTTAFWRSIWSVPVCHAEADWMRDVERVCETIPEMEVVIITPSDIARAVRPLPNWKSPGPDGLHNFWLKWLTSSHTCLASQFQSSLESGSLPQFLTTGITHLLHKSGSPAEPKNYRPITCLSTVYKLLTSILRAKINTHIDSNSIISASQNGCRNGSRGTKELLLIDMAISQQVHRFRKDLSTCWIDYKKAYDSVPHTWLMRVLEFYKIDTTLRTFLESCMGQWRTVLRYPGCRRIQGNDEPVWIKRGIFQGDSLSPLWFCLALNPLSTLLEDSGLGYRLRRGGQVISHLLYMDDLKIFAPNKLRLMELLKVTETFSGAIRMEFGVDKCAVMHVKRGEIMESEGIQLSDSIHLRSLSSPESYKYLGMSEALGINVTDMKQLLKERFFGRLKKVLISLLSGGNKVRAFNGWVMPILMYSFGILKWTQTELDALDRRVRTLLTANRMHHPRSSVMRLYIPRKCGGRGFLNAKTLHNREICSLREYFLKAEVGMHRDVVAVDKGLTPLSMARENWCKPVVLTTDDRKEIWQNKELHGRFYRALHEPDVDFLASVSWLRFGDLFGETEGFVCAIMDEVILTNNYRRHIMKDGTVDVCRACHRPGESIRHIISGCSRLANGEYLYRHNQVARIIHQQLALKYKLVNSEVPYYKYVPDPVLENDHVTLYWNRSIITDRTIVANKPDIVVIDRLARRAMIVDVTIPHDDNLVKAEKEKQIKYLDLAHEVVDMWNVNSAVIVPIVVTANGLMAESLNHHLSRLSLGGWIKGLIQKAVLLDTARIVRRFLSLEP

SEQ ID NO: 29317 - protein, 1202 aa, Atethmia centrago
MLTRSATRTRPPPPDPSLSSASPPPVPSATVSAMTIPTAAVASSSSDEYFSPPSSPTPVRRQERSRPPKSLGLKGHPAPSRVPAAGGCVQRMKWTQSMNENVMRAYYRSTEGGTNLTAYRVKMLSLFQELEPAVNVSAQRLSDQVRVIQRNRRLDDATLDRLRSEVLSNYIISTPAQTAVHTPIIDVIPPRSNHGVEEEDDRAATVSSQCNVRLRSALEDAFREYRSTPTELRPRLPRLPMHKKNRALMCALDSQLKVFFESSEDLVDTHSILYCAAVAACRLANVKFPNSDGATRPKPAVPAWQCRIERRIDKARVLIGKLYCFREGNTRPRVMRFVRRAFSGTGISPREYMSHITERIDFLKQKVCAWASRIRRYKRRVDRYTQNRMFQSDERWVYRTWERPKQNVTDMCRPDDATTTAFWRSIWSVPVCHVEADWMRDVERVCETIPEMEVVIITPSDIARAVRPLPNWKSPGPDGLHNFWLKWLTSSHTCLASQFQSSLESGSLPQFMTTGITHLLHKSGSPAEPKNYRPITCLSTVYKLLTSILRAKINTHIDSNSIMSASQNGCRNGSRGTKELLLIDMAISQQVRRSRKDLSTCWIDYKKAYDSVPHTWLMRVLELYKIDKTLRTFLESCMGQWRTVLRYPGCRQIQGNDEPVWIKRGIFQGDSLSPLWFCLALNPLSMQLEDSGLGYRLRRGGQVISHLLYMDDLKIFAPNKLQLMKLLKVTETFSSAIRMEFGVEKCAVMHVKRGEIMESEGIQLSNSIHLRSLSSPESYKYLGMSEALGINVTDMKQSLKERFFGRLKKVLISLLSGGNKVRAFNGWVMPVLMYSFGILKWTQTELDALDRRVRILLTANRMHHPRSSVMRLYIPRKCGGRGFLNAKTLHNREICSLREYFLKTEVGMHRDVVAVDKGLTPLSMAKENWCKPVVLTTDDRKEIWQSKELHGRFYRALHEPDVDFLASVSWLRFGDLLGETEGFVCAIMDEVILTNNYRRHIMKDGTVDVCRACHRPGESIRHIISGCSRLANGEYLHRHNQVARIIHQQLALKYKLVNSEVPYYKYVPDPVLENDHVTLYWDRSIITDRTIVANKPDIVVIDRLARRAMIVDVTIPHDDNLVKAEKEKQIKYLDLAHEVVDMWNVNSAVIVPIVVTANGLMARSLNHHLSRLALDGWIKGLIQKAVLLDTARIVRRFLSLEP

SEQ ID NO: 29318 - protein, 1192 aa, Atethmia centrago
MLTRSATRTRPPPPDPSLSSASPPPVPSATVSAMSTPTVAVASSSSDEYFSPPSSPTPVRRQGRSRPPKSLGLRGHPAPSRVPAAGGCVQRMKWTQSMNENVMRAYYGSTEGGTNLTAYLEPAVNVSAQRLSDQVRVIQRNRRLDDAALDRLRSEVLSNHIISTPAQTAVHTPIIDVIPPRSNHGVEEEDDRAATVSSQCNVRLRSALEDAFREYRSTPTELRPRLPRLPMHKKNRALMCALDSQLKVFFESSEDLVDTHSILYCAAVAACRLANVKFPNSDGATRPKPAVPAWQCRIERRIDGARVLIGKLYCFREGNTRPRVMRFVRRAFSGTGISPREYMSHITERIDFLKQKVCAWASRIRRYKRRVDRYTQNRMFQSDERWVYRAWERPKQNETDVCRPDDATTTAFWRSIWSVPVCHVEADWMRDVERVCETIPEMEVVIITPSDIARAVRPLPNWKSPGPDGLHNFWLKWLTSSHTCLASQFQSSLESGSLPQFMTTGITHLLHKSGSPAEPKNYRPITCLSTVYKLLTSILRAKINTHIDSNSIMSASQNGCRNGSRGTKELLLIDMAISQQVRRSRKDLSTCWIDYKKAYDSVPHTWLMRVLEFYKIDMTLRTFLKSCMGQWRTVLRYPGCRQIQGNDESVWIKRGIFQGDSLSPLWFCLALNPLSMQLEDSGLGYRLRRGGQVISHLLYMDDLKIFAPNKLQLMELLKVTETFSSAIRMEFGVDKCAVMHVKRGEIMESEGIRLSDSIHLRSLSSPESYKYLGMSEALGINVTDMKQSLKERFFGRLKKVLISLLSGGNKVRAFNGWVMPVLMYSFGILKWTQTELDALDRRVRTLLTANRMHHPRSSVMRLYIPRKCGGRGFLNAKTLHNREICSLREYFLKTEVDMHRDVVAVDKGLTPLSMAKENWCKPVVLTTDDRKEIWQNKELHGRFYRALHEPDVDFLASVSWLRFGDLFGETEGFVCAIMDEVILTNNYRRHIMKDGTVDVCRACHRPGESIRHIISGCSRLANGEYLHRHNQVARIIHQQLALKYKLVNSEVPYYKYVPDPVLENDHVTLYWDRSIITDRTIVANKPDIVVIDRLARRAMIVDVTIPHDDNLVKAEKEKQIKYLDLAHEVVDMWNVNSAVIVPIVVTANGLMARSLNHHLSRLTLDGWIKGLIQKAVLLDTARIVRRFLSLES

SEQ ID NO: 29319 - protein, 1203 aa, Atethmia centrago
MLTRAASKRARPPPPDSSLSSASPPPVSSPTVSAVITPAAVVASSSSDEYFSPPTSPTPVRRQGRDRPPKSLGLRGHPASSRVPAAGGCVQRMRWTQSMNENVMRAYYGSTEGGTNLTAYRVRMLSLFQELEPTVNVSAQRLSDQVRVIQRNRRLDDATLDRLRSEVLSNYIISTPAQTAVHTPIIDVIPPRSNHGVEEEDDRAATVSSQCNVRLRSALEDAFREYRSTPTELRPRLPRLPMHKKNRALMCALDSQLKVFFESSEDLVDTHSILYCAAVAACRLANVKFPNSDGATRPKPAVPAWQCRIERRIDKARVLIGKLYCFREGNTRPRVMRFVRRAFSGTGISPREYMSHITERIDFLKQKVCAWASRIRRYKRRVDRYTQNRMFQSDERWVYRAWERPKQNVTDVCRPDDATTTAFWRSIWSVPVCHVEADWMRDVERVCETIPEMEVVIITPSDIARAVRPLPNWKSPGPDGLHNFWLKWLTSSHTCLASQFQSSLESGSLPQFMTTGITHLLHKSGSPAEPKNYRPITCLSTVYKLLTSILRAKINTHIDSNSIMSASQNGCRNGSRGTKELLLIDMAISQQVRRSRKDLSTCWIDYKKAYDSVPHTWLMRVLELYKIDTTLRTFLESCMGQWRTVLRYPGCRQIQGNDEPVWIKRGIFQGDSLSPLWFCLALNPLSMQLEDSGLGYRLRRGGQIISHLLYMDDLKIFAPNKLQLMKLLKVTETFSSAIRMEFGVDKCAVMHVKRGEIMESEGIQLSDSIHLRSLSSPESYKYLGMSEALGINVTDMKQSSKERFFGRLKKVLISLLSGGNKVRAFNSWVMPVLTYSFGILKWTQTELDALDRRVRTLLTANRMHHPRSSVMRLYIPWKCGGRGFLYAKTLHNREICSLREYFLKTEVGMHRDVVAVDKGLTPLSMAKENWCKPVVLTTDDRKEIWQSKELHGRFYRALHEPDVDFLASVSWLRFGDLFGETEGFVCAIMDEVILTNNYRRHIMKDGTVDVCRACHRPGESIRHIISGCSRLANGEYLHRHNQVARIIHQQLALKYKLVNSEVPYYKYVPDPVFENDHVTLYWDRSIITDRTIVANKPDIVVIDRLARRAMIVDVTIPHDDNLVKAEKEKQIKYLDLAHEVVDMWNVNSAVIVPIVVTANGLMARSLNHHLSRLALDGWIKGLIQKAVLLDTARIVRRFLSLEP

SEQ ID NO: 29320 - protein, 868 aa, Mesoligia furuncula
MRFVRRAFSGTGISPREYMSRVTERIDFLKQKVCAWASRIRRYKRRVDRYTQNRMFQSDERWVYRAWERPEQNVTDVCRPDDAATSAFWCTIWSVPVCHTEAGWMQDVERVCESVPEMEKVLITPSDVARAVRPLSNWKSPGPDGLHNFWLKWLISSHTCLASQFQSSLEYGSLPQFLTTGVTHLLHKSGSPAEPKNYRPITCLSTVYKLLTSILRAKINKHIESNSIMSASQNGCRNGSRGTKELLLIDMAISQQVRRSRKDLSTCWIDYKKAYDSVPHTWLMRVLELYKIDATLRTFLESCMGQWKTVLRYPGCRQIQGNDEPVWIKRGIFQGDSLSPLWFCLALNPLSTLLEDSGLGYRLRRGGQVISHLLYMDDLKLFAPNKLRLMELLKVTKTFSSAIKMEFGVDKCAVMHVKRGEIMESEGIQLSDSISLRSLSSSESYKYLGMSEALGINDADMKQSLKERFFCRLKKVLISLLSGGNKVRAFNGWVMPVLMYSFGILKWTQTELDALDRRVRTLLTANRMHHPRSSVMRLYIPRKCGGRGFLNAKTLHNREVCSLREYFLKAEVGMHRDVVAVDKGLTPLSMAKENWRKPVVLSTDDRKRVWQSKELHGRFYRALHEPGVDFIASVSWLRFGDLFGETEGFVCAIMDEVILTNNYRRHIMKDGTVDVCRACHRPGESIRHIISGCSRLANGEYLHRHNQVARIIHQQLALKYMLVDSEVPYYKYVPDPVLENDHVTLYWGRSIITDRTIVANKPDIVVIDRLARRTMIVDVTIPHDGNLVKAEKEKQIKYLDLAHEVVDMWNESSAIIVPIVVSANGLMAESLDQHLSRLSLGGWIKGLIQKAVLLDTARIVRRFLSLEP

SEQ ID NO: 29321 - protein, 1201 aa, Mesoligia furuncula
MLTRSAARRAHLPPPDSSLSPAPPRPEPSPIESAVTPAAAVASSSSDEYFSPPTSPTPVRRQGRGRPPNCLGLRGHPAPSRVPATGGCVQRMRWTQSMNENVMRAYYGSTEGGINLTAYRDRMLSLFQELEPTVNVSAQRLSDQVRVIQRNHRLDDIALDRLRSEVLSNHIVSTSAQTAAQVSSVDAIPPRFNHVEEEDDRVDTVSSQCNVRLRSALEDALREYRSTPTELRPRLPRLPMHKKNRALVCVLDSQLKNFFESSVDLVDTHSILYCAAVAACRLANVKFPSCDGATRLKPAVPAWQRRIERRIDGARVLIGKLYCFREGNTRPRVMRFVRRAFSGTGISPREYMSRVTERIDFLKQKVCAWASRIRRYKRRVDRYTQNRMFQSDERWVYRAWERPEQNVTDVCRPDDTATSAFWCSIWSVPVCHTEAGWMQDVERVCESVPEMETVLITPSDVARAVRPLSNWKSPRPDGLHNFWLKWLISSHTCLASQFQSSLESGSLPQFLTTGVTHLLHKSGSPAEPKNYRPITCLSTVYKLLTSILRAKINKHIESNSIMSTSQNGCRNGSRGTKELLLIDMAISQQVRRSRKDLSTCWIDYKKAYDSVPHTWLMRVLELYKIDATLRTFLESCMGQWKTVLRYPGCRQIQGNDEPVWIKRGIFQGDSLSPLWFCLALNPLSTLLEDSGLGYRLRRGGQVISHLLYMDDLKLFAPNKLRLMELLKVTKTFSSAIRMEFGVDKCAVMHVKRGEIMESEGIQLSDSISLRSLSSSESYKYLGMSEALGINDADMKQSLKERFFCRLKKVLISLLSGGNKVRAFNGWVMPVLMYSFGILKWTQTELDALDRRVRTLLTANRMHHPRSSVMRLYIPRKCGGRGFLNAKTLHNREVCSLREYFLKAEVGMHRDVVAVDKGLTPLSMAKENWRKPVVLSTDDRKKVWQSKELHGRFYRALHEPGVDFIASVSWLRFGDLFGETEGFVCAIMDEVILTNNYRRHIMKDGTVDVCRACHRPGESIRHIISGCSRLANGEYLHRHNQVARIIHQQLALKYKLVDSEVPYYKYVPDPVLENDHVTLYWDRSIITDRTIVANKPDIVVIDRLARRTMIVDVTIPHDGNLVKAEKEKKIKYLDLAHEVVDMWNVSSAVIVPIVVSANGLMAESLDQHLSRLSLGGWIKGLIQKAVLLDTARIVRRFLSLEP

SEQ ID NO: 29322 - protein, 1201 aa, Mesoligia furuncula
MLTRSTARRAHLPPPDSSLSPAPPPPEPSPIESAVTPAAAVASSSSDEYFSPPTSPTPVRRQGRGRPPNCLGLRGHPAPSRVPATGGCVQRMRWTQSMNENVMRAYYGSTEGGINLTAYRDRMLSLFQELEPTVNVSAQRLSDQVRVIQRNHRLDDIALDRLRSEVLSNHIVSTSAQTAAQVSSVDAIPPRFNHVEEEDDRVDTVSSQCNVRLRSALEDALREYRSTPTELRPRLPRLPMHKKNRALVCALDSQLKNFFESSVDLVDTHSILYCAAVAACRLANVKFPSCDGATRPKPAVPAWQRRIERRIDGARVLIGKLYCFREGNTRPRVMRFVRRAFSGTGISPREYMSRVTERIDFLKQKVCAWASRIRRYKRRVDRYTQNRMFQSDERWVYRAWERPEQNVTDVCRPDDAATSAFWCSIWSVPVCHTEAGWMQDVERVCESVPEMETVLITPSDVARAVRPLSNWKSPGPDGLHNFWLKWQISSHTCLASQFQSSLESGSLPQFLTTGVTHLLHKSGSPAEPKNYRPITCLSTVYKLLTSILRAKINKHIESNSIMSTSQNGCRNGSRGTKELLLIDMAISQQVRRSRKDLSTCWIDYKKAYDSVPHTWLMRVLELYKIDATLRTFLESCMGQWKTVLRYPGCRQIQGNDEPVWIKRGIFQGDSLSPLWFCLALNPLSTLLEDSGLGYRLRRGGQVISHLLYMDDLKLFAPNKLRLMELLKVTKTFSSAIRMEFGVDKCAVMHVKRGEIMESEGIQLSDSISLRSLSSSESYKYLGMSEALGINDADMKQSLKERFFCRLKKVLISLLSGGNKVRAFNGWVMPVLMYSFGILKWTQTELDALDRRVRTLLTANRMHHPRSSVMRLYIPRKCGGRGFLNAKTLHNREVCSLREYFLKAEVGMHRDVVAVDKGLTPLSMAKENWRKPVVLSTDDRKKVWQSKELHGRFYRALHEPGVDFIASVSWLRFGDLFGETEGFVCAIMDEVILTNNYRRHIMKDGTVDVCRACHRPGESIRHIISGCSRLANGEYLHRHNQVARIIHQQLALKYKLVDSEVPYYKYVPDPVLENDHVTLYWDRSIITDRTIVANKPDIVVIDRLARRTMIVDVTIPHDGNLVKAEKEKKIKYLDLAHEVVDMWNVSSAVIVPIVVSANGLMAESLDQHLSRLSLGGWIKGLIQKAVLLDTARIVRRFLSLEP

SEQ ID NO: 29323 - protein, 1199 aa, Xestia c-nigrum
MYQVRYTTNKGDNNNNNQLSSASPPPDPGSPVPPVAAVASSSSDEYFSPPTSPTPVRRAGRGRPPRSLGLRGQQAPSRVPATGGCVQRMRWTQSMNENVMRAYYGSTEGGINLTAYRDRMLSLFQDLEPAVNVSAQRLSDQVRVIQRSHRLDDATLDRLRSEVLSNLITITPTQTAVHMSVVNATLPRSNPVVVEEDDRVALVSSQCNDRLRSALDNALREYRSISAELRPRLPRLPMHKKNRALVCALDSQLKNIFESSEDLVDTHSILFCGAVAACRLANVKFPNCDIAIRPKPAVPAWQRRIERRIDGARVLIGKLYCFREGNTRPRVMRFVRRAFSGTEISPQEYMSRVTERIDFLKQKVYAWASRIRRYKRRVDRYSQNRMFQSDERWVYRAWERPQQNMTDVCRPDDAATSSFWRSIWSVPVCHSEADWMRDVERVCEPIPTMEPILITPLDIARAVRPLPNWKSPGPDGLHNFWLKWFSSSHTCLASQFQSSLESGSLPQFLTTGVTHLLHKSGSPAEPKNYRPITCLSTVYKLLTSILRMKINTHVDSNSIMSASQNGCRNGSRGTKELLLIDMAISQQVRRARKDLSICWIDYKKAYDSVPHSWLKRVLELYKIDATLRAFLESCMGLWRTVLRYPGCRQIQGNDEPVWIKRGIFQGDSLSPLWFCLALNPVSTLLENSGLGYRLRKDGQVISHLLYMDDLKLFAPNKLQLMELLKVTETFSSAIGMEFGVDKCAVMYVKRGKIMGSEGLQLSDSIHLRSLSSSESYKYLGMSEALGINVTDMKQSLRERFFGRLKKVLNSLLSGGNKVRAFNGWVMPVLMYSFGILKWTQTELDALDRRVRTLLTENRMHHPRSSVMRLYIPRKCGGRGFLNAKTLHNREVCSLREYFLKADVGMHRDVAAVDKGLTPLSMAKENWHKPVVLTTDDRMKEWQGKELHGRFYRALHGPDVDFLVSVSWLRFGDLFGETEGFVCAIMDEVMLTNNYRKYIMKDGTVDVCRACHLPGESIRHIISGCSRLANGEYLHRHNQVARIIHQQLALKFNLVELEVPYYKYVPDPVLVKDHVTLYWDQSIITDRTIVANKPDIVVIDRSARRVMIIDVTIPHDENLVKAEKEKQIKYLDLAHEVRDMWNMDSVIIVPIVVSANGLIAKSLDEHLSKLSLGGWIKGLIQKAVLLDTARIVRRFLSLQP

SEQ ID NO: 29324 - protein, 1199 aa, Xestia c-nigrum
MITRAALRRARLATPDSSLSSASPPPDPGSPVSPAVAVASSSSDEYFSPPTSPTPVRRAGRGRPPRSLGLRGQQAPSRVPATGGCVQRMRWTQSMNENVMRAYYGSTEGGTNLTVYRVRMLSMFQDLEPTVNASAQRLSDQVRVIQRNHLLDDAVLDRLRSEVLNNRIIFTQAQTAVQASAIHATPPRSNPAVIEEDDRVATISSQCNDRLRSALDNALREYRSISAELRPRLPRLPMHKKNRALVCALDSQLKNIFESSEDLVDTHSILFCGAVAACRLANVKFPNCDIATRPKPAVPAWQRRIERRIDGARVLIGKLYCFREGNTRPRVMRFVRRAFSGTEISPQEYMSRVTERIDFLKQKVYAWASRIRRYKRRVDRYSQNRMFQSDERWVYRAWERPQQNMTDVCRPDDAATSSFWRSIWSVPVCHSEADWMRDVERVCEPIPTMEPILITPLDIARAVRPLPNWKSPGPDGLHNFWLKWFSSSHTCLASQFQSSLESGSLPQFLTTGVTHLLHKSGSPAEPKNYRPITCLSTVYKLLTSILRTKINTHVDNNSIMSASQNGCRNGSRGTKELLHIDMAISQQVRRARKDLSTCWIDYKKAYDSVPHSWLKRVLELYKIDATLRAFLESCMEQWRTVLRYPGCRQIQGNDEPVWIKRGIFQGDSLSPLWFCLALNPVSTLLENSGLGYRFRKDGQVISHLLYMDDLKLFAPNKLQLMELLKVTETFSSAIGMEFGVDKCAVMYVKRGKIMGSEGLQLSDSIHRRSLSSSESYKYLGMSEALGINVTDMKQSLKERFFGRLKKVLNSLLSGGNKVRAFNGWVMPVLMYSFGILKWTQTELDALDRRVRTLLTENRMHHPRSSVMRLYIPRKCGGRGFLNAKTLHNREVCSLREYFLKADVGMHRDVVAVDKGLTPLSMAKENWRKPVVLTTDDRKKEWQGKELHGRFYRALHGPDVDFLASVSWLRFGDLFGETEGFVCAIMDEVMLTNNYRKYIMKDGTVDVCRACHCPGESIRHIISGCSRLANGEYLHRHNQVARIIHQQLALKFKLVESEVPYYKYVPDPVLVKDHVTLYWDQSIITDRTIVANKPDIVVIDRSARRVMIIDVTIPHDENLVKAEKEKKMKYLDLAHEVRDMWNMNSVIIVPIVVTANGLIAKSLDEHLSKLSLGGWIKGLIQKAVLLDTARIVRRFLSLQP

SEQ ID NO: 29325 - protein, 1203 aa, Omphaloscelis lunosa
MLTRSAARSTRLPPPDSPLSSASPPPVPSPIVNAVSTPAAVVASSSSDEYFSPPTSPTPVRRQGRGRPPKSLGLRGRPAPSRVPAAGGCVQRMRWTQSMNENVMRAYYGSTEGGTNLTAYRVRMLSLFQELEPTVNVSAQRLSDQVRVIQRNHRLDDTALDRLRSEVLSNHIVSAREQTVAEASNIDPTPPRFNHGVEEEDDRVATVSSQCNNRLRSALEDAFREYRYTPTELRPRLPRLPMHKKNRALMCALDSQLTNFFESSEDLIDTHSILYCAAVAACRLANVKFPNCDGATRPKPAVPAWQCRIERRIDGVRVLIGKLYCFREGNTRPRVMRFVRRAFSGTEISPQDYMSRVTERIDFLKQKVCAWASRIRRYKRRVDRYTQNRMFQSDERWVYRAWERPEQNVTDVCRSDDAATSAFWRSIWSVPVCHTEAGWMQDVERVCETIPEMDAVFITPLDVARAVRPLPNWKSPGPDGLHNFWLKWLSSSHTCLASQFQSSLESGSLPQFLTTGVTHLLHKSGNPAESKNYRPITCLSTVYKLLTSILRTKINTHIDSNSIMSVSQNGCRNGSRGTKELLLIDMAISQQVRRSRKDLSTCWIDYKKAYDSVPHTWLMRVLELYKVDTTLRTFLMSCMGQWRTVLRYPGCRRTQGNDEPVWIKRGIFQGDSLSPLWFCLALNPLSTLLEDSGLGYRLRRGGQVISHLLYMDDLKLFAPNKLRLMELLKVTETFSGAIRMEFGVDKCAVMHVKRGEIMESEGIQLSDSIHLRPLSSAENYRYLGMSESLGINVADMKQSLKERFFGRLKKVLISFLSGGNKVRAFNGWVMPVLMYSFGILKWTQTELDALDRRVRTLLTANRMHHPRSSVMRLYIPRKCGGRGFLNAKTLHNREVCSLREYFFKADVGMHRDVVAVDNGLTPLSMAKENWRKPVVLTTDDRKEIWQSKALHGRFYRALHEPSVDFLASVSWLRFGDLYGETEGFICAIMDEVILTNNYRRHIMKDGTVDVCRACHRPGESIRHIISGCSRLANGEYLHRHNQVARIIHQQLALKYKLVDSEVPYYKYVPDPVLENDHATLYWDRSIITDRTIVANKPDIVVIDRLARHAMIVDVTIPHDENLVKAEKEKQIKYLDLAHEVVGMWNVSSAIIVPIVVTANGLMAKSLDHHLSRLSLGGWIKRLIQKAVLLDTARIVRRFLSLQP

SEQ ID NO: 29326 - protein, 1089 aa, Sesamia nonagrioides
MKGVKILIIIIITLFQALEPTVNVSAQRLSDQVRVIQRNHRLDDIALDRLRSEVLSNQIAPTLTQTAAQASIIDAVPPRSNRVEEEDDRVETVSSQYNDRLRSALEDAFRDYRSTPTNLRPRLPRLPMHKKNRALVCALDSQLKNFFESSEDLIDTHSILYCAAVAACRLAKVKFPNCEEATRPKLAIPAWQRRIERRIDGTRVLIGKLYCFREGNTRPRVMRFVRQAFSGTGISPREYINNVTERIDFLKQKVCAWASRIRRYKKRVDRYTQNRMFQSDERWVYRAWERPEQNEADECRPDDATTSAFWRGIWSVSVCHTEGDWTQDVEQVCEAIPEMDNILITPLDVATAVRSLPNWKSPGPDGLHNFWLKWLSSSHTCLASQFQSSLESSSLPQFLTTGITHLLHKSGSTAEPKNYRPITCLPTVYKVLTSILKAKINNHLDSNSIMSVSQNGCRSGSRGTKELLLIDMAISQQVRRSRKDLSTCWIDYKKAYDSVPHTWLMRVLELYKINATLRTFLRSCMGQWKTVLRYPGSRQIQGNDEPVWIKRGIFQGDSLSPLWFCLALNPLSTLLEDSGLGYRLKRGGQVISHLLYMDDLKLFAPNKLHLMKLLNVTETFSSGIKMEFGVDKCAVMHVKRGQIMESEGITLPDSIHLRSLSSIESYKYLGMSEALGINDADMKQSLKERFFGRLKKVLNSLLSGGNKVRAFNGWVMPVLMYSFGILKWTQTELDALDRRVRTLLTANRMHHPRSSVMRLYIPRKCGGRGFLNAKTLHNREVFSLREYFLKTVVGMHHDVVTVDKGLTPLSMAKENWHKPIILTTDDRKMVWQSKELHGRFYRALHGPDVDFLASVSWLRFGDLFGETEGFVCAIMDEVILTNNYRRYIMKDGTIDVCRACHHPGESIRHIISGCSRLANSEYLHRHNQVARIIHQQLALKYKLVDSEVPYYKYVPDPVLENDHVTLYWDRSIITDRTIVANKPDIVVIDRLARLAMIVDVTIPHDGNLVKAEKEKQMKYLDLAHEVVDMWNVNSAVIVPIVVSANGLIAKSLDQHLLRLSLGSWIKGLIQKAVLLDTARIVRRFLSLEP

SEQ ID NO: 29327 - protein, 962 aa, Sesamia nonagrioides
MHKKNRALVCALDSLLKNFFESSEDLIDTHSILYCAAVAACRLAKVKFPNCEEAARPKPAVPAWQRRIERRIDGTRVLIGKLYCFRDGNTRPRVMRFVRQAFSGTGISPREYINHLTERIDFLKQKVCAWASRIRRYKRRVDRYTQNRMFQSDERWVYRAWERPEQNEADVCRPDDATTSAFWRGIWSVSVCHTEGNWIQNVEQVCETIPEMDTILITPSDVAAAVRSLPNWKSPGPDGLHNFWLKWLSSSHTCLASQFQSSLESGSLPQFLTTGITHLLHKSGSTAEPKNYRPITCLPTVYKVLTSILKAKINKHLDSNSIMSVSQNGCKSGSRGTKELLLIDMAISQQVRRSRKDLSTCWIDYKKAYDSVPHTWLMRVLELYKVNATLRTFLRSCMGQWKTVLRYPGSRRIQGNDEPVWIKRGIFQGDSLSPLWFCLALNPLSTLLEDSGLGYRLKRGGQVISHLLYMDDLKLFAPNKLHLMKLLNVTETFSSGIKMEFGVDKCAVMHVKRGQIMESEGITLPDSIHLRSLSSFESYKYLGMSEALGINDADMKQSLKERFFGRLKKVLKSLLSGGNKVRAFNGWVMPVLMYSFGILKWTQTELDALDRRVRTLLTANRMHHPRSSVMRLYIPRKCGGRGFLNAKTLHNREVCSLREHFFKTVVGMHHDVVTVDKGLTPLSIAKENWHKPIILTTDDRKMIWQSKELHGRFYRALHEPDVDFLASVSWLRFSDLFGETEGFVCAIMDEVILTNNYRRYIIKDGTIDVCRACHHPGESIRHIISGCSRLANSEYLHRHNQVARIIHQQLALKYKLVDSEVPYYKYVPDPVLENDHVTLYWDRSIITDRTIVANKPDIVVIDRLARLAMIVDVTIPHDGNLVKAEKEKQIKYLDLAHEIVDMWNVNSAVIVPIVVSANGLIAKSLDQHLLRLSLGSWIKGLIQKAVLLDTARIVRRFLSLEP

SEQ ID NO: 29328 - protein, 868 aa, Sesamia nonagrioides
MRFVRQAFSGTGISPREYINHLTERIDFLKQKVCAWASRIRRYKRRVDRYTQNRMFQSDERWVYRAWERPEQNEADVCRPDDATTSAFWRGIWSVSVCHTEGNWIRNVEQVCETIPEMDTILITPSDVAAAVRSLPNWKSPGPDGLHNFWLKWLSSSHTCLASQFQSSLESGSLPQFLTTGITHLLHKSGSTAEPKNYRPITCLPTVYKVLTSILKAKINKHLNSNSIMSVSQNGCKSGSRGTKELLLIDMAISQQIRRSRKDLSTCWIDYKKAYDSVPHTWLMRVLELYKINATLRTFLRSCMGQWKTALHYPGSRQIQGNDEPVWIKRGIFQGDSLSPVWFCLALNPLSTLLENSGLGYRLRRGGQVISHLLYMDDLKLFAPNELHLMKLLNVTETFSSGIRMEFGVDKCAVMHVKQGEIMESGGITLPDSIHLRSLSSFESYKYLGMSEALGINDADMKQSLKERFFGRLKKVLNSLLSGGNKVRAFNGWVMPVLMYSFGILKWTQTELDALDRRVRTLLTANRMHHPRSSVMRLYIPRKCGGRGFLNAKTLHNREVCSLREYFLQTVVGMHHDVVTVDKGLTPLSMAKENWHKPIILTTDDRRKVWQSKELHGRFYRALHEPDVDFLASVSWLRFSDLFGETEGFVCAIMDEVILTNNYRRYIMKDGTIDVCRACHHPGESIRHIISGCSRLANSEYLHRHNQVARIIHQQLALKYKLVDSEVPYYKYVPDPVLENEHVTLYWDRSIITDRTIVANKPDIVVIDRLARLAMIVDVTIPHDGNLVKAEKEKKMKYLDLAHEVVDMWNVNSAVIVPIVVSANGLIAKSLDQHLLRLALGSWIKGLIQKAVLLDTARIVRRFLSLEP

SEQ ID NO: 29329 - protein, 1199 aa, Mamestra configurata
MLTRAALQRARPPPPDPSLSSASPPPDIGSPLSPAVAVASSSSDEYFSPPTSPTPVRRQGRGRPPRGLGPRGQPAPSRVPATGGCVQRMRWTQSMNENVMRAYYGSTEGGTNLTAYRVRMLSLFQDLEPTVNVSAQRLSDQVRVIQRNHRLDDAALDRLRSEVLNNLIISTPTQTAVHAPVNGRITPRPNNVSDEVDDRVVTVSSQCNDRLRSALEDALREYRSTPTELRPRLPRLPMHKKNRALVCALDSLLQNIFESSESLVDTHSILYCGAVAACRIANVKFPGCDEAIRPKPAAPAWQRRIERRIDETRALIGKLYCFREGNTRPRVMRFVRRAFSGTEISPRDFTSRVTERIDFLKQKVCAWASRIRRYKRRVDRYSQNRMFQSDERWVYRAWERPEQSVTDVCRPDDVATSIFWRSIWSVPICHAEGGWMRDVERVCEAIPQMEKITITTLDVAKAVRPLPNWKSPGPDGLHNFWLKWYSSSHALLASQFQSSLDSGSLPQFLTTGVTHLLHKTGSPTEPKNYRPITCLSTVYKLLTSILRAKINEHIESNSIMSASQNGCRKGSRGTKELLLIDMAISQQVRRSRKDLSTCWIDYKKAYDSVPHTWLMKVLELYKIDATLRTFLESCMRQWKTVLRYPGCRPIQGSDEPVWIKRGIFQGDSLSPLWFCLALNPLSTLLEDSGLGYRLRRGGQAISHLLYMDDLKLFAPNNLRLMELLKVTETFSSAIRMEFGVDKCAVMHVKKGEIMESEGIQLSDSIQVRSLSSTETYKYLGMSEALGINGTDMKQSLRERFFGRLKKVLNSLLSGGNKVRAFNGWVMPVLMYTFGILKWTQTELDALDRRVRTLLTANRMHHPRSSVMRLYIPRKCGGRGFLNAKTLHNREMCSLREYFLKADVGMHRDVVAVDKGLTPLSMAKENWRTPVILTTDDRKEVWKGKELHGRFYRALHGSDVDFSASVAWLRFGDLFGETEGFVCAIMDEVILTNNYRRHIMKDGTVDMCRACHRPGESIRHIISGCSRLANGEYLHRHNQVARIIHQQLALKYNLVDSEVPYYKYVPDPVLENDHVTLYWDRSIITDRTIVANKPDIVVIDRLARRTMIIDVTIPHDENLVKAEKEKQIKYLDLAHEVVDMWNVESAVIVPIVVTANGLMAKSFDDHLSKLALRSWVKGLIQKAVLLDTARIVRRFLSLEP

SEQ ID NO: 29330 - protein, 1199 aa, Mamestra configurata
MLTRAALQRARPPPPDPSLSSASPPPDIGSPLSPAVAVASSSSDEYFSPPTSPTPVRRQGRGRPPRGLGPRGQPAPSRVPATGGCVQRMRWTQSMNENVMRAYYGSTEGGTNLTAYRVRMLSLFQDLEPTVNVSAQRLSDQVRVIQRNHRLDDAALDRLRSEVLNNLIISTPTQTAVQAPVNGRITPRPNNVSDEVDDRVVTVSSQCNDRLRSALEDALREYRSTPTELRPRLPRLPMHKKNRALVCALDSLLQNIFESSESLVDTHSILYCGAVAACRIANVKFPGCDEAIRPKPAAPAWQRRIERRIDETRALIGKLYCFREGNTRPRVMRFVRRAFSGTEISPRDFTSRVTERIDFLKQKVCAWASRIRRYKRRVDRYSQNRMFQSDERWVYRAWERPEQSVTDVCRPDDVATSIFWRSIWSVPICHAEGGWMRDVERVCEAIPQMEKITITTLDVAKAVRPLPNWKSPGPDGLHNFWLKWYSSSHALLASQFQSSLDSGSLPQFLTTGVTHLLHKTGSPTEPKNYRPITCLSTVYKLLTSILRAKINEHIESNSIMSASQNGCRKGSRGTKELLLIDMAISQQVRRSRKDLSTCWIDYKKAYDSVPHTWLMKVLELYKIDATLRTFLESCMRQWKTVLRYPGCRPIQGSDEPVWIKRGIFQGDSLSPLWFCLALNPLSTLLEDSGLGYRLRRGGQAISHLLYMDDLKLFAPNNLRLMELLKVTETFSSAIRMEFGVDKCAVMHVKKGEIMESEGIHLSDSIQVRSLSSTETYKYLGMLEALGINGTDMKQSLRERFFGRLKKVLNSLLSGGNKVRAFNGWVMPVLMYTFGILKWTQTELDALDRRVRTLLTANRMHHPRSSVMRLYIPRKCGGRGFLNAKTLHNREMCSLREYFLKADVGMHRDVVAVDKGLTPLSMAKENWRTPVILTTDDRKEVWKGKELHGRFYRALHGSDVDFSASVAWLRFGDLFGETEGFVCAIMDEVILTNNYRRHIMKDGTVDMCRACHRPGESIRHIISGCSRLANGEYLHRHNQVARIIHQQLALKYNLVDSEVPYYKYVPDPVLENDHVTLYWDRSIITDRTIVANKPDIVVIDRLARRTMIIDVTIPHDENLVKAEKEKQIKYLDLAHEVVDMWNVESAVIVPIVVTANGLMAKSFDDHLSKLALRSWVKGLIQKAVLLDTARIVRRFLSLEP

SEQ ID NO: 29331 - protein, 1199 aa, Noctua janthe
MISRAAYRRARLTTPDSSFSSASPPPDPGSPVPPAAAVASSSSDEYFSPPTSPTPVRRQGRGRPPKSLGLRGHPAPSRVPAAGGCVQRMRWTQTINENVMRAYYGSTEGGTNLTAYRVRMLSLFQVLEPIVNVSAQRLSDQVRVIQRNHMLDDAALDRLRSEVLSNRIVLTPAQTAVQASAIDATSPRSNPAVVEEDDRVAMVSSQCNDRLRSALEDALREYRSTPTKLRPRLPRLPMHNKNRALVCALDSQLKNIFESSENLVDTHSILYCGAVAACRLANVKFPNDDVAIRPKPAVPTWQRRIECRIDEARVLIGKLHCFREGNTRPRVMRFVRRAFSGTGISPQEYMSRVTERIDFLKQKVYAWANRIRRYKRRVDRYSQNRIFQSDERWVYRAWERPEQNMTDVCRPDDAATSSFWRSIWSVPVCHTEADWMRDVERACEPIPEMEPIIITPIDIARAVRPLPNWKSPGPDGLHNFWLKWLSSSHTCLASQFQSSLESGSLPQFLTTGVTHLLHKSGSPAEPKNYRPITCLSTVYKLLTSILRVKINTHIDKNFIMSASQNGCRNRPRGTKELLLIDMAISQQVRRSRKDLSTCWIDYKKAYDSVPHTWLMRVLELYKIDATLRAFLESCMGQWRTVLRYPGCRQIQGNDEPVWIKRGIFQGDSLSPLWFCLALNPLSTLLEDSGLGYRLRRGGQVISHLLYMDDLKLFAPNKLRLMELLKVTETFSNAIRMEFGVDKCAVMYVKRGEIMESEGIQLSDSIHLKSLSSSESYKYLGMSESLGINVTDMKQSLRERFFGRLNKVLNSLLLGGNKVRAFNGWVMPVLMYSFGVLKWTQTELDALDRRVRTLLTANRMHHPRSSVMRLYIPRKCGGRGFLNAKTLHNREICSFREYFLKTEVGMHRDVVAVDKGLTPLSMAKENWRKPVVLTTDDRKEVWQGKEFHGRFYRALHGPDVDFLASVSWLRFGDLFGETEGFVCAIMDEVMLTNNYRKYIMKDGTVDVCRACHRPSESIRHIISGCSRLANGEYLHRHNQVARIIHQQLALKYKLVESEVPYYKYVPDPVLEKDHVTLYWDRSIITDRTIVANKPDIVVIDRLARRVMIVDVTIPHDENLVKAEKEKQNKYLDLAHEVVDMWNVNSAIIVPIVVTANGLIAKSLDDHLSRLSLGGWIKGLIQKAVLLDTARIVRRFLSLEP

SEQ ID NO: 29332 - protein, 1199 aa, Noctua janthe
MITRAAYRRARLTTPDSSLSSASPPPDPGSPVSPAAAVASSSSDEYFSPPTSPTPVRRQGRGRPPKSLGLRGHPAPSRVPAAGGCVQRMRWTQTINENVMRAYYGSTEGGTNLTAYRVRMLSLFQVLEPIVNVSAQRLSDQVRVIQRNHMLDDAALDRLRSEVLSNRIVLTPAQTAVQASTIDATPPRSNPAVVEEDDRVAMVSSQCNDRLRSALEDALREYRSTPTKLRPRLPRLPMHNKNRALVCALDSQLKNIFESSENLVDTHSILYCGAVAACRLANVKFPNYDVAIRPKPAVPTWQRRIECRIDEARVLIGKLHCFREGNTRPRVMRFVRRAFSGTGISPQEYMSRVTERIDFLKQKVYAWANRIRRYKRRVDRYSQNRIFQSDERWVYRAWERPEQNMTDVCRPNDAATSSFWRSIWSVPVCHTEADWMRDVERACEPIPEMEPILITSIDIARAVRALLNWKSPGPDGLHNFWLKWLSSSHTCLASQFQSSLESGSLPQFLTTGVTHLLHKSGSPAEPKNYRPITCLSTVYKLLTSILRVKINTHIDKNFIMSASQNGCRNRSRGTKELLLIDMAISQQVRRSRKDLSTCWIDYKKAYDSVPHTWLMRVLELYKIDATLRAFLESCMGQWRTVLRYPGCRQIQGNDEPVWIKRGIFQGDSLSPLWFCLALNPLSTLLEDSGLGYRLRRGGQVISHLLYMDDLKLFAPNKLRLMELLKVTETFSNAIRMEFGVDKCAVMYVKRGEIMESEGIQLSDSIHLRSLSSSESYKYLGMLESLGINVTDMKQSLRERFFGRLNKVLNSLLSGGNKVRAFNGWVMPVLMYSFGVLKWTQTELDALDRRVRTLLTANRMHHPRSSVMRLYIPRKCGGRGFLNAKTLHNREICSLREYFLKTEVGMHRDVVAVDKGLTPLSMAKENWRKPVVLTTDDRKEVWQGKELHGRFYRALHGPDVDFLASVSWLRFGDLFGETEGFVCAIMDEVMLTNNYRKYIMKDGTVDVCRACHRPGESIRHIISGCSRLANGEYLHRHNQVARIIHQQLALKYKLVESEVPYYKYVPDPVLEKDHVTLYWDRSIITDRTIVANKPDIVVIDRLARRVMIVDITIPHDENLVKAEKEKQIKYLDLAHEVVDMWNVNSAIIVPIVVTANGLIAKSLDDHLSRLSLGGWIKGLIQKAVLLDTARIVRRFLSLEP

SEQ ID NO: 29333 - protein, 1204 aa, Noctua janthe
MLTRRRAKLHETHPPSPGSSLSSASHSPGRATSVSAASPVAAVASGSSDEFFSPPSTPPPPRRRGRGRPPASLGPRGQQATNRVPAAGGNVSRIRWTQSMNENVMRAYYGSTEGGTNLTAYRVRMLSLFQVLEPIVNVSAQRLSDQVRVIQRNHMLDDAALDRLRSEVLSNRIVLTPAQTAVQASAIDATPPRSNPAVVEEDDRVAMVSSQCNDRLRSALEDALREYRSTPTKLRPRLPRLPMHNKNRALVCALDSQLKNIFESSENLFDTHSILYCGAVAACRLANVKFPNYDVAIRPKPAVPTWQRRIECRIDEARVLIGKLYCFREGNTRPRVMRFVRRAFSGTGISPQEYMSRVTERIDFLKQKVYAWANRIRRYKRRVDRYSQNRIFQTDERWVYRAWERPEQKMTDVCRPDDAATSSFWRSIWSVPVCHTEADWIRDVERTCEPIPEMEPILITPIDIARAVRPLPNWKSPGPDGLHNFWLKWLSSSHTCLASQFQSSLESGSLPQFLTTGVTHLLHKSGSPAEPKNYRPITCLSTVYKLLTSILRVKINTHIDKNFIMSASQNGCRNRSRGTKELLLIDMAISQQVRRSRKDLSTCWIDYKKAYDSVPHTWLMRVLELYKIDAILRAFLESCMGQWRTFLRYSGCRQIQGNDEPVWIKRGIFQGDSLSPLWFCLALNPLSTLLEDSGLGYRLRRGGQVISHLLYMDDLKLFAPNKLRLMELLKVTETFSNAIRMEFGVDKCAVMYVKRGEIMESEGIQLSDSIHLRSLSSSESYKYLGMSESLGINVTDMKQSLRERFFGRLNKVLNSLLSGGNKVRAFNGWVMPVLMYSFGVLKWTQTELDALDRRVRTLLTANRIHHPRSSVMRLYIPRKCGGRGFLNAKTLHNHEICSLREYFLKTEVGMHRDVVAVDKGLTPLSMAKENWRKPVVLTTDDRKEVWQGKELHGRFYRALHGPDVDFLASVSWLRFGDLFGETEGFVCAIMDEVMLTNNYRKYIMKDGTVDVCRACHRPGESIRHIISGCSRLANGEYLHRHNQVARIIHQQLALKYKLVESEVPYYKYVPDPVLEKDHVTLYWDRSIITDRTIVANKPDIVVIDRLARRVMIVDVTIPHDENLVKAEKEKQIKYLDLAHEVVDMWNVNSAIIVPIVVTANGLIAKSLDDHLSRLSLGGWIKGLIQKAVLLDTARIVRRFLSLEP

SEQ ID NO: 29334 - protein, 1200 aa, Mythimna ferrago
MLTRTAARRARHPPPGSSLSSASPPPDPGSPVSPAAAVASSSSDEYFSPPTSPTPVRRPGRGRPPKSMGPRGQPAPSRVPAAGGCVQRMRWTQSMNENVMRAYYGSTEGGTNLTAYRERMLSLFQVLEPTVNVSAQRLSDQVRVIQRNHRLDDAALDRLRSEILSNQIVSTSTQTQTAATPTTNAISPRSDHNNDDADDRVVTVSSQCNERLRSALEDALCEYMSTPTELRPRLPRLPMHKKNRALVCALDSLLKNIFESSENLVDTHSILYCGAVAACRLAKIKFPNIDGTIRPKTAVPAWQCRIERRIDEARVLIGKLHCFREGNTRPRVMRFVRRAFLGTGISPQGYMSRVTERIDFLKQKVCAWASRIRRYKRRVDRYSQNRMFQSDERWVYRAWERPEHSVIDECRPDDLATITFWRNIWSVPVSHTEGGWMRDVERVCDAIPEMEKVTITPEDVAKAVRPLPNWKSPGPDGLQNFWLKWYSSSHAPLASQFQSILESGSLPEYLTTGVTHLLHKTGNPVDPKNYRPITCLSTVYKLLTSILRAKINIHIENNQIISPSQNGCRNGSRGTKELLLIDMAISQQTRRSRKDLSTCWIDYKKAYDSVPHTWLMRVLELYKIDITLRTFLESCMRQWKTVLRYPGCRPIQGNDEPIWIKRGIFQGDSLSPLWFCLALNPLSTLLEDSGLGYRLRRGGQVISHLLYMDDLKLFAPSNLQLMELLKVTETFSSAIRMEFGVDKCAGMHVKRGEIMESEGIQLPDSIHLRSLSSTETYRYLGMSEALGINNADMKQSLKERFFGRLKKVLNSLLSGGNKVRAFNGWVMPVLMYSFGILKWTQTELDALDRRVRTLLTANRMHHPRSSVMRLYIPRKCGGRGFLNAKTLHNREVCSLREYFLKTDVGMHRDVVAVDKGLTPLSMAKEDWHKPVIMTTDNRKEIWKGKELHGRFFRALHEPDVDFLVSVAWLRFSDLFGETEGFVCAIMDEVILTNNYRRYIMKDGTVDVCRACHRPGESIRHIISGCSRLANGEYLHRHNQVARIIHQQLALKYNLVDLEVPYYKYVPDPVLENDHVTLYWDRSIITDRTIVANKPDIVVIDRLARRAMIVDITIPHDENLVKAEKEKQIKYLDLAHEIVAMWNVDSAIIVPIVVTANGLIAKSFDDHLSKLSLRGWIKGQIQKAVLLDTARIVRKFLSLEP

SEQ ID NO: 29335 - protein, 1200 aa, Mythimna ferrago
MLTRAAARRARHPPPGSSLSSASPPPDPGSPVSPVAAVASSSSDEYLSPPTSPTPVRRPGRGRPPKSMGPRGQPAPSRVPAVGGCVQRMRWTPSMNENVMRAYYGSTEGGTNLTAYRERMLTLFQDLEPTVNVSAQRLSDQVRVIQRNHRLDDAALDRLRSEILSNQIVSTSTQTQTAAAPTTNAISPRSDHNNDDADDRVVTVSSQCNERLRSALEDALCEYMSTPTELRPRLPRLPMHKKNRALVCALDSLLKNIFESSENLVDTHSILYCGAVAACRLANIKFPNIDGTIRPKSAVPAWQCRIERRIDEARVLIGKLHCFREGNTRPRVMRFVRRAFLGTGISPQGYMSRVTERIDFLKQKVCAWASRIRRYKRRVDRYSQNRMFQSDERWVYRAWERPEHSVIGECRPDDFATITFWRNIWSVPVSHAEGGWMRDVERVCEAIPEMEKVTITPEDVAKAVRPLPNWKSPGPDGLQNFWLKWYSSSHAPLASQFQSILESGPLPEYLTTGVTHLLHKTGNPVDPKNYRPITCLSTVYKLLTSILRAKINIHIENNQIISPSQNGCRNGSRGTKELLLIDMAISQQTRRSRKDLSTCWIDYKKAYDSVPHTWLMRVLELYKIDTTLRTFLESCMRQWKTVLRYPGCRPIQGNDEPIWIKRGIFQGDSLSPLWFCLALNPLSTLLEDSGLGYRLRRGGQVISHLLYMDDLKLFASSNLQLMELLKVTETFSSAIRMEFGVDKCAGMHVKRGEIMESEGIQLPDSIHLRSLSSTETYKYLGMSEALGINNADMKQSLKERFFGRLKKVLNSLLSGGNKVRAFNGWVMPVLMYSFGILKWTQTELDALDRRVRTLLTANRMHHPRSSVMRLYIPRKCGGRGFLNAKTLHNREVCSLREYFLKTDVGMHRDVVAVDKGLTPLSMAKEDWHKPVIMTTDNRKEIWKGKELHGRFFRALHEPDVDFLASVAWLRFSDLFGETEGFVCAIMDEVILTNNYRRYIMKDGTVDVCRACHRPGESIRHIISGCSRLANGEYLHRHNQVARIIHQQLALKYNLVDLEVPYYKYVPDPVLENDHVTLYWDRSIITDRTIVANKPDIVVIDRLARRAMIVDITIPHDENLVKAEKEKQMKYLDLAHEVVDMWNVDSAVIVPIVVTANGLIAKSFDDHLSKLSLRGWIKGQIQKAVLLDTARIVRKFLSLEP

SEQ ID NO: 29336 - protein, 1112 aa, Mythimna ferrago
MRWTQSMNENVMRAYYGSTEGGTNLTAYRERMLSLFQVLEPTVNVSAQRLSDQVRVIQRNHRLDDAALDRLRSEILSNQIVSTSTQTQTAATPTTNAISPRSDHNNDDGDDRVVTVSSQCNERLRSALEDALCEYMSTPTELRPRLPRLPMHKKNRALVCALDSLLKNIFESSENLVDTHSILYCGAVAACRLAKIKFPNIDGTIRPKTAVPAWQCRIERRIDEARVLIGKLHCFREGNTRPRVMRFVRRAFLGTGISPQGYMSRVTERIDFLKQKVCAWASRIRRYKRRVDRYSQNRMFQSDERWVYRAWERPERSVIDECRPDDLATITFWRNIWSVPVSHTEGGWMRDVERVCEAIPEMEKVTITPEDVAKAVRPLPNWKSPGPDGLQNFWLKWYSSSHAPLASQFQSILESGSLPEYLTTGVTHLLHKTGNPVDPKNYRPITCLSTVYKLLTSILRAKINIHIENNQIISPSQNGCRNGSRGTKELLLIDMAISQQTRRSRKDLSTCWIDYKKAYDSVPHTWLMRVLELYKIDITLRAFLESCMRQWKTVLRYPGCRPIQGNDEPIWIKRGIFQGDSLSPLWFCLALNPLSTLLEDSGLGYRLRRGGQVISHLLYMDDLKLFAPSNLQLMELLKVTETFSSAIRMEFGVDKCAGMHVKRGEIMESEGIQLPDSIHLRSLSSTETYRYLGMSEALGINNADMKQSLKERFFGRLKKVLNSLLSGGNKVRAFNGWVMPVLMYSFGILKWTQTELDALDRRVRTLLTANRMHHPRSSVMRLYIPRKCGGRGFLNAKTLHNREVCSLREYFLKTDVGMHRDVVAVDKGLTPLSMAKEDWHKPVIMTTDNRKEIWKGKELHGRFFRALHEPDVDFLASVAWLRFSDLFGETEGFVCAIMDEVILTNNYRRYIMKDGTVDVCRACHRPGESIRHIISGCSRLANGEYLHRHNQVARIIHQQLALKYNLVDLEVPYYKYVPDPVLENDHVTLYWDRSIITDRTIVANKPDIVVIDRLARRAMIVDITIPHDENLVKAEKEKQIKYLDLAHEIVDMWNVDSAIIVPIVVTANGLIAKSFDDHLSKLSLHGWIKGLIQKAVLLDTARIVRRFLSLEP

SEQ ID NO: 29337 - protein, 1201 aa, Hydraecia micacea
MLTRLAAKRARLTPPDSSLSSAPPPPESSPIESAVTPTVAVASSSSDEYFSPPTSPTPVRRQGRGRPPRSLGLRGQPAPSRVPATGGCVQRMRWTQFMNENVMRAYYGSTEGGTNLTAYRDRMLSLFQELEPTVNVSAQRLSDQVRVIQRNHRLDDIALDRLRSEVLSNHIVSTPAQTAAQTSTVDAIPPRSNHVEEEDDRVDTVSSQCNVRLRSALEDAFHEYRLTPTELRPRLPRLPMHKKNRALVCALNSQLKNFFESSEDLVDTHSILYCAAVAACRLANVKFPICDGATRPKPAVPAWQHRIERRIDGARVLIGKLYCFREGNTRPRVMRFVKRAFSGTGISPREYISHVTERIDFLKQKVCAWASRIRRYKRRIDRYTQNRMFQSDERWVYRAWERPEQNMTDVCRPDDATTSAFWRSIWSVPVCHTEAGWIQDVERVCETVPEMETILITPLDVARAVRPLPNWKSPGPDGLHNFWLKWLNSSHTCLASQFQSSLESGSLPQFLTTGVTHLLHKSGSPAEPKNYRPITCLSTVYKLLTSILRAKINTHIENNSIMSASQNGCRNGSRGTKELLLIDMAISQQVRRSRKDLSTCWIDYKKAYDSVPHTWLMRVLELYKIDATLRTFLESCMGQWKTVLRYPGCRQIQGNDEPVWIKRGIFQGDSLSPLWFCLALNPLSTLLEDSSLGYRLRRGGQVISHLLYMDDLKLFAPTGLHLMELLKVTETFSSAIRMEFGVDKCAVMHVKRGEIMESEGIQLSDSINLRSLSSSESYKYLGMSEALGINVTDMKQSLKERFFCRLRKVLISLLSGGNKVRAFNGWVMPVLMYSFGILKWTQTELDALDRRVRTLLTANRMHHPRSSVMRLYIPRKCGGRGFLNAKTLHNREVCSLREYFLKAEVGMHRDVVAVDKGLTPLSMAKENWRKPVVLTTDDRKKVWQSKELHGRFYRALHEPGVDFLASVSWLRFGDLFGETEGFVCAIMDEVILTNNYRRHIMKDGTVDVCRACHRPGESIRHIISGCSRLANGEYLHRHNQVARIIHQQLALKYKLVDSEVPYYKYVPDPVLENDHVTLYWDRSIITDRTIVANKPDIVVIDRLARRTMIVDVTIPHDGNLVKAEKEKQMKYLDLAHEVVDMWNVSSAVIVPIVVSANGLMAEGLDEHLSRLSLGGWIKSLIQKAVLLDTARIVRRFLSLEP

SEQ ID NO: 29338 - protein, 962 aa, Noctua pronuba
MHKKNRALVCALDSQLKNLFESSENLVDTHSILYCGAVAACRLANVKFTNSDTATRPKPAVPAWQCRIERRIDGARVLIGKLHCFREGNTRPRVMRFVRRAFSGTGISPQEYMSRVTERIDFLKQKVYAWANRIRRYKRRVDRYSQNRMFQSDERWVYRAWERPEQNMTDVCRPDHATTSSFWSSIWSVPVCHTEADWMRDVERMCEPIPEMEPILITPQDIARAVRPLPNWKSPGPDGLHNFWLKWLSSSHTCLASQFQSSLESGSLPQFLTTGVTHLLHKSGSPAEPKNYRPITCLSTVYKLLTSILRAKINTHIDKNSIMSASQNGCRNGSRGTKELLLIDMAISQQVRRSRKDLSTCWIDYKKAYDSVPHTWLMRVLELYKVDATLRAFLESCMGQWRTVLRYPGCRQIQGNNEPVWIKRGIFQGDSLSPLWFCLALNPLSTLLEDSGLGYRLRRGGQVISHLLYMDDLKLFAPNKLRLMELLKVTETFSSAIRMEFGVDKCAVMYVKRGEIMESEGIQLSDSIHLRSLSSSESYKYLGTSEALGINVTDMKQSLRERFFGRLKKVLNSLLSGGNKVRAFNGWVMPVLMYSFGILKWTQTELNALDRRVRTLLTANRMHHPRSSVMRLYIPRKCGGRGFLNAKTLHNREVCSLREYFLKAEVGMHRDVVAVDKGFTPLSMAKENWRKPVVLTTDDRKEVWQGKELHGRFYRALHGPDVDFLASVSWLRFGDLFGETEGFVCAIMDEVMLTNNYRKYVMKDGTVDVCRACHRPGESIRHIISGCSRLANGEYLHRHNQVARIIHQQLALKYKLVESEVPYYKYVPDPVLEKDHVTLYWDRSIITDRTIVANKPDIVVIDRSARRVMIVDVTIPHDENLVKAEKEKQIKYLDLAHEVVDMWNVNSAVIVPIVVTANGLMAKSFDDHLSKLSLGGWIKGLIQKAVLLDTARIVRRFLSLEP

SEQ ID NO: 29339 - protein, 1199 aa, Noctua pronuba
MITRAASRRARLPTPDSSLSSASPPPDPGSPVLPAAAVASSSSDEYFSPPTSPTPVRRQGRGRPLRSLGLRGHPAPSRVPATGGCVQRMRWTHPINENVMRAYYGSTEGGTNLTAYRVRMLSLFQVLEPTVKVSAQRLSDQVRVIQRNHMLDDAALDRLRSEVLSNPIVLTPSQTVVQASTIDITPPRSNPAVAEEDDRVATVSSQCNDRLRSALEDALREYRYTRTEFRPRLPRLPMHKKNRALVCALDSQLKNLFESSENLVDAHSILYCGAVAACRLANVKFTNSDTATRPKPAVPVWQCRIERRIDGARVLIGKLHCFREGNTRPRVMRFVRRAFSGTGISPQEYMSRVTERIDFLKQKVYAWANRIRRYKRRVDRYSQNRMFQSDERWVYRAWERPEQNMTDVCRPDDATTSSFWSSIWSVPVCHTEADWMRDVERMCEPIPEMEPILITPQDIARAVRPLPNWKSPGPDGLHNFWLKWLSSSHTCLASQFQSSLESGSLPQFLTTGVTHLLHKSGSPAEPKNYRPITCLSTVYKLLTSILRAKINTHIDKNSIMSASQNGCRNGSRGTKELLLIDMAVSQQVRRSRKDLSTCWIDYKKAYDSVPHTWLMRVLELYKVDATLRAFLESCMGQWRTVLRYPGCRQIQGNNEPVWIKRGIFQGDSLSPLWFCLALNPLSTLLEDSGLGYRLRRGGQVISHLLYMDDLKLFAPNKLRLMELLKVTETFSSAIRMEFGVDKCAVMYVKRGEIMESEGIQLSDSIHLRSLSSSESYKYLGMSEALGINVTDMKQSLRERFFGRLKKVLNSLLSGGNKVRAFNGWVMPVLMYSFGILKWTQTELDALDRRVRTLLTANRMHHPRSSVMRLYIPRKCGGRGFLNAKTLHNREVCSLREYFLKAEVGMHRDVVAVDKGFTPLSMAKENWRKPVVLTTDDRKEVWQGKELHGRFYRALHGPDVDFLASVSWLRFGDLFGETEGFVCAIMDEVMLTNNYRKYIMKDGTVDVCRACHRPGESIRHIISGCSRLADGEYLHRHNQVARIIHQQLALKYKLVESEVPYYKYVPDPVLEKDHVTLYWDRSIITDRTIVANKPDIVVIDRSARRVMIVDVTIPHDENLVKAEKEKQIKYLDLANEVVDMWNVNSAVIVPIVVTANGLMAKSFDDHLSKLSLGGWIKGLIQKAVLLDTARIVRRFLSLEP

SEQ ID NO: 29340 - protein, 1208 aa, Ochropleura plecta
MLTRRRAQEQQALPSSPGSSLSSASQPPGRATRVSAVSPVAAVASSSSDEFFSPPSSPPPPPTRQRRGRGRPPAGLGSRGQQAPIRVPAAGGNVSRMRWTSFINANVMRAYYGSTEGGTNLTAYRVRMLSLFQDLEPTINVSAQRLSDQVRVIQRNHLLDDAALDRLRSEVLSNRVILTTPQTAVQASAIDVTQPRSNPAVVEEDDRVATVSSQCNDRLRSALEDALRDYRSTPAELRPRLPRLPMHKKNRALVCALDSQLKNLFESSEDLVDTHSILYCGAVAVCRLANVKFPNCDVATRPKPSVPAWQCRIERRIDEARALIGKLYCFREGNTRPRVMRFVRRAFSGTGISPQEYMSRTTERIDFLKQKVYAWANRIQRYKRRVDRYSQNRMFRSDERWVYRAWERPEQSVTDVCRPDDVATSSFWHSIWSVRVCHTEAGWMRDVERVCETIPEMEPILITSLDIASAVRPLPNWKSPGPDGLHNFWLKWLSSSHTRLASQFQSCLESGSLPQFLTTGVTHLLYKSGSPAEPKNYRPITCLSTVYKLLTSILRAKINSHIVKNSIISASQNGCRNGSRGTKELLLIDMAISQQVRRSRKDLSTCWIDYKKAYDSVPHTWLKRVLELYKIDTTLRTFLESCMGQWRTVLRYPGCRQIQGNDEPVWIKRGIFQGDSLSPLWFCLALNPLSTLLEDSGLGYRLRRGGQVISHLFYMDDLKLFAPNKLRLMELLKVTETFSNAIRMEFGVDKCAVMYVKRGEIMESEGIHLSDSIHLRSLSSSESYKYLGMSEALGINVADMKQLLRERFFGRLKKVLKSLLSGGNKVRAFNSWVMPVLMYSFGILKWTQTELDALDRRVRTLLTANRMHHPRSSVMRLYIPRKCGGRGFLNAKTLHNREVCSLREYFLKTDVGMHRDVVAVDKGLTPLSMAKENWRKPVVLTTDYRKEVWQGKELHGRFYKALHGPDVDFLASVSWLRFGDLFGETEGFVCAIMDEVMLTNNYRKYIMKDGTVDVCRACHRPGESIRHIISGCSRLANGEYLHRHNQVARIIHQQLALKYNLVESEVPYYKYVPDPVLEKDHVTLYWDRSIITDRTIVANKPDIVVIDRSARRVMIIDVTIPHDENLVKAEKEKQLKYLDLAHEVVDMWNVNSAIIVPIVITANYGLIAKSLDEHLSKLSLGGWIKGLIQKAVLLDTARIVRRFLSLEP

SEQ ID NO: 29341 - protein, 1202 aa, Mythimna impura
MIMLTRAATRRARPSPLGSSLSSASPPPDLGSPVSPKAAVASSSSDEYFSPPTSPTPVRRPGRGRPPKSLGPRGQPAPSRVPATGGCVQRMKWTQSMNENVMRAYYGSTEGGTNLTAYRVRMLSLFQELEPTVNVTAQRLSDQVRVIQRNHRLDGAALDRLRSEVLSNRIISTPSQTQTEAPQATDAILPRSNHIDDEPDDRVVTVSSQCNDRLRSALEDALREYRSTPIALRPRLPRLPMHKKNRALVCALDSLLENVFESSVNLADTHSILYCGAIAACRLANVKLPSCDGATRPKPAAPAWQCRIERRIDEARALIGKLYCFREGNTRPRVMRYVRRAFSGTEISPREYLSRVTERIDFLKQKVCAWANRIRRYKRRVDRYSQNRMFQSDERWVYRAWERPEQNVTDVTRPDAVATNTFWRNIWSVPVCHTEDDWMREVERVCEAIPEMEKIVISPIDVARAVRPLPNWKSPGPDGLQNFWLKWYSSSHALLASQFQSSLESGSLPQFLTTGVTHLLHKTGSTAEPKNYRPITCLSTVYKLLTSILRTKINKHIDSNSIMSASQNGCRNGSRGTKELLLIDMAISQQVRRSRKDLSTCWIDYKKAYDSVPHTWLMRVLELYKIDATLRTFLESCMGQWNTVLRYPGCRSIRRDDEPIWIKRGIFQGDSLSPLWYCLALNPLSTLLEESGLGYRLRRGGQVLSHLLYMDDLKLIAPNKLRLMELLKVTETFSSAIRMEFGVDKCAVMHVKRGEILESEGIQLSDSIHFRSLSSTETYKYLGMSEALGINVADMKQSLKERFFGRLKKVLNSLLSGGNKVRAFNGWVMPVLMYSFGILKWTQTELDAVDRRVRTLLTANRMHHPRSSVMRLYIPRKCGGRGFLNAKTLHNREVCSLREYFHKTDVGMHRDVVAVDKGLTPLSMAKENWRKPVVLTTDDRKEVWKSKELHGRFYRALHESDIDFAASVAWLRFSNLFGETEGFICAIMDEVILTNNYRRYIMKDGTVDVCRACHRPGESIRHIISGCSRLANGEYLHRHNQVARIIHQQLALKYNLVDYEVPYYRYVPDPVLENDHVTLYWDRSIITDRTIVANKPDIVVIDRLARRVMIVDVTIPHDENLVKAEKEKQIKYLDLAHEVVGMWNVDSAVIVPIVVTANGLIAKSFDDHLSKLSLRGWIKGLIQKAVLLDTARIVRRFLSLEP

SEQ ID NO: 29342 - protein, 1202 aa, Mythimna impura
MIMLTRAATRRTRPSPLGSSLSSASPPPDLGSPVSPTAAVASSSSDEYFSPPTSPTPVRRPGRGRPPKSLGPRGQPAPSRVPATGGCVQRMKWTQSMNENVMRAYYGSTEGGTNLTAYRVRMLSLFQELEPTVNVTAQRLSDQVRVIQRNHRLDGAALDRLRSEVLSNRIISTPSQTQTEAPQATDAILPRSNHIDDEADDRVVTVSSQCNDRLRSALEDALREYRSTPIALRPRLPRLPMHKKNRALVCALDSLLENVFESSVNLADTHSILYCGAIAACRLANVKLPSCDGATRPKPAAPAWQCRIERRIDEARALIGKLYCFREGNTRPRVMRYVRRAFSGTVISPREYLSRVTERIDFLKQKVCAWANRIRRYKRRVDRYSQNRMFQSDERWVYRAWERPEQNVTDVTRPDAVATNTFWRNIWSVPVCHTEDGWMREVERVCEAIPEMEKIVISPIDVARAVRPLPNWKSPGPDGLQNFWLKWYSSSHALLASQFQSSLESGSLPQFLTTGVTHLLHKTGSTAEPKNYRPITCLSTVYKLLTSILRTKINKHIDSNSIMSASQNGCRNGSRGTKELLLIDMAISQQVRRSRKDLSTCWIDYKKAYDSVPHTWLMRVLELYKIDATLRTFLESCMGQWNTVLRYPGCRSIRRDDEPIWIKRGIFQGDSLSPLWFCLALNPLSTLLEESGLGYRLRRGGQVLSHLLYMDDLKLIAPNKLRLMELLKVTETFSSAIRMEFGVDKCAVMHVKRGEIMESEGIQLSDSIHFRSLSSTETYKYLGMSEALGINVADMKQSLKERFFGRLKKVLNSLLSGGNKVRAFNGWVMPVLMYSFGILKWTQTELDAVDRRVRTLLTANRMHHPRSSVMRLYIPRKCGGRGFLNAKTLHNREVCSLREYFHKTDVGMHRDVVAVDKGLTPLSMAKENWRKPVVLTTDDRKEVWKSKELHGRFYRALHESDIDFAASVAWLRFSNLFGETEGFICAIMDEVILTNNYRRYIMKDGTVDVCRACHRPGESIRHIISGCSRLANGEYLHRHNQVARIIHQQLALKYNLVDYEVPYYRYVPDPVLENDHVTLYWDRSIITDRTIVANKPDIVVIDRLARRVMIVDVTIPHDENLVKAEKEKQIKYLDLAHEVVDMWNVDSAVIVPIVVTANGLIAKSFDDHLSKLSLRGWIKGLIQKAVLLDTARIVRRFLSLEP

SEQ ID NO: 29343 - protein, 1199 aa, Phlogophora meticulosa
MLTRAAKRRARPPSPDSPLSSASPPPDLGSPVTPTVAAASSSSDEYFSPPTSPTPVRWQGRGRPPKSLGSRGQPAPSQVPATGGCVQRMRWTQSMNENVMRAYYGSTEGGTNLTAYRARMLSLFQVLEPTVNVSAQRLSDQVRVIQRNHRLDDTALDRLRSEVLNNHIVLTSTQTAVQASIINATPSPSNHVSEEADDRVVTVSSQCNEKLRSALEDALREYRSTPTELRPRLPRLPMHKKNRALVCNLDSLLKDLFESSGDLVDTHSILYCAAVAACRLANVKFPNNDVAIRPKPAVPAWQSRIERRIDGARVLIGKLYCFREGNTRPRVMRFVRRAFAGTGISPREYMSRIVERIDFLKQKVYAWANRIRRYKRRVDRYSQNRMFQSDERWVYRAWERPEQDVADVHRPDDTTTNTFWRNIWSVPVCHTEAHWIRDVERVCETITEMEKIIITPLDVATAVRPLPNWKAPGPDGLHNFWLKWLGSSHTRLASQFQSCLESGSLPQFLTTGITHLLYKSGSTTEPKNYRPITCLSTVYKLLTSILRAKIAEHIVGNSIMSASQNGCRNGSRGTKELLLIDMAISQQVRRSHKDLSTCWIDYKKAYDSVPHAWLMRVLELYKIDATLRTFLESCMGQWRTVLRYPGCRQIQGNDEPIWIKRGIFQGDSLSPLWFCLALNPLSTLLEDSGLGYRLRRGGQVISHLLYMDDLKLFASNNLQLMELLKITESFSSTIRMEFGVDKCAVMHVKRGEIVESEGIQLPDSIQLRSLSSSDNYKYLGMSEALGINVTDMKQSLKERFFGHLKKVLNSLLSGGNKVRAFNGWVMPVLMYSFGILKWTQTELDALDRRVRTLLTANRMHHPRSSVMRLYIPRKCGGRGFLNAKTLYNREVCNLRDYFLKTEVGMHRDVVAVDKGLTPLSMAKENWRKPVVLTTDDRKQVWQSKELHGRFYRALHGPDVDFIASVSWLRFGDLFGETEGFVCAIMDEVILTNNYRKHIMKDGTVDMCRACHRPGESIRHIISGCSRLANGEYLHRHNQVARIIHQQLALRYKLVESEVPYYKYVPDPVLEDDHVTLYWDRSIITDRTIVANKPDIVVIDRLARRAMIVDVTIPHDENLVKAEKEKQIKYLDLAHEVVDMWNVDSAVIVPIVVTANGLLAKSLDDHLSRLSLHGWIKGLIQKAVLLDTARIVRRFLSLQP

SEQ ID NO: 29344 - protein, 1199 aa, Phlogophora meticulosa
MITRAATRRARPPSPDSPLSSASPPPDLGSPVTPTVAAASSSSDEYFSPPTSPTPVRRQGRGRPPKSLGSRGQPAPSQVPATGGCVQRMRWTQSMNENVMRAYYGSTEGGTNLTAYRVRMLSLFQGFEPTVNVSAQRLSDQVRVIQRNHRLDDAALDRLRSEMLSNHIVLTSTQTAVQAPAFNAILPRSNHVSNEADDRVDTVCSQYNDRLRSALEDALREYRSTPTELRPRLPRLSMHRKNRALVCALDSLLKNFFESSEDLVDTHSILYCAAVAACRLANVKFPKNDLAIRPKPAVPAWQSRIERRIDGARVLIGKLYCFREGNTRPRVMRFVRRAFSGTGISPREYMSRIVERIDFLKQKVCAWANRIRRYKRRVDRYSQNRMFQSDERWVYRAWERPEQDVAGEHRLDDVATNAFWRSIWSVPAHHVEAHWMSDYESVCETIPEMEKIIITPEDVATAVRPVPNWKSPGPDGLHNFWLKWLSSSHTRLASQFQSCLESGSLPQFITTGITHLLYKSGSTTEPKNYRPITCLSTVYKLLTSILRAKITEHIVGNSIMSASQNGCRNGSRGTKELLLIDMAISQQVRRSRKDLSTCWIDYKKAYDSVPHAWLTRVLELYKIDATLRTFLASCMGQWKTVLRYPGCRQIQGNDEPIWIKRGIFQGDSLSPLWFCLALNPLSTLLEDSGLGYRLKRGGQVISHLLYMDDLKLFAPNNLRLMELLKITESFSSAIRMEFGVDKCAVMHVKRGEIVESEGIQLSDSIHLRSLSSSENYKYLGMSEALGINATDMKQSLKERFFGRLKKVLNCLLSGGNKVRAFNGWVMPVLMYSFGILKWTQTELDALDRRVRTLLTANRMHHPRSSVMRLYIPRKCGGRGFLNAKTLHNREVCNLREYFLKTEVGMHRDVVAVDKGLTPLSMAKENWRKPVVLTTDDRKQVWQSKELHGRFYRALHGPDVDFLASVSWLRFGDLFGETEGFVCAIMDEVILTNNYRKHIMKDGTVDMCRACHRPGESIRHIISGCSRLANGEYLHRHNQVARIIHQQLALRYKLVESEVPYYKYVPDPVLEDDHVTLYWDRSIITDRTIVANKPDIVVIDRLARRAMIVDVTIPHDENLVKAEKEKQIKYLDLAHEVVDMWNVDSAVIVPIVVTANGLLAKSLDDHLSRLSLHGWIKGLIQKAVLLDTARIVRRFLSLQP

SEQ ID NO: 29345 - protein, 1199 aa, Xestia xanthographa
MLTRAAARRARLPSPESSLSSASPPPDPGSPVSPVAAVASSSSDEYFSPPTSPPPVCRAGRGRPPTSLGLRGQQAPSRVPATGGCVQRMKWTQSINENVMRAYYGSTEGGTNLTAYRVRMLSLFQDLKPTVNVSAQRLSDQVRVIQRNHRLDDAALDRLRSEVLSNLIILTPTQTAVHTSVNNVTLPRSNPDVVEEDDRVATVSSQCNYRLRSALEDAFREYRSTPTELRPRLPRLPMHKKNRALVCALDSQLKNIFESSENLVDTHSILFCGAVAACRLANVKFPNCDVATRPKPAVPAWQCRIERRIDEARVLIGKLYCFREGNTRPRVMRFVRRAFSGTEISPQEYMSRVTERIDFLKQKVYAWANRIRRYKRRVDRYSQNRMFQSDERWVYRAWERPEQNITDVCRSDDAATSSFWRSIWSVPVCHTESDWMRDVERVCEPIQEMEPILITPLDIAKAVRPLPNWKSPGPDGLHNFWLKWFSSSHTCLASQFQSSLESGSLPQFLTTGVTHLLHKSGSPAEPKNYRPITCLSTIYKLLTSILRVKINTHIDKNSIMSASQNGCRNGSRGTKELLLIDMAISQQVRRSRKDLSTCWIDYKKAYDSVPHTWLMRVLELYKIDTTLRAFLESCMGQWKTVLRYPGCRQIQGSDEPVWIKRGIFQGDSLSPLWFCLALNPLSILLENSGLGYRLRKDGQVISHLLYMDDLKLFAPNKLRLMELLKVTETFSSAIRMEFGVDKCAVMYVKRGEIMESEGLQLSDSIHLRSLSSSETYKYLGMSEALGINVTDMKQSLKERFFGRLRKVLNSLLSGGNKVRAFNGWVMPVLMYSFGILKWTQTELDALDRRVRTLLTETRMHHPRSSVMRLYIPRKCGGRGFLNAKTLHNREVCSLREYFLKAEVGMHRDVVAVDKGLTPLSMAKENWHKPEVLTTDDRKEVWQGKELHGRFYRALHGPDVDFLASVFWLRFGDLFGETEGFVCAIMDEVMLTNNYRKYIMKDGTVDVCRACHLPGESIRHIISGCSRLANGEYLHRHNQVARIIHQQLALKYKLVESEVPYYKYVPDPVLEKDHVTLYWDRSIITDRTIVANKPDIVMIDRSARRVMIIDVTIPHDENLVKAEKEKQIKYLDLAHEVRDMWNMNSVIIVPIVVTANGLIAKSFDDHISKLSLGGWIKGLIQKAVLLDTARIVRRFLSLQP

SEQ ID NO: 29346 - protein, 1080 aa, Xestia xanthographa
MLSLFQDLEPTVIVSAQRLSDQVRVIQRSHRLDDAALDRLRSEVLSNRIIFTPTQTAVQVTAIDAILPRSNPAVVEEDDGVATVSSQCNDRLRSALENALHEYRSTPTELRPRLPRLPMHKKNRALVCALDSQLKNIFESSENLVDTHSTLFCGAVAACRIANVKFPNCDVATRPKPAVPAWQRRIERRIDGARVLIGKLYCFREGNTRPRVMRFVRRAFSGTEISPQEYMSRATERIDFLKQKVYAWANRIRRYKRRVDRYSQNLMFQSDERWVYRAWERPEQNMTDVCRPDDAATSSFWRSIWSVPVCHTEADWMRDVERVCEPIPEMEPIFITPLDVARAVRPLPNWKSPGPDGLHNFWLKWFSSSHTCLASQFQSSLESGSLPQFLTTGVTHLLHKSGSPAEPKNYRPITCLSTIYKLLTSILRVKINTHIDKNSIMSASQNGCRNGSRGIMELLLIDMAISQQVRRSRKDLSTCWIDYKKAYDSVPHTWLMRVLELYKVDTTLRTFLESCMEQWKTVLRYPGCRQIQGSDEPVWIKRGIFQGDSLSPLWFCLALNPLSTLLENSGLGCRLRKDGQVISHLLYMDDLKLFAPNKLRLMELLKVTETFSSAIRMEFGVDKCAVMYVKRGEIMESEGLQLSDSIHLKSLSSSETYKYLGMSEALGINVTDMKQSLRERFFGRLRKVLNSLLSGGNKVRAFNGWVMPVLMYSFGILKWTQTELDALDRRVRTLLAESRMHHPRSSVMRLYIPRKCGGRGFLNAKTLHNREVCSLREYFLKAEVGMHRDVVAVDKGLTPLSMAKENWHRPEVLTTDDRKEVWQGKELHGRFYRALHGPDVDFIASVSWLRFGDLFGETEGFVCAIMDEVMLTNNYRKYIMKDGTVDVCRACHLPGESIRHIISGCSRLANGEYLHRHNQVARIIHQQLALKYKLVESEVPYYKYVPDPVLENDHVTLYWDRSIITDRTIVANKPDIVMMDRSARRVMIIDVTIPHDENLVKAEKEKQIKYLDLAHEVRGMWNMNSVIIVPIVVTANGLIAKSFDDHLSKLSLGGWIKGLIQKAVLLDTARIVRRFLSLQP

SEQ ID NO: 29347 - protein, 1100 aa, Xestia xanthographa
MRAYYGSTEGGTNLTAYRVRMLSLFQDLEPTVNVSAQRLSDQVRVIQRSHRLDDAALDRLRSEVLSNRIVFTPTQTAVQMTAIDAILPRSNPAVVEEDDRVATVSSQCNDRLRSALENALHEYRSTPTELRPRLPRLPMHKKNRALVCVLDSQLKNIFESSENLVDTHSILFCGAVAACRIANVKFPNCDVATRPKPAVPAWRRRIERRIDGARVLIGKLYCFREGNTRPRVMRFVRRAFSGTEISPQEYMSRVTERIDFLKQKVYAWANRIRRYKRRVDRYSQNRMFQSDKRWVYRAWERPEQNMTDVCRPDDAATSSFWRSIWSVPVCHTEADWMRDVERVCEPIPEMEPIFITPLDVARAVRPLPNWKSPGPDGLHNFWLKWFSSSHTCLASQFQSSLESGSLPQFLTTGFTHLLHKSGSPAEPKNYRPITCLSTIYKLLTSILRVKINTHIDKNSIMSASQNGCRNGSRGTKELLLIDMAISQQVRRSRKDLSTCWIDYKKAYDSVPHTWLMRVLELYKIDATLRTFLESCMGQWKTVLRYPGCRQIQGSDEPVWIKRGIFQGDSLSPLWFCLALNPLSTLLENSGLGCRLRKDGQVISHLLYMDDLKLFAPNKLQLMELLKVTETFSSAIRMEFGVDKCAVMYVKRGEIMESDGTQLSDSIHLRSLSSTETYKYLGMSEALGINVTDMKQSLRERFFGRLRKVLNSLLSGGNKVRAFNGWVMPVLMYSFGILKWTQTELDALDRRVRTLLTESRMHHPRSSVMRLYIPRKCGGRGFLNAKTLHNREVCSLREYFFKAEVGMHRDVVAVDKGLTPLSMAKENWHRPEVLTTDDRKEVWQGKELHGRFYRALHGPDVDFLASVSWLCFGDLFGETEGFVCAIMDEVMLTNNYRKYIMKDGTVDVCRACHLPGESIRHIISGCSRLANGEYLHRHNQVARIIHQQLALKYKLVESEVPYYKYVPDPVLEKDHVTLYWDRSIITDRTIVANKPDIVMMDRSARRVMIIDVTIPHDENLVKAEKEKQIKYLDLAHEVRDMWNMNSVIIVPIVVTANGLIAKSFDDHLSKLSLGGWIKGLIQKAVLLDTARIVRRFLSLQP

SEQ ID NO: 29348 - protein, 962 aa, Mamestra brassicae
MHKKNRALVCALDSLLQNIFESSESLVDTHSILFCGAVAACRIANVKFPSCDEAIRPKPAAPAWQCRIERRIDEARALIGKLYCFREGNTRPRVMRFVRRAFSGTGISSREYTFRVTERIDFLKQKVCAWANRIRRYKRRVDRYSQNPMFQSDERWVYRAWERPEQSVTDVYRPDDVATSTFWRSIWSVPICHAEGGWMRDVERVCEAIPQMEKITITTLDIAKAVRPLPNWKSPGPDGLHNFWLKWYSSSHALLASQFQSSLESGSLPQFLTTGITHLLHKTGSPAEPKNYRPITCLSTVYKLLTSILRAKINEHIENNSIMSASQNGCRKGSRGTKELLLIDMAISQQVRRSRKDLSTCWIDYKKAYDSVPHTWLMKVLELYKIDATLRTFLESCMRQWKTVLRYPGCQPIQGSDEPVWIKRGIFQGDSLSPLWFCLALNPLSTLLEDSGLGYRLRRGGQAISHLFYMDDLKLFAPNNLRLMELLKVTETFSSAIRMEFGVDKCAVMHVKKGEIMESEGIQLSDSIQVRSLSSTESYKYLDMSEALGINGTDMKQSLRERFFGRLKKVLNSLLSGGNKVHAFNGWVMPVLMYTFGILKWTQTELDALDRRVRTLLTANRMHHPRSSVMRLYIPRKCGGRGFLNAKTLHNREMCSLREYFLKADVGMHRDVVAVDKGLTPLSMAKENWRKPVILTTDDRKEVWKGKELHGRFYRALYGSDVDFSASVAWLRFGDLFGETEGFVCAIMDEVILTNNYRKHIMKDGTVDVCRACHRPGESIRHIISGCSRLANGEYLHRHNQVARIIHQQLALKYKLVDSEVPYYKYVPDPVLENDHVTLYWDRSIITDRTIVANKPDIVVIDRLARRTMIIDVTIPHVENLVKAEKEKQIKYLDLAHEVVDMWNVDSAVIVPIVITANGLMAKSFDDHLSKLALRGWIKGLIQKAVLLDTARIVRRFLSLEP

SEQ ID NO: 29349 - protein, 1111 aa, Mamestra brassicae
MRWTQSMNENVMRAYYGSTEGGTNLTAYRVRMLSLFQDLEPTVNVSAQRLSDQVRVIQRNHRLDDAALDRLRSEVLNNLIISTPTQTAVQAPVNGRITPRPNNVSDEVDDRVVTVSSQCNDRLRSALEDALREYRSTPTELRPRLLRLPMHKKNRALVCALDSLLQNIFESSESLVDTHSILYCGAVAACRIANVKFPGCDEAIRPKPAAPAWQRRIERRIDETRALIGKLYCFREGNTRPRVMRFVRRAFSGTEISPRDFTSRVTERIDFLKQKVCAWASRIRRYKRRVDRYSQNRMFQSDERWVYRAWERPEQSVTDVCRPDDVATSIFWRSIWSVPICHAEGGWMRDVERVCEAIPQMEKITITTLDVAKAVRPLPNWKSPGPDGLHNFWLKWYSSSHALLASQFQSSLDSGSLPQFLTTGVTHLLHKTGSPTEPKNYRPITCLSTVYKLLTSILRAKINEHIESNSIMSASQNGCRKGSRGTKELLLIDMAISQQVRRSRKDLSTCWIDYKKAYDSVPHTWLMKVLELYKIDATLRTFLESCMRQWKTVLRYPGCRPIQGSDEPVWIKRGIFQGDSLSPLWFCLALNPLSTLLEDSGLGYRLRRGGQAISHLLYMDDLKLFAPNNLRLMELLKVTETFSSAIRMEFGVDKCAVMHVKKGEIMESEGIHLSDSIQVRSLSSTETYKYLGMLEALGINGTDMKQSLKERFFGRLKKVLNSLLSGGNKVRAFNGWVMPVLMYTFGILKWTQTELDALDRRVRTLLTANRMHHPRSSVMRLYIPRKCGGRGFLNAKTLHNREMCSLREYFLKADVGMHRDVVAVDKGLTPLSMAKENWRTPVILTTDDRKEVWKGKELHGRFYRALHGSDVDFSASVAWLRFGDLFGETEGFVCAIMDEVILTNNYRRHIMKDGTVDMCRACHRPGESIRHIISGCSRLANGEYLHRHNQVARIIHQQLALKYNLVDSEVPYYKYVPDPVLENDHVTLYWDRSIITDRTIVANKPDIVVIDRLARRTMIIDVTIPHDENLVKAEKEKQIKYLDLAHEVVDMWNVESAVIVPIVVTANGLMAKSFDDHLSKLALRSWVKGLIQKAVLLDTARIVRRFLSLEP

SEQ ID NO: 29350 - protein, 1202 aa, Noctua fimbriata
MLTRAAARRARLPPPDPSLSSASPPPESSHIVSAVTPAVAVASSSSDEYFSPPTSPTPVRRQGRGRPPRSLGLRGHPAPSRVPAAGGCVQRMRWTHSINENVMRAYYGSTEGGTNLTAYRVGMLSLFQVLEPTVNVAAQRLSDQVRVIQRNHMLDDAVLDRLRSEVLSNRIVLTPAQTAVQASVIDATPPRFNPAVVEEEDRVAVVSSQCNDRLRSALEDALREYRSTPTELRPRLPRLPMHNKNRALVCALDSQLENIFESSENLVDTHSILYCGAVAACRLANVKFPNCDVATRPKPAVPAWQRRIERRIDGARVLIGKLHCFREGNTRPRVMRFVRRAFSGTGISPQEYMSRATERIDFLKQKVYAWANRIRRYKRRVDRYSQNRMFQSDERWVYRAWERPELNMTDVCRPDDAATSSFWRSIWSVPVCHTEADWMCDVERVCEPIPEMEPILITPLDIARAVRPLPNWKSPGPDGLHNFWLKWLSSSHTCLASQFQSSLESGSLPQFLTTGVTHLLHKSGSPAEPKNYRPITCLSTVYKLLTSILRAKINTHIDKNSIMSASQNGCRNGSRGTKELLLIDMAISQQVRRSRKDLSTCWIDYKKAYDSVPHTWLMRVLELYKIDATLRAFLESCMGQWRTVLRYPGCRQIQGNDEPVWIKRGIFQGDSLSPLWFCLALNPLSTLLEDSGLGYRLRRGGQVISHLLYMDDLKLFAPNELRLMELLKVTETFSSAIRMEFGVDKCAVMYVKQGEIMESEGIQLSDSIHLRTLSSTESYKYLGMSEALGINVTDMKQSLKECFFGRLNKVLHSLLSGGNKVRAFNGWVMPVLMYSFGVLKWTQTELDALDRRVRTLLTANRMHHPRSSVMRLYIPRKCGGRGFLNAKSLHNREMCSLREYFFKVEVGMHRDVVAVDKGLTPLSMAKENWRKPEVLTTDDRKEVWQGKELHGRFYRALHGPDVDFLASVSWLRFGDLFGETEGFVCAIMDEVMLTNNYRKYIMKDGTVDVCRACHRPGESIRHIISGCSRLANGEYLHRHNQVARIIHQQLALKYKLVESEVPYYKYVPDPVLEKDHVTLYWDQSIITDRTIVANKPDIVVIDRSARRVMIVDVTIPHDENLVKAEKEKQIKYLDLAHEVVDMWNVNSAIIVPIVVTANGLIAKSLDDHLSRLSLGGWIKGLIQKAVLLDTARIVRRFLSLEP

SEQ ID NO: 29351 - protein, 1202 aa, Noctua fimbriata
MITRAAYRRARLPPPDPSLSSASPPPESSPIVSAVTPAVAVASSSSDEYFSPPTSPTPVRRQGRGRPPRSLGLRGHPAPSRVPAAGGCVQRMRWTHSINENVMRAYYGSTEGGTNLTAYRVGMLSLFQVLEPTVNVSAQRLSDQVRVIQRNHMLDDAVLDRLRSEVLSNRIVLTPAQTAVQASVIDATPPRFNPAVVEEDDRVAVVSSQCNDRLRSALEDALREYRSTPTELRPRLPRLPMHNKNRALVCALDSQLENIFESSENLVDTHSILYCGAVAACRLANVKFSNCDVATRPKPAVPAWQRRIERRIDGARVLIGKLHCFREGNTRPRVMRFVRRAFSGTGISPQEYMSRVTERIDFLKQKVYAWANRIRRYKRRVDRYSQNRMFQSDERWVYRTWERPELNMTDVCRPDDAATSSFWRSIWSVPVCHTEADWMRDVERVCEPIPEMEPILITPLDIARAVRPLPNWKSPGPDGLHNFWLKWLSSSHTCLASQFQSSLESGSLPQFLTTGVTHLLHKSGSPAEPKNYRPITCLSTVYKLLTSILRAKINTHIDKNSIMSASQNGCRNGSRGTKELLLIDMAISQQVRRSRKDLSTCWIDYKKAYDSVPHTWLMRVLELYKIDATLRAFLESCMGQWRTVLRYPGCRQIQGNDEPVWIKRGIFQGDSLSPLWFCLALNPLSTLLEDSGLGYRLRRGGQVISHLLYMDDLKLFAPNKLQLMELLKVTETFSSAIRMEFGVDKCAVMYVKRGEIMESEGIQLSDFIHLRSLSSSESYKYLGMSEALGINVTDMKQSLKERFFGRLNKVLHSLLSGGNKVRAFNGWVMPVLMYSFGVLKWTQTELDALDRRVRTLLTANRMHHPRSSVMRLYIPRKCGGRGFLNAKSLHNREMCSLREYFLKVEVGMHRDVVAVDKGLTPLSMAKENWRKPEVLTTDDRKEVWQGKELHGRFYRALHGPDVDFLASVSWLRFGDLFGETEGFVCAIMDEVMLTNNYRKYIMKDGTVDVCRACHRPGESIRHIISGCSRLANGEYLHRHNQVARIIHQQLALKYKLVESEVPYYKYVPDPVLEKNHVTLYWDQSIITDRTIVANKPDIVVIDRSARRVMIVDVTIPHDENLVKAEKEKQLKYLDLAHEVVDMWNVNSAIIVPIVVTANGLIAKSLDDHLSKLSLGGWIKGLIQKAVLLDTARIVRRFLSLEP

SEQ ID NO: 29352 - protein, 1050 aa, Noctua fimbriata
MLDDAVLDRLRSEVLSNRIVFTPAQTAVQASVIDATPPRFNPAVVEEDDRVAVVSSQCNDRLRSALEDALREYRSTPTELRPRLPRLPMHNKNRALVCALDSQLKNLFESSENLVDTHSILYCGAVAACRLANVKFPNCDVATRPKPAVPAWQRRIECRIDGARVLIGKLHCFREGNTRPRVMHFVRRAFSGTGISPQEYMSRVTERIDFLKQKVYAWANRIRRYKRRVDRYSQNRMFQSDERWVYRAWERPDQNMTDVCRPDDAATSSFWCSIWSVPVCHTEADWMRDVEQVCEPIPEMEPILITPLDVARAVRPLPNWKSPGPDGLHNFWLKWLSSSHTCLASQFQSSLESGSLPQFLTTGVTHLLHKSGSPAEPKNYRPITCLSTVYKLLTSILRAKINTHIDKNSIMSASQNGCRNGSRATKELLLIDMAISQQVRRSRKDLSTCWIDYKKAYDSVPHTWLMRVLELYKIDATLRAFLESCMGQWRTVLRYPGCRQIQGNDEPVWIKRGIFQGDSLSPLWFCLALNPLSTLLEDSGLGYRLRRGGQVISHLLYMDDLKLFAPNKLQLMELLKVTETFSSAIRMEFGVDKCAVMYVKQGEIMESEGIQLSDSIHLRTLSSTESYKYLGMSEALGINVTDMKQSLKERFFGRLNKVLHSLLSGGNKVRAFNGWVMPVLMYSFGVLKWTQTELDALDRRVRTLLTANRMHHPRSSVMRLYIPRKCGGRGFLNAKSLHIREKCSLREYFLKVEVGMHRDVVAVDKGLTPLSMAKENWRKPEVLTTDDRKEVWQGKELHGRFYRALHGPDVDFLASVSWLRFGDLFGETEGFVCAIMDEVMLTNNYRKYIMKDGTVDVCRACHRPGESIRHIISGCSRLANGEYLHRHKQVARIIHQQLALKYKLVESEVPYYKYVPDPVLEKDHVTLYWDQSIITDRTIVANKPDIVVIDRSARRVMIVDVTIPHDENLVKAEKEKQIKYLDLAHEVVDMWNVNSAIIVPIVVTANGLIAKSLDDHLSKLSLGGWIKGLIQKAVLLDTARIVRRFLSLEP

SEQ ID NO: 29353 - protein, 1202 aa, Noctua fimbriata
MITRAAYRRARLPPPDPSLSSASPPPKSSPIVSAVTPAVAVASSSSDEYFSPPTSPTPVRRQGRGRPPRSLGLRGHPAPSRVPAAGGCVQRMRWTHSINENVMRAYYGSTEGGTNLTAYRVGMLSLFQVLEPTVNVSAQRLSDQVRVIQRNHMLDDAVLDRLRSEVLSNRIVLTPAQTAVQASVIDATPPRFNPAVEEEDDRVAVVSSQCNDRLRSALEDALREYRSTPTELRPRLPRLPMHNKNRALVCALDSQLENIFESSENLVDTHSILYCGAVAACRLANVKFSNCDVATRPKPAVPAWQRRIERRIDGARVLIGKLHCFREGNTRPRVMRFVRRAFSGTGISPQEYMSRVTERIDFLKQKVYAWANRIRRYKRRVDRYSQNRMFQSDERWVYRAWERPELNMTDVCRPDDAATSSFWRSIWSVPVCHTEADWMRDVERVCEPIPEMEPILITPLDIARAVRPLPNWKSPGPDGLHNFWLKWLSSSHTCLASQFQSSLESGSLPQFLTTGVTHLLHKSGSPAEPKNYRPITCLSTVYKLLTSILRAKINTHIDKNSIMSASQNGCRNGSRGTKELLLIDMAISQQVRRSRKDLSTCWIDYKKAYDSVPHTWLMRVLELYKIDATLRAFLESCMGLWRTVLRYPGCRQIQGNDEPVWIKRGIFQGDSLSPLWFCLALNPLSTLLEDSGLGYRLRRGGQVISHLLYMDDLKLFAPNKLQLMELLKVTETFSSAIRMEFGVDKCAVMYVKRGEIMESEGIQLSDFIHLRSLSSSESYKYLGMSEALGINVTDMKQSLKERFFGRLNKVLHSLLSGGNKVRAFNGWVMPVLMYSFGVLKWTQTELDALDRRVRTLLTANRMHHPRSSVMRLYIPRKCGGRGFLNAKSLHNREMCSLREYFLKVEVGMHRDVVAVDKGLTPLSMAKENWRKPEVLTTDDRKEVWQGKELHGRFYRALHGPDVDFLASVSWLRFGDLFGETEGFVCAIMDEVMLTNNYRKYIMKDGTVDVCRACHRPGESIRHIISGCSRLANGEYLHRHNQVARIIHQQLALKYKLVESEVPYYKYVPDPVLEKNHVTLYWDQSIITDRTIVANKPDIVVIDRSARRVMIVDVTIPHDENLVKAEKEKQIKYLDLAHEVVDMWHVNSAIIVPIVVTANGLIAKSLDDHLSKLSLGGWIKGLIQKAVLLDTARIVRRFLSLEP

SEQ ID NO: 29354 - protein, 1192 aa, Noctua fimbriata
MITRAAYRRARLPPPDPSLSSASPPPEYSPIVSAVTQAVAVASSSSDEYFSPPTSQTTVRRQGRGRPPRSLGLRGHPAPSRVPAAGGCVQRMRWTHSINENVMRAYYGSTEGGTNLTAYRVGMLSLFQVLEPTVNVSAQRLSDQVRVIQRNHMLDDAVLDRLRSEVLSNRIVFTPAQTAVQASVIDATPPRFNPAVVEEDDRVAVVSSQCNDRLRSALEDALREYRSTPTELRPRLPRLPMHNKNRALVCVLDSQLKNIFESSENLAVAACRLANVKFPNCEVATRPKPAVPAWQRRIERRIDGARVLIGKLHCFREGNTRPRVMRFVRRAFSGTGISPQEYMSRVTELIDFLKQKVYAWANRIRRYKRRVDRYSQNRMFQSDERWVYRAWERPELNMTDVCRPDDAATSSFWRSIWSVPVCHTEADWMRDVERVCEPIPEMEPIFITPLDIARAVRPLPNWKSPGPDGLHNFWLKWLSSSHTCLASQFQSSLESGSLPQFLTTGVTHLLHKSGSPAEPKNYRPITCLSLVYKLLTSILRAKINTHIDKNSIMSASQNGCRYGSRGTKELLLIDMAISQQVRRSRKHLSTCWIDYKKAYDSVPHTWLMRVLELYKIDATLRAFLESCMGQWRTVLRYPGCRQIQGNDEPVWIKRGIFQGDSLSPLWFCLALNPLSTLLEDSGLGYRLRRGGQVISHLLYMDDLKLFAPNKLRLMELLKVTETFSSAIRMEFGVDKCAVVYVKQGEIMESEGIQLSDSIHLRTLSSTESDKYLGMSEALGINVTDMKQSLKERFFGRLNKVLHSLLSGGNKVRAFNGWVMPVLLYSFGVLKWTQTELDALDRRVRTLLTANRMHHPRSSVMRLYIPRKCGGRGFLNAKSLHNREMCSLREYFLKVEVGMHRDVVAVDKGLTPLSMAKENWRKPEVLTTDYRKEVWQGKELHGRFYRALHRPDVDFLASVSWLRFGDLFGETEGFVCAIMDEVMLTNNYRKYIMKDGTVDVCRACHRPGESIRHIISGCSRLANGEYLHRHNQVARIIHQQLALKYKLVESEVPYYKYVPDPVLEKDHVTLYWDQSIITDRTIVANKPDIVVIDRSARRVMIVDVTIPHDENLVKAEKEKQIKYLDLAHEVVDMWNVNSAIIVPIVVTANGLIAKSHDDHLSKLSLGGWIKGLIQKAVLLDTARIVRRFLSLEP

SEQ ID NO: 29355 - protein, 1202 aa, Noctua fimbriata
MITRAAYRRARLPPPDPSLSSASPPPESSPIVSAVTPAVAVASSSSDEYFSPPTSPTPVRRQGRGRPPRSLGLRGHPAPSRVPAAGGCVQRMKWTHSINENVMRAYYGSTEGGTNLTAYRVGMLSLFQVLEPTVNVSAQRLSDQVRVIQRNHMLDDAVLDRLRSEVLSNRIVLTPAQTAVQASVIDATPPRFNPAVVEEDDRVTVVSSQCNDRLRSALEDALREYRSTPTELRPRLPRLPMHNKNRALVCALDSQLENIFESSENLVDTHSILYCGAVAACRLANVKFPNCDVATRPKPAVPAWQRRIERRIDGARVLIGKLHCFREGNTRPRAMRFVRRAFSGTGISPQEYMSRVTERIDFLKQKVYAWANRIRRYKRRVDRYSQNRMFQSDERWVYRAWERPELNMTDVCRPDDAATSSFWRSIWSVPVCHTEADWMRDVERVCEPIPEMEPIMITPLDIARAVRPLPNWKSPGPDGLHNFWLKWLSSSHTCLASQFQSSLESGSLPQFLTTGVTHLLHKSGSPAEPKNYRPITCLSTVYKLLTSILRAKINTHIDKNSIMSASQNGCRNGSRGTKELLLIDMAISQQVRRSRKDLSTCWIDYKKAYDSVPHTWLMRVLELYKIDATLRAFLESCMGQWRTVLRYPGCRQIQGNDEPVWIKRGIFQGDSLSPLWFCLALNPLSTLLEDSGLGYRLRRGGQVISHLLYMDDLKLFAPNKLQLMELLKVTETFSSAIRMEFGVDKCAVMYVKRGEIMESEGIQLSDSIHLRSLSSSESYKYLGMSEALGTNVTDMKQSLKERFFGRLNKVLHSLLSGGNKVRAFNGWVMPVLMYSFGVLKWTQTELDALDRRVRTLLTANRMHHPRSSVMRLYIPRKCGGRGFLNAKSLHNREMCSLREYFLKVEVGMHRDVVAVDKGLTPLSMAKENWRKPEVLTTDDRKEVWQGKELHGRFYRALHGPDVDFLASVSWLRFGDLFGETEGFVCAIMDEVMLTNNYRKYIMKDGTVDVCRACHRPGESIRHIISGCSRLANGEYLHRHNQVARIIHQQLALKYKLVESEVPYYKYVPDPVLEKDHVTLYWDQSIITDRTIVANKPDIVVIDRSARRVMIVDVTIPHDENLVKAEKEKQIKYLDLAHEVVDMWHMNSAVIVPIVVTANGLIAKSLDDHLSKLSLGGWIKGLIQKAVLLDTARIVRRFLSLEP

SEQ ID NO: 29356 - protein, 1203 aa, Atethmia centrago
MLTRAASKRARPPPPDSSLSSASPPPVSSPTVSAVITPAAVVASSSSDEYFSPPTSPTPVRRQGRDRPPKSLGLRGHPAPSRVPAAGGCVQRMRWTQSMNENVMRAYYGSTEGGTNLTAYRVRMLSLFQELEPTVNVSAQRLSDQVRVIQRNRRLDDATLDRLRSEVLSNYIISTPAQTAVHTPIIDVIPPRSNHDVEEEDDRAATVSSQCNVRLRSALEDAFREYRSTPTELRPRLPRLPMHKKNRALMCALDSQLKVFFESSEDLVDTHSILYCAAVAACRLANVKFPNSDGATRPKPAVPAWQCRIERRIDKARVLIGKLYCFREGNTRPRVMRFVRRAFSGTGISPREYMSHITERIDFLKQKVCAWASRIRRYKRRVDRYTQNRMFQSDERWVYRAWERPKQNVTDVCRPDDATTTAFWRSIWSVPVCHVEADWMRDVERVCETIPEMEVVIITPSDIARAVRPLPNWKSPGPDGLHNFWLKWLTSSHTCLASQFQSSLESGSLPQFMTTGITHLLHKSGSPAEPKNYRPITCLSTVYKLLTSILRAKINTHIDSNSIMSASQNGCRNGSRGTKELLLIDMAISQQVRRSRKDLSTCWIDYKKAYDSVPHTWLMRVLELYKIDTTLRTFLESCMGQWRTVLRYPGCRQIQGNDEPVWIKRGIFQGDSLSPLWFCLALNPLSMQLEDSGLGYRLRRGGQIISHLLYMDDLKIFAPNKLQLMKLLKVTETFSSAIRMEFGVDKCAVMHVKRGEIMESEGIQLSDSIHLRSLSSPESYKYLGMSEALGINVTDMKQSLKERFFGRLKKVLISLLSGGNKVCAFNSWVMPVLTYSFGILKWTQTELDALDRRVRTLLTANRMHHPRSSVMRLYIPRKCGGRGFLNAKTLHNREICSLREYFLKTEVGMHRDVVAVDKGLTPLSMAKENWCKPVVLTTDDRKEIWQSKELHGRFYRALHEPDVDFLASVSWLRFGDLFGATEGFVCAIMDEVILTNNYRRHIMKDGTVDVCRACHRPGESIRHIISGCSRLANGEYLHRHNQVARIIHQQLALKYKLVNSEVPYYKYVPDPVLENDHVTLYWDRSIITDRTIVANKPDIVVIDRLARRAMIVDVTIPHDDNLVKAEKEKQIKYLDLAHEVVDMWNVNSAVIVPIVVTANGLMARSLNHHLSRLALDGWIKGLIQKAVLLDTARIVRRFLSLEP

SEQ ID NO: 29357 - protein, 868 aa, Atethmia centrago
MRFVRRAFSGTGISPREYMSRVTERIDFLKQKICAWASRIRRYKRRVDRYTQNRMFQSDERWVYRAWERPEQNETDVCRPDDATTTAFWRSIWSVPVCHAEADWMRDVERVCETIPEMEVVIITPSDIARAVRPLPNWKSPGPDGLHNFWLKWLTSSHTCLASQFQSSLESGSLPQFLTTGITHLLHKSGSPAEPKNYRPITCLSTVYKLLTSILRAKINTHIDSNSIMSASQNGCWNGSRGTKELLLIDMAISQQVRRFRKDLSTCWIDYKKAYDSVPHTWLMRVLEFYKIDTTLRTFLESCMGQWRTVLRYPGCRQIQGNDEPVWIKRGIFQGDSLSPLWFCLALNPLSTLLEDSGLGYRLRRGGQVISHLLYMDDLKIFAPNKLQLMELLKVTETFSSAIRMEFGVDKCADMHVKRGEIMESEGIQLSDSIHLRSLSSPESYKYLGMSEALGINVTDMKQSLKERFFGRLKKVLISPLSGGNKVRAFNGWVMPVLMYSFGILKWTQTELDALDRRVRTLLTANRMHHPRSSVMRLYIPRKCGGRGFLNAKTLHNREICSLREYFLKTEVGMHRNVVAVDKGLTPLSMAKENWCKPVILTTDDRKEIWQNKELHGRFYRALHEPDVDFLASVSWLRFGDLFGETEGFVCAIMDEVILTNNYRRHIMKDGTVDVCRACHRPGESIRHIISGCSRLANGEYLHRHNQVARIIHQQLALKYKLVNSEVPYYKYAPDPVLENDHVTLYWDRSIITDRTIVANKPDIVVIDRLARRAMIVDVTIPHDENLVKAEKEKQIKYLDLAHEVVDMWNVDSAVIVPIVVTANGLMAESLNHHLSRLSLGGWIKGLIQKAVLLDTARIVRRFLSLES

SEQ ID NO: 29358 - protein, 1192 aa, Atethmia centrago
MLTRSATRTRPPPPDPSLSSASPPPVPSATVSAMSTPTVAVASSSSDEYFSPPSSPTPVRRQGRSRPPKSLGLRGHPAPSRVPAAGGCVQRMKWTQSMNENVMRAYYGSTEGGTNLTAYLEPAVNVSAQRLSDQVRVIQRNRRLDDAALDRLRSEVLSNHIISTPAQTAVHTPIIDVIPPRSNHGVEEEDDRAATVSSQCNVRLRSALEDAFREYRSTPTELRPRLPRLPMHKKNRALMCALDSQLKVFFESSEDLVDTHSILYCAAVAACRLANVKFPNSDGATRPKPAVPAWQCRIERRIDGARVLIGKLYCFREGNTRPRVMRFVRRAFSGTGISPREYMSHITERIDFLKQKVCAWASRIRRYKRRVDRYTQNRMFQSDERWVYRAWERPKQNETDVCRPDDATTTAFWRSIWSVPVCHVEADWMRDVERVCETIPEMEVVIITPSDIARAVRPLPNWKSPGPDGLHNFWLKWLTSSHTCLASQFQSSLESGSLPQFMTTGITHLLHKSGSPAEPKNYRPITCLSTVYKLLTSILRAKINTHIDSNSIMSASQNGCRNGSRGTKELLLIDMAISQQVRRSRKDLSTCWIDYKKAYDSVPHTWLMRVLELYKIDMTLRTFLKSCMGQWRTVLRYPGCRQIQGNDESVWIKRGIFQGDSLSPLWFCLALNPLSMQLEDSGLGYRLRRGGQVISHLLYMDDLKIFAPNKLQLMELLKVTETFSSAIRMEFGVDKCAVMHVKRGEIMESEGIRLSDSIHLRSLSSPESYKYLGMSEALGINVTDMKQSLKERFFGRLKKVLISLLSGGNKVRAFNGWVMPVLMYSFGILKWTQTELDALDRRVRTLLTANRMHHPRSSVMRLYIPRKCGGRGFLNAKTLHNREICSLREYFLKTEVDMHRDVVAVDKGLTPLSMAKENWCKPVVLTTDDRKEIWQNKELHGRFYRALHEPDVDFLASVSWLRFGDLFGETEGFVCAIMDEVILTNNYRRHIMKDGTVDVCRACHRPGESIRHIISGCSRLANGEYLHRHNQVARIIHQQLALKYKLVNSEVPYYKYVPDPVLENDHVTLYWDRSIITDRTIVANKPDIVVIDRLARRAMIVDVTIPHDDNLVKAEKEKQIKYLDLAHEVVDMWNVNSAVIVPIVVTANGLMARSLNHHLSRLTLDGWIKGLIQKAVLLDTARIVRRFLSLES

SEQ ID NO: 29359 - protein, 1201 aa, Mesoligia furuncula
MLTRSAARRAHLPPPDSSLSPAPPPPEPSPIESAVTPAAAVASSSSDEYFSPPTSPTPVRRQGRGRPPNCLGLRGHPAPSRVPATGGCVQRMRWTQSMNENVMRAYYGSTEGGINLTAYRDRMLSLFQELEPTVNVSTQRLSDQVRVIQRNHRLDDIALDRLRSEVLSNHIVSTSAQTAAQVSSVDAIPPRFNHVEEEDDRVDTVSSQCNVRLRSALEDALREYRSTPTELRPRLPRLPMHKKNRALVCALDSQLKNFFESSVDLVDTHSILYCAAVAACRLANVKFPSCDGATRPKPAVPAWQRRIERRIDGARVLIGKLYCFREGNTRPQVMRFVRRAFSGTGISPREYMSRVTERIDFLKQKVCAWASRIRRYKRRVDRYTQNRMFQSDERWVYRAWERPEQNVTDVCRPDDAATSAFWCSIWSVPVCHTEAGWMQDVERVCESVPEMETVLITPSDVARAVRPLSNWKSPGPDGLHNFWLKWLISSHTCLASQFQSSLESGSLPQFLTTGVTHLLHKSGSPAEPKNYRPITCLSTVYKLLTSILRAKINKHIESNSIMSTSQNGCKNGSRGTKELLLIDMAISQQVRRSRKDLSTCWIDYKKAYDSMPHTWLMRVLELYKIDATLRTFLESCMGQWKTVLRYPGCRQIQGNDEPVWIKRGIFQGDSLSPLWFCLALNPLSTLLEDSGLGYRLRRGGQVISHLLYMDDLKLFAPNKLRLMELLKVTNTFSSAIRMEFGVDKCAVMHVKRGEIMESEGIQLSDSISLRSLSSSESYKYLGMSEALGINDADMKQSLKERFFCRLKKVLISLLSGGNKVRAFNGWVMPVLMYSFGILKWTQTELDALDRRVRTLLTANRMHHPRSSVMRLYIPRKCGGRGFLNAKTLHNREVCSLREYFLKAEVGMHRDVVAVDKGLTPLSMAKENWRKPVVLSTDDRKKVWQSKELHGRFYRALHEPGVDFIASVSWLRFGDLFGETEGFVCAIMDEVILTNNYRRHIMKDGTVDVCRACHRPGESIRHIISGCSRLANGEYLHRHNQVARIIHQQLALKYKLVDSEVPYYKYVPDPVLENDHVTLYWDRSIITDRTIVANKPDIVVIDRLARRTMIVDVTIPHDGNLVKAEKEKKIKYLDLAHEVVDMWNVSSAVIVPIVVSANGLMAESLDQHLSRLSLGGWIKGLIQKAVLLDTARIVRRFLSLEP

SEQ ID NO: 29360 - protein, 1201 aa, Mesoligia furuncula
MLTRSAARRAHLPPPDSSLSPAPPPPEPSPIESAVTPAVAVASSSSDEYFSPPTSPTPVRRQGRGRPPNSLGLRGHPAPSRVPATGGCVQRMRWTQSMNENVMRAYYGSTEGGINLTAYRDRMLSLFQELEPTINVSAQRLSDQVRVIQRNHRLDDIALDRLRSEVLSNHIVSTSAQTAAQVSTVDAIPPRFNRVEEEDDRVETVSSQCNVRLRSALEDALREYRSTPTELRPRLPRLPMHKKNRALVCALDSQLKNFFESSEDLVDTHSILYCAAVAACRLANVKFSSCDGATRPKPAVPAWQRRIERRIDGARVLIGKLYCFREGNTRPRVMRFVRRAFSGTGISPREYMSRVTERIDFLKQKVCAWASRIRRYKRRVDRYTQNRMFQSDERWVYRAWERPEQNETDVCRPDDAATSAFWCSIWSVPVCHTEAGWMQDVERVCESVPEMEKVLITPSDVARAVRPLSNWKSPGPDGLHNFWLKWLISSHTCLASQFQSSLESGSLPQFLTTGVTHLLHKSGSPAEPKNYRPITCLSTVYKLLTSILRAKINKHIESNSIMSASQNGCRNGSRGTKELLLIDMAISQQVRRSRKDLSTCWIDYKKAYDSVPHTWLMRVLELYKIDATLRTFLESCMGQWKTVLRYPGCRQIQGNDEPVWIKRGIFQGDSLSPLWFCLALNPLSTLLEDSGLGYRLRRGGQVISHLLYMDDLKLFAPNKLRLMELLKVTKTFSGAIKMVFGVDKCAVMHVKRGEIMESEGIQLSDSISLRSLSSSESYKYLGMSEALGINDADMKQSLKERFFCRLKKVLISLLSGGNKVRAFNGWVMPVLMYSFGILKWTQTELDALDRRVRTLLTANRMHHPRSSVMRLYIPRKCGGRGFLNAKTLHNREVCSLREYFLKAEVGMHRDVVAVDKGLTPLSMAKENWRKPVVLSTDDRKRVWQSKELHGRFYRALHEPGVDFIASVSWLRFGDLFGETEGFVCAIMDEVILTNNYRRHIMKDGTVDVCRACHRPGESIRHIISGCSRLANGEYLHRHNQVARIIHQQLALKYKLVDSEVPYYKYVPDPVLENDHVTLYWDRSIITDRTIVANKPDIVVIDRLARRTMIVDVTIPHDGNLVKAEKEKQIKYLDLAHEVVDMWNVSSAIIVPIVVSANGLMAESLDQHLSRLSLGGWIKGLIQKAVLLDTARIVRRFLSLEP

SEQ ID NO: 29361 - protein, 962 aa, Mesoligia furuncula
MHKKNRALVCALDSQLKNFFESSEDLVDTHSILYCAAVAACRLANVKFSSCDGATRPKPAVQTWQRRIERRIDGARVLIGKLYCFREGNTRPRVMRFVRRAFSGTGISPREYMSRVTERIDFLKQKVCAWASRIRRYKRRVDRYTQNRMFQSDERWVYRAWERPEQNVTDVCRPDDAATSAFWCSIWSVPVCHTEAGWMQDVERVCESVPEMEKVLITPSDVARAVRPLSNWKSPGPDGLHNFWLKWLISSHTCLASQFQSSLESGSLPQFLTTGVTHLLHKSGSPAEPKNYRPITCLSTVYKLLTSILRAKINKHIESNSIMSASQNGCRNGYRGTKELLLIDMAISQQVRRSRKDLSTCWIDYKKAYDSVPHTWLMRVLELYKIDATLRTFLESCMGQWKTVLRYPGCRQIQGNDEPVWIKRGIFQGDSLSPLWFCLALNPLSTLLEDSGLGYRLRRGGQVISHLLYMDDLKLFAPNKLRLMELLKVTKTFSSAIKMEFGVDKCAVMHVKRGEIMESEGIQLSDSISLRSLSSSESYKYLGMSEALGINDADMKQSLKERFFCRLKKVLISLLSGGNKVRAFNGWVIPVLMYSFGILKWTQTELDALDRRVRTLLTANRMHHPRSSVMRLYIPRKCGGRGFLNAKTLHNREVCSLREYFLKAEVGMHRDVVAVDKGLTPLSMAKENWRKPVVLSTDDRKRVWQSKELHGRFYRALHEPGVDFIASVSWLRFGDLFGETEGFVCAIMDEVILTNNYRRHIMKDGTVDVCRACHRPGESIRHIISGCSRLANGEYLHRHNQVARIIHQQLALKYKLVDSEVPYYKYVPDPVLENDHVTLYWDRSIITDRTIVANKPDIVVIDRLARRTMIVDVTIPHDGNLVKAEKEKQIKYLDLAHEVVDMWNVSSAIIVPIVVSANGLMAESLDQHLSRLSLGGWIKGLIQKAVLLDTARIVRRFLSLEP

SEQ ID NO: 29362 - protein, 1199 aa, Xestia c-nigrum
MITRAASRRALIPSPDSSLSSASPPPDPGSPVSPVAAVASSSSDEYFSPPTSPTPVRRAGRGRPPKGLGLRGQQAPSRVPATGGCVQRMKWTQLMNENVMRAYYGSTEGGTNLTAYRVRMLSLFQDLEPTVNASAQRLSDQVRVIQRNHLLDGAALDRLRSEVLSNRIILTPAQTAVQVSSIDVNPPRSNPAVVEEDDRVATVSSQCNDRLRSALEDALHEYRSTSAELRPRLPRLPMHKKNRALVCALDSQLKNVFESSEDLVDTHSILFCGAVAACRLANVKFPNCDLATRPKPAVPAWQRRIERRIDGARVLIGKLHCFREGNTRPRVMRFVRRAFSGTEISPQEYMSRVTERIDFLKQKVYAWASRIRRYKRRVDRYSQNRMFQSDERWVYRAWERPQQNMTDVCRPDDAATSSFWRSIWSVPVCHSEADWMRDVERVCEPIQTMEPILITPLDIARAVRPLPNWKSPGPDGLHNFWLKWFSSSHTCLASQFQSSLESGSLPQFLTTGITHLLHKSGSPAEPKNYRPITCLSTVYKLLTSILRTKINTHVDSNSIMSASQNGCRNGSRGTKELLLIDMAISQQVRRARKDLSTCWIDYKKAYDSVPHSWLKRVLELYKIDATLRTFLESCMGQWRTVLRYPGCRQIQGNDEPVWIKRGIFQGDSLSPLWFCLALNPVSTLLENSGLGYRLRKDGQVISHLLYMDDLKLFAPNKLQLMELLKVTETFSSAIGMEFGVDKCAVMYVKRGKIMGSEGLQLSDSIHLRSLSSSESYKYLGMSEALGINVTDMKQSLKERFFGRLKKVLNSLLSGGNKVRAFNGWVMPVLMYSFGILKWTQTELDALDRRVRTLLTENRMHHPRSSVMRLYIPRKFGGRGFLNAKTLHNREVCSLREYFLKADVGMHRDVVAVDKGLTPLSMAKENWRKPVVLTTDDRKKEWQGKELHGRFYRALHGPDVDFLASVSWLRFGDLFGETEGFVCAIMDEVMLTNNYRKYIMKDGTVDVCRACHCPGESIRHIISGCSRLANGEYLHRHNQVARIIHQQLALKFKLVESEVPYYKYVPGPVLVKDHVTLYWDQSIITDRTIVANKPDIVVIDRSARRVMIIDVTIPHDENLVKAEKEKQMKYLDLAHEVRDMWNMNSVIIVPIVVTANGLIAKSLDEHLSKLSLGGWIKGLIQKAVLLDTARIVRRFLSLQP

SEQ ID NO: 29363 - protein, 1203 aa, Omphaloscelis lunosa
MLTRSATRSARLPPPDSPLSSASPPPVPSPIVNAVSTPAAVVASSSSDEYFSPPTSPTPVRRQGRGRPPKSLGLRGQPAPSRVPAAGGCVQRMRWTQSMNENVMRAYYGSTEGGTNLTAYRVRMLSLFQELEPTVNVSAQRLSDQVRVIQRNHRLDDTALDRLRSEVLSNHIVSAREQTAAEASNIDPTPPRFNHGVEEEDDRVATVSSQCNNRLRSALEDAFREYRYTPTELRPRLPRLPMHKKNRALMCALDSQLTNFFESSEDLIDTHSILYCAAVAACRLANVKFPNCDGATRPKPAVPAWQCRIERRIDGARVLIGKLYCFREGNTRPRVMRFVKRAFSGTEISPQDYMSRVTERIDFLKQKVCAWASRIRRYKRRVDRYTQNRMFQSDERWVYRAWERPEQNVTDVCRPDDAATSAFWRSIWSVPVCHTEAGWMQDVERVCETIPEMDAVFITPLDVARAVRPLPNWKSPGPDGLHNFWLKWLSSSHTCLASQFQSSLESGSLPQFLTTGVTHLLHKSGNPAEPKNYRPITCLSTVYKLLTSILRTKINTHIDSNSIMSVSQNGCRNGSRGTKELLLIDMAISQQVRRSRKDLSTCWIDYKKAYDSVPHTWLMRVLELYKVDTTLRTFLMSCMGQWRTVLRYPGCRRTQGNDEPVWIKRGIFQGDSLSPLWFCLALNPLSTLLEDSGLGYRLRRGGQVISHLLYMDDLKLFAPNKLRLMELLKVTETFSGAIRMEFGVDKCAVMHVKRGEIMESEGIQLSDSIHLRPLSSAENYRYLGMSESLGINVADMKQSLKERFFGRLKKVLISFLSGGNKVRAFNGWVMPVLMYSFGILKWTQTELDALDRRVRTLLTANRMHHPRSSVMRLYIPRKCGGRGFLNAKTLHNREVCSLREYFFKADVGMHRDVVAVDNGLTPLSMAKENWRKPVVLTTDDRKEIWQSKALHGRFYRALHEPSVDFLASVSWLRFGDLFGETEGFICAIMDEVILTNNYRRHIMKDGTVDVCRAYHRPGESIRHIISGCSRLANGEYLHRHNQVARIIHQQLALKYKLVDSEVPYYKYVPDPVLENDHATLYWDRSIITDRTIVANKPDIVVIDRLARHAMIVDVTIPHDENLVKAEKEKQIKYLDLAHEVVGMWNVSSAIIVPIVVTANGLMAKSLDHHLSRLSLGGWIKRLIQKAVLLDTARIVRRFLSLQP

SEQ ID NO: 29364 - protein, 1203 aa, Omphaloscelis lunosa
MLTRSAARSARLPPPDSPLSSASPPPVPSPIVNAVSTPAAVVASSSSDEYFSPPTSPTPVRRQGRGRPPKSLGLRGRPAPSRVPAAGGCVQRMRWTQSMNENVMRAYYGSTEGGTNLTAYRVRMLSLFQELEPTVNVSAQRLSDQVRVIQRNHRLDDTALDRLRSEVLSNHIVSAREQTVAEASNIDPTPPRFNHGVEEEDDRVATVSSQCNNRLRSALEDAFREYRYTPTELRPRLPRLPMHKKNRALMCALDSQLTNFFESSEDLIDTHSILYCAAVAACRLANVKFPNCDGATRPKPAVPAWQCRIERRIDGVRVLIGKLYCFREGNTRPRVMRFVRRAFSGTEISPQDYMSRVTERIDFLKQKVCAWASRIRRYKRRVDRYTQNRMFQSDERWVYRAWERPEQNVTDVCRSDDAATSAFWRSIWSVPVCHTEAGWMQDVERVCETIPEMDAVFITPLDVARAVRPLPNWKSPGPDGLHNFWLKWLSSSHTCLASQFQSSLESGSLPQFLTTGVTHLLHKSGNPAESKNYRPITCLSTVYKLLTSILRTKINTHIDSNSIMSVSQNGCRNGSRGTKELLLIDMAISQQVRRSRKDLSTCWIDYKKAYDSVPHTWLMRVLELYKVDTTLRTFLMSCMGQWRTVLRYPGCRRTQGNDEPVWIKRGIFQGDSLSPLWFCLALNPLSTLLEDSGLGYRLRRGGQVISHLLYMDDLKLFAPNKLRLMELLKVTETFSGAIRMEFGVDKCAVMHVKRGEIMESEGIQLSDSIHLRPLSSAENYRYLGMSESLGINVADMKQSLKERFFGRLKKVLISFLSGGNKVRAFNGWVMPVLMYSFGILKWTQTELDALDRRVRTLLTANRMHHPRSSVMRLYIPRKCGGRGFLNAKTLHNREVCSLREYFFKADVGMHRDVVAVDNGLTPLSMAKENWRKPVVLTTDDRKEIWQSKALHGRFYRALHEPSVDFLASVSWLRFGDLYGETEGFICAIMDEVILTNNYRRHIMKDGTVDVCRACHRPGESIRHIISGCSRLANGEYLHRHNQVARIIHQQLALKYKLVDSEVPYYKYVPDPVLENDHATLYWDRSIITDRTIVANKPDIVVIDRLARHAMIVDVTIPHDENLVKAEKEKQIKYLDLAHEVVGMWNVSSAIIVPIVVTANGLMAKSLDHHLSRLSLGGWIKRLIQKAVLLDTARIVRRFLSLQP

SEQ ID NO: 29365 - protein, 962 aa, Sesamia nonagrioides
MHKKNRALVCALDSQLKNFFESSEDLIDTHSILYCAAVAACRLAKVKFPNCDEATRPKPAVPAWQRRIERRIDGTRVLIGKLYCFREGNTRPRVMRFVRQAFSGTGISPREYMNNVTERIDFLKQKVCAWASRIRRYKKRVDRYTQNRMFQSDERWVYRAWERPEQNEADECRPDDATTSAFWRGIWSVSVCHTEGDWTQDVEQVCDAIPEMDNILITPLDVATAVRSLPNWKSPGPDGLHNFWLKWLSSSHTCLAFQFQSSLESGSLPQFLTTGITHLLHKSGSTAEPKNYRPITCLPTVYKVLTSILKTKINNHLDSNSIMSVSQNGCRSGSRGTKELLLIDMAISQQVRRPRKDLSTCWIDYKKAYDSVPHTWLMRVLELYKINATLRTFLRSCMGQWKTVLRYPESRQIQGNDEPVWIKRGIFQGDSLSPLWFCLALNPLSTLLEDSGLGYRLKRGGQVISHLLYMDDLKLFAPNKLHLMKLLNVTESFSSGIKMEFGVDKCAVMHVKRGQIMESEGITLPDSIHLRSLSSFESYKYLGMSEVLGINDADMKQSLKERFFGRLKKVLNSLLSGGNKVRAFNGWVMPVLMYSFGILKWTQTELDALDRRVRTLLTANRMHHPRSSVMRLYIPRKCGGRGFLNAKTLHNREVCSLREYFLKIVVGMHHDVVTVDKGLTPLSMAKENWHKPIILTTDDRKMVWQSKELHGRFYRALHGPDVDFLASVSWLRFGDLFGETEGFVCAIMDEVILTNNYRRYIMKDGTIDVCRACHHPGESIRHIISGCSRLANSEYLHRHNQVARIIHQQLALKYKLVDSEVPYYKYVPDPVLENDHVTLYWDRSIITDRTVVANKPDIVVIDRLARLAMIVDVTIPHDGNLVKAEKEKQMKYLDLAHEVVDMCNVNSAVIVPIVVSANGLIAKSLDQHLLRLSLGSWIKGLIQKAVLLDTARIVRRFLSLEP

SEQ ID NO: 29366 - protein, 1079 aa, Sesamia nonagrioides
MLSLFQALEPTVNVSAQRLSDQVRVIQRNHRLDDTALDRLRSEVLSNQIAPTLTQTAALASIIDAVPPRSNRVEEEDDRVETVSSQYNDRLRSTLEDAFREYRSTPTDLRPRLPRLPMHKKNRALVSALDSQLKNVFESSEDLIDTHSILFCAAVAACRLANIKFPNCDEANRPKPAVPAWQHRIERRIDGARVLIGKLYCFREGNTRPRVMRFVRQAFSGTGISPREYLIHVTERIDFLKQKVCAWANRIRRYKRRVDRYTQNRMFQSDERWVYRAWERSELNEADVCRPDVAATSAFWRSIWSVPVCHAEGDWIQNVEQVCEMIPEMDTILITPIDVATAVRSLPNWKSPGPDGLHNFWLKWLSSSHTCLASQFQSSLESGSLPQFLTTGITHLLHKSGSTAEPNNYRPITCLPTVYKVLTSILKAKINKHLDSNSIMSVSQNGCKSGSRGTKELLLIDMAISQQVRRSRKDLSTCWIDYKKAYDSVPHTWLMRVLELYKINATLRTFLRSCMGQWKTVLRYPGSRRIQGNDEPVWIKRGIFQGDSLSPLWFCLALNPLSTLLEDSGLGYRLKRGGQVISHLLYMDDLKLFAPNKLHLMKLLNVTETFSSGIKMEFGVDKCAVMHVERGQIMESEGITLPDSIHLRSLSSFESYKYLGMSEALGINDADMKQSLKERFFGRLKKVLKSLLSGGNKVRAFNGWVMPVLMYSFGILKWTQTELDALDRRVRTLLTANRMHHPRSSVMRLYIPRKCGGRGFLNAKTLHNREVCSLREHFLKTVVGMHHDVVTVDKGLTPLSMAKENWHKPIILTTDDRKMIWQSKELHGRFYRALHGPDVDFLASVSWLRFGDLFGETEGFVCAIMDEVILTNNYRRYIMKDGTIDVCRACHHPGESIRHIISGCSRLANSEYLHRHNQVARIIHQQLALKYKLVDSEVPYYKYVPDPVLENDHVTLYWDRSIITDRTIVANKPDIVVIDRLARLAMIVDVTIPHDGNLVKAEKEKQMKYLDLAHEVVDMWNVNSAVIVPIVVSANGLIAKSLDQHLLRLSLGSWIKGLIQKAVLLDTARIVRRFLSLEP

SEQ ID NO: 29367 - protein, 1108 aa, Sesamia nonagrioides
MRTSCAHITGLQRGELTSLRTVKGCCLCFRHWNQLSTSRPNDVSAQRLSDQVRVIQRNHRLDDTALDRLRSEVLSNQIAPTLTQTAALASIIDAVPPRSNRVEEEDDGVETVSSQYNDRLRSTLEDAFREYRFTPTDLRPRLPRLPMHKKNRALVSALDSQLKNVFESSEDLIDTHSILFCGAVAACRLANIKFPNCDEANRPRPAVPAWQHRIERRIDGARVLIGKLYCFREGNTRPRVMRFVRQAFSGTGISPREYISHVTERIDFLKQKVCAWASRIRRYKRRVDRYTQNRMFQSDERWVYRAWERTEQNEADVCRPDDAATSAFWRSIWSVPVCHAEGDWIQDVEQVCEMIPEMDTILITPIDVATAVRSLPNWKSPGPDGLHNFWLKWLSSSHTCLASQFQSSLESGSLPQFLTTGITHLLHKSGSTAEPNNYRPITCLPTVYKVLTSILKAKIKKHLDSNSIMSVSQNGCRSGSRGTKELLLIDMAISQQVRRSRKDLSTCWIDYKKAYDSVPHTWLMRVLELYKVNATLRTFLRSCMGQWKTVLRYPGSRRIQGNDEPVWIKRGIFQGDSLSPLWFCLALNPLSTLLEDSGLGYRLRRGGQVISHLLYMDDLKLFAPNKLHLMKLLNVTETFSSGIKMEFGVDKCAVMHVKRGQIMESEGITLPDSIHLRSLSSVESYKYLGMSEALGINDADMKQSLKERFFGRLKKVLKSLLSGGNKVRAFNGWVMPVLMYSFGILKWTQTELDALDRRVRTLLTANRMHHPRSSVMRLYIPRKCGGRGFLNAKTLHNREVCSLREHFLKTVVGMHHDVVTVDKGLTPLSMAKENWHKPIILTTNDRKMIWQSKELHGRFYRALHEPDVDFLASVSWLRFSDLFGETEGFVCAIMDEVILTNNYRRYIMRDGTIDVCRACHHPGESIRHIISGCSRLANGEYLHRHNQVARIIHQQLALKYKLVDSEVPYYKYVPDPVLENDHATLYWDRSIITDRTIVANKPDIVVIDRLARLAMIVDVTIPHDGNLVKAEKEKQIKYLDLAHEVVDMWNVNSAVIVPIVVSANGLIAKSLDQHLLRLSLGSWIKGLIQKAVLLDTARIVRRFLSLEP

SEQ ID NO: 29368 - protein, 868 aa, Sesamia nonagrioides
MRFVRQAFSGTGISSREYINHLTERIDFLKQKVCAWASRIRRYKRRVDRYTQNRMFQRDERWVYRAWERPEQNEADVCRPDDATTNAFWRGIWSVSVCHTEGNWIQNVEQVCETIPEMDTILITPSDVAAAVRSLPNWKSPGPDGLHNFWLKWLSSSHTCLASQFQSSLESGSLPQFLTTGITHLLHKSGSTAEPKNYRPITCLPTVYKVLTSILKAKINKHLISNSIMSVSQNGCKSGSRGTKELLLIDMAISQQVRRSRKDLSTCWIDYKKAYDSVPHTWLMRVLELYKVNATLRTFLRSCMGQWKTVLRYPGSRRIQGNDEPVWIKRGIFQGDSLSPLWFCLALNPLSTLLEDSGLGYRLKRGGQVISHLLYMDDLKLFAPNKLHLMKLLNVTETFSSGIKMEFGVDKCAVMHVKRGQIMEFEGITLPDSIHLRSLSSFESYKYLGMSEALGINDADMKQSLKERFFGRLKKVLKSLLSGGNKVRAFNGWVMPVLMYSFGILKWTQTELDALDRRVRTLLTANRMHRPRSSVMRLYIPWKCGGRGFLNAKTLHNREVCSLREHFLKTVVGMHHDVVTVDKGLTPLSMAKENWHKPIILTTDDRKLIWQSKELHGRFYRALHEPNVDFLASVSWLRFSDLFGETEGFVCAIMDEVNLTNNYRRYIMKDGTIDVCRACHHPGESIRHIISGCSRLANSEYLHRHNQVARIIHQQLALKYKLVDSEVPYYKYVPDPVLENDHVTLYWDRSIITDRTIVANKPDIVVLDRLARLAMIVDVTIPHDGNLVKAEKEKQIKYLDLAHEIVDIWNVNSAVIVPIVVSANGLIAKSLDQHLLRLSLGSWIKGLIQKAVLLDTARIVRRFLSLEP

SEQ ID NO: 29369 - protein, 1201 aa, Apamea monoglypha
MLTRSAARARLLPPDSSLSPAPPPPESSPIESAVTPAVAVASSSSDEYFSPPTSPTPVRRQGRGRPPRSLGLRGHPAPSRVPAAGGCVQRMRWTQSMNENVMRAYYGSTEGGINLTAYRDRLLSLFQELEPTVNVSAQRLSDQVRVIQRNHRLDDIALDRLRSEVLSNQIVSTLTQTAAQASTIDAIPPRSNHVEEEDDDRVDTVSSQCNVRLRSALEDAFREYRSTPTELRPRIPRLPMHKKNRALVCALDSQLKNFFESSEDLVDTHSILYCAAVAACRLANVKFPNCDGAARPKPAVPAWQYRIERRIDGARVLIGKLYCFREGNTRPRVMRFVRQAFSGTGISPREYISNVTERIDFLKQKVCAWASRIRRYKRRVDRYTQNRMFQSDERWVYRAWERPEQNVTDVCRPDDARTNAFWRSIWSVPVYHAEGDWMQDIERVCETIPEMDPVLITPLDVARAVRPLPNWKSPGPDGLHNFWLKWLISSHSRLASQFQSSLESGSLPQFLTTGVTHLLHKSGSPAEPKNYRPITCLSTVYKLLTSILRAKINTHIDNNSIMSASQNGCRNGSRGTKELLLIDMAISQQVRRSRKDLSTCWIDYKKAYDSVPHAWLMRVLELYKIDATLRTFLESCMGQWRTVLRYPGCRQIQGNDEPVWIKRGIFQGDSLSPLWFCLALNPLSTLLEDSGLGYRLKRGGQVISHLLYMDDLKLFAPNKLRLLELLKVTETFSSAIRMEFGVDKCAVMHVKRGEIMESEGIQLSDSIHLRSLSSSESYKYLGMSEALGINVADMKQTLRERFFGRLKKVLVSLLSGGNKVRAFNSWVMPVLMYSFGILKWTQTELDALDRRVRTLLTANRMHHPRSSVMRLYIPRKCGGRGFLNAKTLHNREVCNLREYFIKAEVGMHRDVVAVDKGLTPLSMAKENWRKPVILTTDDRKEVWQSKELHGRFYRALHEPGVDFLASVSWLRFGDLFGETEGFVCAIMDEVVLTNNYRRYIMKDGTVDVCRACHRPGESIRHIISGCSRLANGEYLHRHNQVARIIHQQLALKYKLVDSEVPYYKYVPDPVLENDHVTLYWDRSIITDRTIVANKPDIVVIDRLARRTMIVDVTIPHDGNLVKAEKEKQIKYLDLAHEVVDMWNVSSAIIVPIVVSANGLMAESLDQHLSRLSLGGWIKGLIQKAVLLDTARIVRRFLSLEP

SEQ ID NO: 29370 - protein, 1111 aa, Mamestra configurata
MRWTQSMNENVMRAYYGSTEGGTNLTAYRVRMLSLFQDLEPTVNVSAQRLSDQVRVIQRNHRLDDAALDRLRSEVLNNLIISTPTQTAVHAPVNGRITPRPNNVSDEVDDRVVTVSSQCNDRLRSALEDALREYRSTPTELRPRLPRLPMHKKNRALVCALDSLLQNIFESSESLVDTHSILYCGAVAACRIANVKFPGCDEAIRPKPAAPAWQRRIERRIDETRALIGKLYCFREGNTRPRVMRFVRRAFSGTEISPRDFTSRVTERIDFLKQKVCAWASRIRRYKRRVDRYSQNRMFQSDERWVYRAWERPEQSVTDVCRPDDVATSIFWRSIWSVPICHAEGGWMRDVERVCEAIPQMEKITITTLDVAKAVRPLPNWKSPGPDGLHNFWLKWYSSSHALLASQFQSSLDSGSLPQFLTTGVTHLLHKTGSPTEPKNYRPITCLSTVYKLLTSILRAKINEHIESNSIMSASQNGCRKGSRGTKELLLIDMAISQQVRRSRKDLSTCWIDYKKAYDSVPHTWLMKVLELYKIDATLRTFLESCMRQWKTVLRYPGCRPIQGSDEPVWIKRGIFQGDSLSPLWFCLALNPLSTLLEDSGLGYRLRRGGQAISHLLYMDDLKLFAPNNLRLMELLKVTETFSSAIRMEFGVDKCAVMHVKKGEIMESEGIQLSDSIQVRSLSSTETYKYLGMSEALGINGTDMKQSLRERFFGRLKKVLNSLLSGGNKVRAFNGWVMPVLMYTFGILKWTQTELDALDRRVRTLLTANRMHHPRSSVMRLYIPRKCGGRGFLNAKTLHNREMCSLREYFLKADVGMHRDVVAVDKGLTPLSMAKENWRTPVILTTDDRKEVWKGKELHGRFYRALHGSDVDFSASVAWLRFGDLFGETEGFVCAIMDEVILTNNYRRHIMKDGTVDMCRACHRPGESIRHIISGCSRLANGEYLHRHNQVARIIHQQLALKYKLVDSEVPYYKYVPDPVLENDHVTLYWDRSIITDRTIVANKPDIVVIDRLARRTMIIDVTIPHDENLVKAEKEKQIKYLDLAHEVVDMWNVDSAVIVPIVVTANGLMAKSFDDHLSKLALRSWVKGLIQKAVLLDTARIVRRFLSLEP

SEQ ID NO: 29371 - protein, 1198 aa, Mythimna ferrago
MLTRAATRRARNPPPGSSLSSASPPPDPGSPVSPAAAVASSSSDEYFSPPTSPTPVRRPGRGRPPKSMGPRGQPAPSRVPAAGGCVQRMRWTQSMNENVMRAYYGSTEGGTNLTAYRERMLSLFQDLEPTVNVWAQRLSDQVRVIQRNHRLDDAALDRLRSEILSNQIVSTSTQTQTAATPTTNAISPRSDHHNDDADDRVVTVSSQCNERLKSALEDALCEYMSTPTELRPRLPRLPMHKKNRALVCALDSLLKNIFESSENLVDTHSILYCGAVAACRLAKIKFPNIDGTIRPKTAVPAWQCRIERRIDEARVLIGKLHCFREGNTRPRVMRFVRRAFLGTGPQGYMSRVTERIDFLKQKVCAWASRIRRYKRRVDRYSQNRMFQSDERWVYRAWERPEHSVTDECRPDDLATITFWRNIWSVPVSHTEGGWMRDVERVCEAIPEMEKVTITPEDVAKAVRPLPNWKSPGPDGLQNFWLKWYSSSHAPLASQFQSILESGSLPEYLTTGVTHLLHKTGNPVDPKNYRPITCLSTVYKLLTSILRAKINIHIENNQIISPSQNGCRNGSRGTKELLLIDMAISQQTRRSRKDLSTCWIDYKKAYDSVPHTWLMRVLELYKIDITLRTFLESCMRQWKTVLRYPGCRPIQGNDEPIWIKRGIFQGDSLSPLWFCLALNPLSTLLEDSGLGYRLRRGGQVISHLLYMDDLKLFAPSNLQLMELLKVTETFSSAIRMEFGVDKCAGMHVKRGEIMESEGIQLPDSIHLRSLSSTETYRYLGMSEALGINNADMKQSLKERFFGRLKKVLNSLLSGGNKVRAFNGWVMPVLMYSFGILKWTQTELDALDRRVRTLLTANRMHHPRSSVMRLYIPRKCGGRGFLNAKTLHNREVCSLREYFLKTDVGMHRDVVAVDKGLTPLSMAKEDWHKPVIMTTDNCKEIWKGKELHGRFFRALHEPDVDFLASVAWLRFSDLFGETEGFVCAIMDEVILTNNYRRYIMKDGTVDVCRACHRPGESIRHIISGCSRLANGEYLHRHNQVARIIHQQLALKYNLVDLEVPYYKYVPDPVLENGSVTLYWDRSIITDRTIVANKPDIVVIDRLARRAMIVDITIPHDENLVKAEKEKQIKYLDLAHEVVDMWNVDSAIIVPIVVTANGLIAKSFDDHLLKLSLRGWIKGQIQKAVLLDTARIVRKFLSLEP

SEQ ID NO: 29372 - protein, 1200 aa, Mythimna ferrago
MLTRTAARRARHPPPGSSLSSASPPPDPGSPVSPAAAVASSSSDEYFSPPTSPTPVRRPGRGRPPKSMGPRGQPAPSRVPAAGGCVQRMRWTQSMNENVMRAYYGSTEGGTNLTAYRERMLSLFQVLEPTVNVSAQRLSDQVRVIQRNHRLDDAALDRLRSEILSNQIVSTSTQTQTAATPTTNAISPRSDHNNDDADDRVVTVSSQCNERLRSALEDALCEYMSTPTELRPRLPRLPMHKKNRALVCALDSLLKNIFESSENLVDTHSILYCGAVAACRLAKIKFPNIDGTIRPKTAVPAWQCRIERRIDEARVLIGKLHCFREGNTRPRVMRFVRRAFLGTGISPQGYMSRVTERIDFLKQKVCAWASRIRRYKRRVDRYSQNRMFQSDERWVYRAWERPEHSVIDECRPDDLATITFWRNIWSVPVSHTEGGWMRDVERVCDAIPEMEKVTITPEDVAKAVRPLPNWKSPGPDGLQNFWLKWYSSSHAPLASQFQSILESGSLPEYLTTGVTHLLHKTGNPVDPKNYRPITCLSTVYKLLTSILRAKINIHIENNQIISPSQNGCRNGSRGTKELLLIDMAISQQTRRSRKDLSTCWIDYKKAYDSVPHTWLMRVLELYKIDITLRTFLESCMRQWKTVLRYPGCRPIQGNDEPIWIKRGIFQGDSLSPLWFCLALNPLSTLLEDSGLGYRLRRGGQVISHLLYMDDLKLFAPSNLQLMELLKVTETFSSAIRMEFGVDKCAGMHVKRGEIMESEGIQLPDSIHLRSLSSTETYRYLGMSEALGINNADMKQSLKERFFGRLKKVLNSLLSGGNKVRAFNGWVMPVLMYSFGILKWTQTELDALDRRVRTLLTANRMHHPRSSVMRLYIPRKCGGRGFLNAKTLHNREVCSLREYFLKTDVGMHRDVVAVDKGLTPLSMAKEDWHKPVIMTTDNRKEIWKGKELHGRFFRALHEPDVDFLASVAWLRFSDLFGETEGFVCAIMDEVILTNNYRRYIMKDGTVDVCRACHRPGESIRHIISGCSRLANGEYLHRHNQVARIIHQQLALKYNLVDLEVPYYKYVPDPVLENDHVTLYWDRSIITDRTIVANKPDIVVIDRLARRAMIVDITIPHDENLVKAEKEKQIKYLDLAHEIVAMWNVDSAIIVPIVVTANGLIAKSFDDHLSKLSLRGWIKGQIQKAVLLDTARIVRKFLSLEP

SEQ ID NO: 29373 - protein, 962 aa, Noctua pronuba
MHKKNRALVCALDSQLKNLFESSEDLVDTHSILYCGAVAACRLANVKFTNSDAATRPKPAVPAWQCRIESRIDGARVLIGKLHCFREGNTRPRVMRFVRRAFSGTGISPQEYMSRVTERIDFLKQKVYAWANRIRRYKRRVDRYSQNRMFQSDERWVYRAWERPEQNMTNVCRPDDATTSSFWSSIWSVPVCHTEGDWMRAVERVCEPIPEMEPILITSLDVARSVRPLPNWKSPGPDGLHNFWLKWLSSSHTCLASQFQSSLESGALPQFLTTGVTHLLHKSGNPAEPKNYRPITCLSTVYKLLTSILRAKINTHIDKNSIMSASQNGCRNGSRGTKELLLIDMAISQQVRRSRKDLSTCWIDYKKAYDSVPHTWLMRVLELYKIDATLRTFLESCMGQWRTVLRYPGCRQIQGNDEPVWIKRGIFQGDSLSPLWFCLALNPLSTLLEDSGLGYRLRRGGQVISHLLYMDDLKLFAPNKLRLMELLKVTETFSSAIRMEFGVDKCAVMYVKRGEIMESEGIQLSDSIHLRSLSSSESYKYLGMSEALGINVTDMKQLLRERFFGRLKKVLNSLLSGGNKVRAFNGWVMPVLMYSFGILKWTQTELDALDRRVRTLLTANRMHHPRSSVMRLYIPRKCGGRGFLNAKTLHNRELCSLREYFLKAEVGMHRDVVAVDKGLTPLSMAKENWRKPVVLTTDDRKEVWQGKELHGRFYRALHGPDVDFLASVSWLRFGDLFGETEGFVCAIMDEVMLTNNYRKYIMKDGTVDVCRACHRPGESIRHIISGCSRLANGEYLHRHNQVARIIHQQLALKYKLVESEVPYYKYVPDPVLEKDHVTLYWDRSIITDRTIVANKPDIVVIDRSARRVMIVDVTIPHDENLVKAEKEKQIKYLDLAHEVVDMWNVNSAIIVPIVVTANGLIAKSLDDHLSRLSLGGWIKGLIQKAVLLDTARIVRRFLSLEP

SEQ ID NO: 29374 - protein, 1109 aa, Ochropleura plecta
MDFVYQRECHARILWVYRGGTNLTAYRVRMLSLFQDLEPTINVSAQRLSDQVRVIQRNHLLDDAALDRLRSEVLSNRVILTTPQTAVQASAIDVTQPRSNPAVVEEDDRVATVSSQCNDRLRSALEDALRDYRSTPAELRPRLPRLPMHKKNRALVCALDSQLKNLFESSEDLVDTHSILYCGAVAVCRLANVKFPNCDVATRPKPSVPAWQCRIERRIDEARALIGKLYCFREGNTRPRVMRFVRRAFSGTGISPQEYMSRTTERIDFLKQKVYAWANRIQRYKRRVDRYSQNRMFRSDERWVYRAWERPEQSVTDVCRPDDVATSSFWHSIWSVRVCHTEAGWMRDVERVCETIPEMEPILITSLDIASAVRPLPNWKSPGPDELHNFWLKWLSSSHTRLASQFQSCLESGSLPQFLTTGVTHLLYKSGSPAEPKNYRPITCLSTVYKLLTSILRAKINSHIVKNSIISASQNGCRNGSRGTKELLLIDMAISQQVRRSRKDLSTCWIDYKKAYDSVPHTWLKRVLELYKIDTTLRTFLESCMGQWRTVLRYPGCRQIQGNDEPVWIKRGIFQGDSLSPLWFCLALNPLSTLLEDSGLGYRLRRGGQVISHLFYMDDLKLFAPNKLRLMELLKVTETFSNAIRMEFGVDKCAVMYVKRGEIMESEGIHLSDSIHLRSLSSSESYKYLGMSEALGINVADMKQLLRERFFGRLKKVLKSLLSGGNKVRAFNSWVMPVLMYSFGILKWTQTELDALDRRVRTLLTANRMHHPRSSVMRLYIPRKCGGRGFLNAKTLHNREVCSLREYFLKTDVGMHRDVVAVDKGLTPLSMAKENWRKPVVLTTDYRKEVWQGKELHGRFYKALHGPDVDFLASVSWLRFGDLFGETEGFVCAIMDEVMLTNNYRKYIMKDGTVDVCRACHRPGESIRHIISGCSRLANGEYLHRHNQVARIIHQQLALKYNLVESEVPYYKYVPDPVLEKDHVTLYWDRSIITDRTIVANKPDIVVIDRSARRVMIIDVTIPHDENLVKAEKEKQLKYLDLAHEVVDMWNVNSAIIVPIVITANGLIAKSLDKHLSKLSLGRWIKGLIQKAVLLNTARIVRRFLSLEP

SEQ ID NO: 29375 - protein, 962 aa, Ochropleura plecta
MHKKNRALVCALDSQLKNLFESNEDLVDTHSILYCGAVAVCRLANVKFPSCDVATRPKPSVPTWQCRIERRIDEARVLIGKLYCFREGNTRPRVMRFVRRAFSGTGISPQEYMSRTTERIDFLKQKVYAWANRIRRYKRRVDRYSQNRIFRSDERWVYRAWERPEQSVTDVCRPDDVATSSFWHSIWSVPVCHTEADWMRDVERVCETIPDMEPILITSLDIASAVRPLPNWKSPGPDGLHNFWLKWLTSSHTRLASQFQSCLESGSLPQFLTTGVTHLLYKSGSPAEPKNYRPITCLSTVYKLLTSILRAKINSHIDKNSIMSASQNGCRNGSRGTKELLLIDMAISQQVRRSRKDLSTCWIDYKKAYDSVPHTWLKRVLELYKIDATLRAFLESCMGQWRTVLRYPGCRQIQGNDEPVWIKRGIFQGDSLSPLWFCLALNPLSTLLEDSGLGYRLRRGGQVISHLLYMDDLKLFASNKLRLMELLKVTETFSNAIRMEFGVDKCAVMYVKRGEIMESEGIQLSDSIHLRSLSSSESYKYLGMSEALGINVADMKQLLRERFFGRLKKVLKSLLSGGNKVRAFNSWVMPVIMYSFGILKWTQTELDALDRRVRTLLTGNRMHHPRSSVMRLYIPRKCGGRGFLNAKTLHNREVCSLREYFLKTDVGMHRDVVAVDKGLTPLSMAKENWRKPVVLTTDDRKVVWQGKELHGRFYKALHGPDVDFLASVSWLRFGDLFGETEGFVCAIMDEVMLTNNYRKYIMKDGTVDVCRACHRPGESIRHIISGCSRLANSEYLHRHNQVARIIHQQLALKYNLVESEVPYYKYVPDPVLEKDHVTLYWDRSIITDRTIVANKPDIVVIDRSARRVMIIDVTIPHDENLVKAEKEKQLKYLDLAHEVVDMWNVNSAIIVPIVVTANGLIAKSLDEHLSKLSLGGWIKGLIQKAVLLDTARIVRRFLSLEP

SEQ ID NO: 29376 - protein, 962 aa, Ochropleura plecta
MHKKNRALVCALDSQLKNLFESSEDLVDTHSILYCGAVAVCRLANVKFPNCDVATRPKPSVPAWQCRIERRIDEARALIGKLYCFREGNTRPRVMRFVRRAFSGTGISPQEYMSRTTERIDFLKQKVYAWANRIQRYKRRVDRYSQNRMFRSDERWVYRAWERPEQSVTDVCRPDDVATSSFWHSIWSVRVCHTEAGWMRDVERVCETIPEMEPILITSLDIASAVRPLPNWKSPGPDGLHNFWLKWLSSSHTRLASQFQSCLESGSLPQFLTTGVTHLLYKSGSPAEPKNYRPITCLSTVYKLLTSILRAKINSHIVKNSIISASQNGCRNGSRGTKELLLIDMAISQQVRRSRKDLSTCWIDYKKAYDSVPHTWLKRVLELYKIDTTLRTFLESCMGQWRTVLRYPGCRQIQGNDEPVWIKRGIFQGDSLSPLWFCLALNPLSTLLEDSGLGYRLRRGGQVISHLFYMDDLKLFAPNKLRLMELLKVTETFSNAIRMEFGVDKCAVMYVKRGEIMESEGIHLSDSIHLRSLSSSESYKYLGMSEALGINVADMKQLLRERFFGRLKKVLKSLLSGGNKVRAFNSWVMPVLMYSFGILKWTQTELDALDRRVRTLLTANRMHHPRSSVMRLYIPRKCGGRGFLNAKTLHNREVCSLREYFLKTDVGMHRDVVAVDKGLTPLSMAKENWRKPVVLTTDYRKEVWQGKELHGRFYKALHGPDVDFLASVSWLRFGDLFGETEGFVCAIMDEVMLTNNYRKYIMKDGTVDVCRACHRPGESIRHIISGCSRLANGEYLHRHNQVARIIHQQLALKYNLVESEVPYYKYVPDPVLEKDHVTLYWDRSIITDRTIVANKPDIVVIDRSARRVMIIDVTIPHDENLVKAEKEKQLKYLDLAHEVVDMWNVNSAIIVPIVITANGLIAKSLDEHLSKLSLGGWIKGLIQKAVLLDTARIVRRFLSLEP

SEQ ID NO: 29377 - protein, 1199 aa, Hecatera dysodea
MLTRAATLRARHPPPGSPLSSASPPPDIESQVSPAVAVASSSSDEYFSPPTSPPPVRRQGRGRPPRGLGPRGQPAPSRVPATGGCVQRMRWTQSMNENVMRAYYGSTEGGINLTAYRVRMLSLFQDLEPTVNVSAQRLSDQVRVIQRSHRLDEAALDRLRSEVLNNLIISTPTQTAVQAPGSGAIIPRPIHVCDEVVDRVVTVSSQCNDRLRSALEDALREYRSTPTELRPRLPRLPMHKKNRALVCALDSLLKNIFESSENLVDTHSILYCGAVAACRVANVKFSNSDGATRPKNAAPAWQCRIERRIDEARVLIGKLYCFREGNTRPRVMRFVRRAFLGTEISPQEYMSRVTERIDFLKQKVCAWANRIRRYKRRVDRYSQNCMFQSDERWVYRAWERPEQSVTDVCRPDDVTTNTFWRSIWSVPVCHAEGGWMRDVERVCEAIPQMEKITITTVDIATAVRPLPNWKSPGPDGLHNFWLKWYSSSHALLASQFQSSLDSGSLPQFLTTGITHLLHKTGSPAEPKNYRPITCLSTVYKLLTSILRVKINEHIERNSIMSYSQNGCRKGSRGTKELLLIDMAISQQVRRSRKDLSTCWIDYKKAYDSVPHTWLLKVLELYKVDATLRTFLESCMRQWKTVLRYPGCRPIQGNEEPVWIKRGIFQGDSLSPLWFCLALNPLSTLLEDSGLGYRLRRGGQTISHLLYMDDLKLFAPNNLRLMELLKVTETFSSAIRMEFGVDKCAVMHVKKGEIMESEGIQLSDSIQVRSLSSTETYKYLGMSEALGINGADMKQSLKERFFGRLKKVLNSLLSGGNKVRAFNGWVMPVLMYSFGILKWTQTELDALDRRVRTLLTANRMHHPRSSVMRLYIPRKCGGRGFLNAKTLHNREMCSLREYFLKADVGMHRDVVAVDKGFTPLSMAKENWRKPVIPTTDDRREVWRGKELHGRFYRALYGSDVDFSASVAWLRFGDLFGETEGFVCAIMDEVILTNNYRRHIMKDGTVDVCRACHRPGESIRHIISGCSRLANGEYLHRHNQVARIIHQQLALKYKLVDSEVPYYKYVPDPVLENDHATLYWDRSIITDRTIIANKPDIVVIDRLARRTMIIDVTIPHDENLVKAEKEKQIKYLDLAHEVVDMWNVDSAVIVPIVVTANGLMAKSFDEHLSKLALHGWLKGLIQKAVLLDTARIVRRFLSLEP

SEQ ID NO: 29378 - protein, 1199 aa, Hecatera dysodea
MLTRAATLRARHPPPGSPLSSASPPPDIEPQVSPAAAVASSSSDEYFSPPTSPTPVRRQGTGRPPRGLGPRGQPAPSRVPATGGCVQRMRWTQSMNENVMRAYYESTEGGTNLTAYRVRMLSLFQDLEPAVNVSAQRLSDQVRVIQRSHRLDDAALERLRSEVLNNLTISTQTQTAVQAPASGASIPRANNDSDELDERVVTVSSQCNDRLRSALEDALRVYRSTPAELRPRLPRLPMHKKNRALVCALDSLLQNTFLSSENLVDTHSILYCGAVAACRLANVKFPSCDEAIRPKPAAPAWQCRIERRVDEARALIGKLYCFREGNTRPRVMRFVRRAFAGTGISPHEYTSRITERIDFLKQKVCAWANRIRRYKRRVDRYSQNRMFQSDERWVYRNWERPEQSVTDVCRPDDVATSTFWRSIWSVPVRHTEGGWMRDVERVCEAIPQMEKIIITPTDVATAVRPLPNWKSPGPDGLHNFWLKWYSSSHALLASQFQSSLESGSLPQFLTTGVTHLLHKTGSPAEPKNYRPITCLSTVYKLLTSILRVKINKHIESNSIMSSSQNGCRKGSRGTKELLLIDMAISQQVHRSRKDLSTCWIDYKKAYDSVPHTWLMKVLELYKIDATLRTFLESCMRQWKTVLRYPGCRPIQGNDEPVWIKRGIFQGDSLSPLWFCLALNPLSTLLEDSGLGYRLRRGGQAISHLLYMDDLKLFAHNKLRLMELLKVTENFSSAIRMEFGVDKCAVMHVKKGEIVESEGIQLSDSIQVRSLSSTETYKYLGMSEALGINGADMKQSLKERFFGRLKKVLNSLLSGGNKVRAFNGWVMPVLMYSFGILKWTQTELDALDRRVRTLLTANRMHHPRSSVMRLYIPRKCGGRGFLNAKTLHNREMCSLREYFLKADVGMHRDVVAVDKGLTPLSMAKENWRKPVILTTDDRKEVWRGKELHGRFYRALYGSDVDFSASVAWLRFGDLFGETEGFVCAIMDEVILTNNYRRHIMKDGTVDVCRACHCPGESIRHIISGCSRLANGEYLHRHNQVARIIHQQLALKYKLVESEVPYYKYVPDPVLENDHATLYWDRSIITDRTIVANKPDIVVIDRLARRTMIIDVTIPHDENLVKAEKEKHIKYLDLAHEVVDMWNVDSAVIVPIVVTANGLMAKSFDDHLSKLALHGWLKGLIQKAVLLDTARIVRRFLSLEP

SEQ ID NO: 29379 - protein, 1199 aa, Hecatera dysodea
MLTRAATLRARHPPPGSPLSSASPPPDIESQVSPAVAVASSSSDEYFSPPTSPPPVRRQGRGRPPRGLGPRGQPAPSRVPATGGCVQRMRWTQSMNENVMRAYYESTEGGINLTAYRVRMLSLFQDLEPTVNVSAQRLSDQVRVIQRSHRLDEAALDRLRSEVLNNLIISTPTQTAVQAPGSGAIIPRPINVCDEVVDRVVTVSSQCNDRLRSALEDALREYRSTPTELRPRLPRLPMHKKNRALVCALDSLLKNIFESSENLVDTHSILYCGAVAACRVANVKFSNSDGATRPKNAAPAWQCRIERRIDEARVLIGKLYCFREGNTRPRVMRFVRRAFLGTEISPQEYMSRVTERIDFLKQKVCAWANRIRRYKRRVDRYSQNRMFQSDERWVYRAWERPEQSVTDVCRPDDVTTNTFWRSIWSVPVCHAEGGWMRDVERVCEAIPQMEKITITTVDIATAVRPLPNWKSPGPDGLHNFWLKWYSSSHALLASQFQSSLDSGSLPQFLTTGITHLLHKTGSPTEPKNYRPITCLSTVYKLLTSILRVKINEHIESNSIMSYSQNGCRKGSRGTKELLLIDMAISQQVRRSRKDLSTCWIDYKKAYDSVPHTWLLKVLELYKVDATLRTFLESCMRQWKTVLRYPGCRPIQGNEEPVWIKRGIFQGDSLSPLWFCLALNPLSTLLEDSGLGYRLRRGGQTISHLLYMDDLKLFAPNNLRLMELLKVTETFSSAIRMEFGVDKCAVMHVKKGEIMESEGIQLSDSIQVRSLSSTETYKYLGMSEALGINGADMKQSLKERFFGRLKKVLNSLLSGGNKVRAFNGWVMPVLMYSFGILKWTQTELDALDRRVRTLLTANRMHHPRSSVMRLYIPRKCGGRGFLNAKTLHNREMCSLREYFLKADVGMHRDVVAVDKGFTPLSMAKENWRKPVIPTTDDRREVWRGKELHGRFYRALYGSDVDFSASVAWLHFGDLFGETEGFVCAIMDEVILTNNYRRHIMKDGTVDVCRACHRPGESIRHIISGCSRLANGEYLHRHNQVARIIHQQLALKYKLVDSEVPYYKYVPDPVLENDHATLYWDRSIITDRTIIANKPDIVVIDRLARRTMIIDVTIPHDENLVKAEKEKQIKYLDLAHEIVDMWNMDSAVIVPIVVTANGLMAKSFDEHLSKLALHGWLKGLIQKAVLLDTARIVRRFLSLEP

SEQ ID NO: 29380 - protein, 1200 aa, Mythimna impura
MLTRSAARRARHPPPGSPLSSAAPPPVLGSPISPAAAVASSLSDKYFSPPTSPTPVRRPGRGRPPKSLGPRGQPAPSRVPAAGGCMQRMTWTQSMNENVMRAYYGSTEGGTNLTAYRVRMLSFFQELEPTVNVTTQRLSDQVWVIQRNHRLDDAALDRLRSEVLSNRIISTPIQTQTAAPRATDAILPQSNHVDDEADDRVVTVSSQCNDRLRSALEDALREYRSTPIALRPRLPRLPMHKKNRALVCALDSLLENVFESSVNLTDTHSILYCGAIAACRLANVKLPSCDGATRPKPAAPAWQCRIERRIDGARALIGKLYCFRERNTRPRVMRYVRRAFSGPGISPREYLSRVTERIDFLKQKVCAWANRIRRYKRRVDRYSQNRMFQSDERWVYRAWERPEQNVTDVTRPDAVATNTFWRNIWSVPVCHTEDDWMREVERVCEAIPEMEKVVISPIDVARAVRPLPNWKSPGPDGLQNFWLKWYSSSHALLASQFQSSLESGSLPQFLTTGVTHLLHKTGSTAEPKNYRPITCLSTVYKLLTSILRTKINEHIDTNSIMSASQNGCRNGSRGTKELLLIDMAISQQVRRSRKDLSTCWIDYKKAYDSVPHTWLMRVLELYKIYATLRTFLESCMGQWNTVLRYPGCRSIRRDDEPIWIRRGIFQGDSLSPLWFCLALNPLSTLLEESGLGYRLRRGGQVLSHLLYMDDLKLIAPNKLRLMELLKVTETFSSAIRMEFGVDKCAVMHVKRGEIMESEGIQLSDSIYLRSLSSTETYKYLGMSEALGINVADMKQSLKERFFDRLKKVLNSLLSGGNKVRAFNGWVMPVLMYSFGILKWTQTELDALDRRVRTLLTANRMHHPRSSVMRLYIPRKCGGRGFLNAKTLHNREVCSLREYFHKTDVGMHRDVVAVDKGLTPLSMAKENWRKPVVLTTDDRREIWKSKELHGRFYRALHESDVDFAASVAWLRFSNLFGETEGFICAIMDEVILTNNYRRYIMKDGTVDVCRACHRPGESIRHIISGCSRLANGEYLHRHNQVARIIHQQLALKYNLVYSEVPYYSYVPDPVLENDHVTLYWDRSIITDRTIVANKPDIVVIDRLARRAMIFDVTIPHDENLVKAEKEKQIKYLDLAHEVVDMWNVDSAIIVPIVVTANGLMAKSLDDHLSKLSLRGWIKGLIQKAVLLDTARIVRRFLSLQP

SEQ ID NO: 29381 - protein, 983 aa, Phlogophora meticulosa
MRFVSIGPHRPNLDPGYQGCLCTKKNRALVCPLDSLLKDLFESSGDLVDTHSILYCAAVAACRLANVKFPNNDVAIRPKPAVPAWQSRIERRIDGARVLIGKLYCFREGNTRPRVMRFVRRAFAGTGISPREYMSRIVERIDFLKQKVCAWANRIRRYKRRVDRYSQNRMFQSDERWVYRAWERPEQDVADVHRPDDTTTNAFWRNIWSVPVCHTEAHWMRDVERVCETITEMEKIIITPLDVATAVRPLPNWKAPGPDGLHNFWLKWLGSSHTRLASQFQSCLESGSLPQFLTTGITHLLYKSGSTTEPKNYRPITCLSTVYKLLTSILRAKIAQHIVGNSIMSASQNGCRNGSRGTKELLLIDMAISQQVRRSHKDLSTCWIDYKKAYDSVPHAWLMRVLELYKIDATLRTFLESCMGQWRTVLRYPGCRQIQGNDEPIWIKRGIFQGDSLSPLWFCLALNPLSTLLEDSGLGYRLRRGGQVISHLLYMDDLKLFAPNNLQLMELLKITESFSSTIRMEFGVDKCAVMHVKRGEIVESEGIQLSDSIQLRSLSSSDNYKYLGMSEALGINVTDMKQSLKERFFGRLKKVLNSLLSGGNKVRAFNGWVMPVLMYSFGILKWTQTELDALDRRVRTLLTANRMHHPRSSVMRLYIPRKCGGRGFLNAKTLYNREVCNLRDYFLKTEVGMHRDVVAVDKGLTPLSMAKENWRKPVVLTTDDRKQVWQSKELHGRFYRALHGPDVDFIASVSWLRFGDLFGETEGFVCAIMDEVILTNNYRKHIMKDGTVDMCRACHRPGESIRHIISGCSRLANGEYLHRHNQVARIIHQQLALRYKLVESEVPYYKYVPDPVLEDDHVTLYWDRSIITDRTIVANKPDIVVIDRLARRAMIVDVTIPHDENLVKAEKEKQIKYLDLAHEVVDMWNVDSAVIVPIVVTANGLLAKSLDDHLSRLSLHGWIKGLIQKAVLLDTARIVRRFLSLQP

SEQ ID NO: 29382 - protein, 1080 aa, Xestia xanthographa
MLSLFQDLEPTVIVSAQRLSDQVRVIQRSHRLDDAALDRLRSEVLSNLIVLTPTQTAVQVSAIDATPPRLNPAVVEEDDGVATVSSQCNDRLRSALENALHEYRSTPTELRPRLPRLPMHKKNRALVCALDSQLKNIFESSENLVDTHSILFCGAVAACRIANVKFPNCDVATRPKPAVPAWQRRIERRIDGARVLIGKLYCFREGNTRPRVMRFVRRAFSGTEISPQEYMSRATERIDFLKQKVYAWANRIRRYKRRVDRYSQNRMFQSDERWVYRAWERPEQNMTDVCHPDDAATSSFWRSIWSVPVCHTEADWMRDVERVCEPIPEMEPIFITPVDVARAVRPLPNWKSPGPDGLHNFWLKWFSSSHTCLASQFQSSLESGSLPQFLTTGVTHLLHKSGSPAEPKNYRPITCLSTIYKLLTSILRVKINTHIDKISIMSASQNGCRNGSRGTKELLLIDMAISQQVRRSRKDLSTCWIDYKKAYDSVPHTWLMRVLELYKVDTTLRTFLESCMGQWKTVLRYPGCRQIQGSDEPVWIKRGIFQGDSLSPLWFCLALNPLSTLLENSGLGCRLRKDGQVISHLLYMDDLKLFAPNKLRLMELLKVTETFSSAIRMEFGVDKCAVMYVKRGEIMESEGLQLSDSIHLKSLSSSETYKYLGMSEALGINVTDMKQSLRERFFGRLRKVLNSLLSGGNKVRAFNGWVMPVLMYSFGILKWTQTELDALDRRVRTLLTESRMHHPRSSVMRLYIPRKCGGRGFLNAKTLHNREVCSLREYFLKAEVGMHRDVVAVDKGLTPLSMAKENWHRPEVLTTDDRKEVWQGKVLHGRFYRALHGPDVDFIASVSWLRFGDLFGETEGFVCAIMDEVMLTNNYRKYIMKDGTVDVCRACHLPGESIRHIISGCSRLANGEYLHRHNQVARIIHQQLALKYKLVESEVPYYKYVPDPVLENDHVTLYWDRSIITDRTIVANKPDIVMMDRSARRVMIIDVTIPHDENLVKAEKEKQIKYLDLAHEVRGMWNMNSVIIVPIVVSANGLIAKSFDDHLSKLSLGGWIKGLIQKAVLLDTARIVRRFLSLQP

SEQ ID NO: 29383 - protein, 1201 aa, Xestia xanthographa
MMLTRAAAARRARLPTPDSSLSSASPPPDPGSPVSPVAAVASSSSDEYFSPPTSPPPVRRAGRGRPPKGLGLRGQQAPSRVPATGGCVQRMKWTQAMNENVMRAYYGSTEGGTNLTAYRARMLSLFQDLEPTVNVSAQRLSDQVRVIQRNHRLDDAALDRLRSEVLSNLIILTPTQTAVQVSAINVTLPRSNPAVVEEDDRVSTVSSQCNDRLRSALEDALREYRSTPTEIRPRLPRLPMHKKNRALVCALDSQLKNIFKSSEDLVDTHSILFCGAVAACRLANVKFPNCDVATRPKPAVPAWQRRIERRIDEARVLIGKLYCFREGNTRPRVMRFVRRAFSGTEISPQEYMSRVTERIDFLKQKVYAWANRIRRYKRRVDRYSQNRMFQSDERWVYRAWERSEQNMTNVCRPDDVATSSFWRSIWSVPVCHTEADWMRDVERVCEPIPEMEPIFITPLDVARAVRPLPNWKSPGPDGLHNFWLKWFSSSHTCLASQFQSSLESGSLPQFLTTGITHLLHKSGSPAEPKNYRPITCLSTIYKLLTSILRVKINTHIDKNSIMSASQNGCRNGSRGTKELLLIDMAISQQVRRSRKDLSTCWIDYKKAYDSVPHTWLMRVLELYKIDTTLRTFLESCMGQWRTVLRYPGCRQIQGSDEPVWIKRGIFQGDSLSPLWFCLALNPLSTLLENSGLGCRLRKDGQVISHLLYMDDLKLFAPNKLRLMELLKVTETFSSAIRMEFGVDKCAVMYVKRGEIMESEGLQLSDPIHLRSLSSSETYKYLGMSEALGINITDMKQSLKERFFGRLRKVLNSLLSGGNKVRAFNGWVMPVLMYSFGILKWTQTELDALDRRVRTLLTESRMHHPRSSVMRLYIPRKCGGRGFLNAKTLHNREVCSLREYFLKAEVGMHRDVVAVDKGLTPLSMGKENWHKPEVLTTDDRKEVWQGKELHGRFYRALHGPDVDFLASVSWLRFGDLFGETEGFVCAIMDEVMLTNNYRKYIMKDGTVDVCRACHLPGESIRHIISGCSRLANGEYLHRHNQVARIIHQQLALKYKLVESEVPYYKYVPDPVLEKDHVTLYWDRSIITDRTIVANKPDIVMIDRSARRVMIIDVTIPHDENLVKAEKEKQIKYLDLAHEVRDMWNMNSVIIVPIVVTANGLIAKSFDDHLSKLSLGGWIKGLIQKAVLLDTARIVRRFLSLQP

SEQ ID NO: 29384 - protein, 1069 aa, Xestia xanthographa
MGPRFDSQVGQSVIGFFYKEFSSSHGVWICARLIIIIIIITPTQTAVQVSAIDATPPRLNPAVVEEDDGVATVSSQCNDRLRSALENALHEYRSTPTELRPRLPRLPMHKKNRALVCALDSQLKNIFESSENLVDTHSILFCGAVAACRIANVKFPNCDVATRPKPAVPAWQRRIERRIDGARVLIGKLYCFREGNTRPRVMRFVRRAFSGTEISPQEYMSRATERIDFLKQKVYAWANRIRRYKRRVDRYSQNRMFQSDERWVYRAWERPEQNMTDVCRPDDAATSSFWRSIWSVPVCHTEADWMRDVERVCKPIPEMEPIFITPLDVARAVRPLPNWKSPGPDGLHNFWLKWFSSSHTCLASQFQSSLESGSLPQFLTTGVTHLLHKSGSPAEPKNYRPITCLSTIYKLLTSILRVKINTHIDKNSIMSASQNGCRNGSRGTKELLLIDMAISQQVRRSRKDLSTCWIDYKKAYDSVPHTWLMRVLELYKVDTTLRTFLESCMGQWKTVLRYPGCRQIQGSDEPVWIKRGIFQGDSLSPLWFCLALNPLSALLENSGLGCRLRKDGQVISHLLYMDDLKLFAPNKLRLMELLKVTETFSSAIRMEFGVDKCAVMYVKRGEIMESEGLQLSDSIHLKSLSSSETYKYLGMSEALGINVTDMKQSLRERFFGRLRKVLNSLLSGGNKVRAFNGWVMPVLMYSFGILKWTQTELDALDRRVRTLLTESRMHHPRSSVMRLYIPRKCGGRGFLNAKTLHNREVCSLREYFFKAEVGMHRDVVAVDKGLTPLSMAKENWHRPEVLTTDDRKEVWQGKELHGRFYRALHGPDVDFIASVSWLRFGDLFGETEGFVCAIMDEVMLTNNYRKYIMKDGTVDVCRACHLPGESIRHIISGCSRLANGEYLHRHNQVARIIHQQLALKYKLVESEVPYYKYVPDPVLENDHVTLYWDRSIITDRTIVANKPDIVMVDRSARRVMIIDVTIPHDENLVKAEKEKQIKYLDLAHEVRGMWNMNSVIIVPIVVTANGLIAKSFDDHLSKLSLGGWIKGLIQKAVLLDTARIVRKFLSLQP

SEQ ID NO: 29385 - protein, 1199 aa, Mamestra brassicae
MITRAAARRAHPPPPGSSLSSASPTPDIGSQVSPVVAVASSSSDEYFSPPTSPTPVRRQGRGRPPRSLGSRGQPAPSRVPAAGGCVQRMRWTQSMNENVMRAYYGSTEGGTNLTAYRVRMLSLFQDLEPTVNVSAQRLSDQVRVIQHNCRLDDAALERLRSEVLSNLIISTPTQTVVQAPASGAITPRPNNGSDEVDDRVVTVSSQCNDRLRSALEDALREYRLTPTELRPRLPRLPMHKKNRALVCALDSLLQNIFESSESLVDTHSILFCGAVAACRIANVKFPSCDEAIRPKPAAPAWQCRIERRIDEARALIGKLYCFREGNTRPRVMRFVRRAFSGTGISPREYTFRVTERIDFLKQKVCAWANRIRRYKRRVDRYSQNRMFQSDERWVYRAWERPEQSVTDVYRPDDVATTTFWRSIWSVPICHAEGGWMRDVERVCEAIPQMEKITITTLDVAKAVRPLPNWKSPGPDGLHNFWLKWYSSSHALLASQFQSSLESGSLPQFLTTGTTHLLHKTGSPAEPKNYRPITCLSTVYKLLTSILRAKINEHIESNSIMSASQNGCRKGSRGTKELLLIDMAISQQVRRSRKDLSTCWIDYKKAYDSVPHTWLMKVLELYKIDATLRTFLESCMRQWKTVLRYPGCQPIQGSDEPVWIKRGIFQGDSLSPLWFCLALNPLSTLLEDSGLGYRLRRGGQAISHLLYMDDLKLFAPNNLRLMELLKVTETFSSAIRMEFGVDKCAVMHVKKGEIMDSEGIQLSDSIQVRSLSSTESYKYLGMSQALGINGTDMKQSLRERFFGRLKKVLNSLLSGGNKVRAFNGWVMPVLMYTFGILKWTQTELDALDRRVRTLLTANRMHHPRSSVMRLYIPRKCGGRGFLNAKTLHNREMCSLREYFLKADVGMHRDVVAVDKGLTPLSMAKENWRKPVILTTDDRKEVWKGKELHGRFYRALYGSDVDFSASVAWLHFGDLFGETEGFVCAIMDEVILTNNYRKHIMKDGTVDVCRACHRPGESIRHIISGCSRLANGEYLHRHNQVARIIHQQLALKYKLVDSEVPYYKYVPDPVLENDHVTLYWDRSIITDRTIVANKPDIVVIDRLARRTMIIDVTIPHDENLVKAEKEKQIKYLDLAHEVVDMWNVDSAVIVPIVVTANGLMAKSFDDHLSKLALRGWIKGLIQKAVLLDTARIVRRFLSLEP

SEQ ID NO: 29386 - protein, 1199 aa, Mamestra brassicae
MITRAAARRAHPPPPGSSLSSASPTPDIGSQVSPVVAVASSSSDEYFSPPTSPTPVRRQGRGRPPRSLGSRGQPALSRVPAAGGCVQRMRWTQSMNENVMRAYYGSTEGGTNLTAYRVRMLSLFQDLEPTVNVSAQRLSDQVRVIQHNCRLDDAALERLRSEVLSNLIISTPTQTVVQAPASGAITPRPNNGSDEVDDRVVTVSSQCNDRLRSALEDALREYRLTPTELRPRLPRLPMHKKNRALVCALDSLLQNIFESSESLVDTHSFLFCGAVAACRIANVKFPSCDEAIRPKPAAPAWQCRIERRIDEARALIGKLYCFREGNTRPRVMRFVRRAFSGTGISPREYTFRVTERIDFLKQKVCAWANRIRRYKRRVDRYSQNRMFQSDERWVYRAWERPEQSVTDVYRPDDVATSTFWRSIWSVPICHAEGGWMRDVERVCEAIPQMEKITITTLDIAKAVRPLPNWKSPGPDGLHNFWLKWYSSSHALLASQFQSSLESGSLPQFLTTGITHLLHKTGSPAEPKNYRPITCLSTVYKLLTSILRAKINEHIESNSIMSASQNGCRKGSRGTKELLLIDMAISQQVRRSRKDLSTCWIDYKKAYDSVPHTWLMKVLELYKIDATLRTFLESCMRQWKTVLRYPGCQPIQGSNEPVWIKRGIFQGDSLSSLWFCLALNPLSTLLEDSGLGYRLRRGGQAISHLLYMDDLKLFAPNNLRLMELLKVTETFSSAIRMEFGVDKCAVMHVKKGEIMESEGIQLSDSIQVRSLSSTESYKYLGMSEALGINGTDMKQSLRERFFGRLKKVLNSLLSGGNKVRAFNGWVMPVLMYTFGILKWTQTELDALDRRVRTLLTANRMHHPRSSVMRLYIPRKCGGRGFLNAKTLHNREMCSLREYFLKADVGMHRDVVAVDKGLTPLSMAKENWRKPVILTTDDRKEVWKGKELHGRFYRALYGSDVDFSASVAWLRFGDLFGETEGFVCAIMDEVILTNNYRKHIMKDGTVDVCRACHRPGESIRHIISGCSRLANGEYLHRHNQVARIIHQQLALKYKLVDSEVPYYKYVPDPVLENDHVTLYWDRSIITDRTIVANKPDIVVIDRLARRTMIIDVTIPHDENLVKAEKEKQIKYLDLAHEVVDMWNVDSAVIVPIVITANGLMAKSFDDHLSKLALRGWIKGLIQKAVLLDTARIVRRFLSLEP

SEQ ID NO: 29387 - protein, 1199 aa, Mamestra brassicae
MLTRAALQRARPPPPDPSLSSASPPPDIGSPLSPAVAVASSSSDEYFSPPTSPTPVRRQGRGRPPRGLGPRGQPAPSRVPATGGCVQRMRWTQSMNENVMRAYYGSTEGGTNLTAYRVRMLSLFQDLEPTVNVSAQRLSDQVRVIQRNHRLDDAALDRLRSEVLNNLIISTPTQTAVQAPVNGSITPRPNNVSDEVDDRVVTVSSQCNDRLRSALEDALREYRSTPTELRPRLPRLPMHKKNRALVCALDSLLQNIFESSESLVDTHSILYCGAVAACRIANVKFPGCDEAIRPKPAAPAWQRRIERRIDETRALIGKLYCFREGNTRPRVMRFVRRAFSGTEISPRDFTSRVTERIDFLKQKVCAWASRIRRYKRRVDRYSQNRMFQSDERWVYRAWERPEQSVTDVCRPDDVATSIFWRSIWSVPICHAEGGWMRDVERVCEAIPQMEKIKITTLDVAKAVRPLPNWKSPGPDGLHNFWLKWYSSSHALLASQFQSSLDSGSLPQFLTTGVTHLLHKTGSPTEPKNYRPITCLSTVYKLLTSILRAKINEHIESNSIMSASQNGCRKGSRGTKELLLIDMTISQQVRRSRKDLSTCWIDYKKAYDSVPHTWLMKVLELYKIDATLRTFLESCMRQWKTVLRYPGCRPIQGSDEPVWIKRGIFQGDSLSPLWFCLALNPLSTLLEDSGLGYRLRRGGQAISHLLYMDDLKLFAPNNLRLMELLKVTETFSSAIRMEFGVDKCAVMHVKKGEIMESEGIHLSDSIQVRSLSSTETYKYLGMLEALGINGTDMKQSLRERFFGRLKKVLNSLLSGGNKVRAFNGWVMPVLMYTFGILKWTQTELDALDRRVRTLLTANRMHHPRSSVMRLYIPRKCGGRGFLNAKTLHNREMCSLREYFLKADVGMHRDVVAVDKGLTPLSMAKENWRTPVILTTDDRKEVWKGKELHGRFYRALHGSDVDFSASVAWLRFGDLFGETEGFVCAIMDEVILTNNYRRHIMKDGTVDMCRACHRPGESIRHIISGCSRLANGEYLHRHNQVARIIHQQLALKYNLVDSEVPYYKYVPDPVLENDHVTLYWDRSIITDRTIVANKPDIVVIDRLARRTMIIDVTIPHDENLVKAEKEKQIKYLDLAHEVVDMWNVDSAVIVPIVVTANGLMAKSFDDHLSKLALRSWVKGLIQKAVLLDTARIVRRFLSLEP

SEQ ID NO: 29388 - protein, 1199 aa, Mamestra brassicae
MITRAAARRAHPPPPGSSLSSASPTPDIGSQVSPVVAVASSSSDEYFSPPTSPTPVRRQGRGRPPRSLGSRGQPALSRVPAAGGCVQRMRWTQSMNENVMRAYYGSTEGGTNLTAYRVRMLSLFQDLEPTVNVSAQRLSDQVRVIQHNCRLDDAALERLRSEVLSNLIISTPTQTVVQAPASGAITPRLNNGSDEVDDRVVTVSSQCNDRLRSALEDALREYRLTPTELRPRLPRLPMHKKNRALVCALDSLLQNIFESSESLVDTHSILFCGAVAACRIANVKFPSCDEAIRPKPAAPAWQCRIERRIDEARALIGKLYCFREGNTRPRVMRFVRRAFSGTGISPREYTFRVTERIDFLKQKVCAWANRIRRYKRRVDRYSQNRMFQSDERWVYRAWERPEQSVTDVYRPDDVATSTFWRSIWSVPICHAEGGWMRDVERVCEAIPQMEKITITTLDIAKAVRPLPNWKSPGPDGLHNFWLKWYSSSHALLASQFQSSLESGSLPQFLTTGITHLLHKTGSPAEPKNYRPITCLSTVYKLLTSILRAKINEHIESNSIMSASQNGCRKGSRGTKELLLIDMAISQQVRRSRKDLSTCWIDYKKAYDSVPHTWLMKVLELYKIDATLRTFLESCMRQWKTVLRYPGCQPIQGSDEPVWIKRGIFQGDSLSPLWFCLALNPLSTLLEDSGLGYRLRRGGQAISHLLYMDDLKLFAPNNLRLMELLKVTETFSSAIRMEFGVDKCAVMHVKKGEIMESEGIQLSDSIQVRSLSSTESYKYLGMSEALGINGTDMKQSLRERFFGRLKKVLNSLLSGGNKVRAFNGWVMPVLMYTFGILKWTQTELDALDRRVRTLLTANRMHHPRSSVMRLYIPRKCGGRGFLNAKTLHNREMCSLREYFLKADVGMHRDVVAVDKGLTPLSMAKENWRKPVILTTDDRKEVWKGKELHGRFYRALYGSDVDFSASVAWLRFGDLFGETEGFVCAIMDEVILTNNYRKHIMKDGTVDVCRACHRPGESIRHIISGCSRLANGEYLHRHNQVARIIHQQLALKYKLVDSEVPYYKYVPDPVLENDHVTLYWDRSIITDRTIVANKPDIVVIDRLARRTMIIDVTIPHDENLVKAEKEKQIKYLDLAHEVVDMWNVDSAVIVPIVITANGLMAKSFDDHLSKLALRGWIKGLIQKAVLLDTARIVRRFLSLEP

SEQ ID NO: 29389 - protein, 868 aa, Mamestra brassicae
MRFVRRAFSGTGISPREYTFRVTERIDFLKQKVCAWANRIRRYKRRVDRYSQNRMFQSDERWVYRAWERPEQSVTDVYRPDDVATSTFWRSIWSVPICHAEGGWMRDVERVCEAIPQMEKNTMTTLDIAKAVRPLPNWKSPGPDGLHNFWLKWYSSSHALLASQFQSSLESGSLPQFLTTGITHLLHKTGSPAEPKNYRPITCLSTVYKLLTSILRAKINEHIESNSIMSASQNGCRKGSRGTKELLLIDMAISQQVRRSRKDLSTCWIDYKKAYDSVPHTWLMKVLELYKIDATLRTFLESCMRQWKTVLRYPGCQPIQGSDEPVWIKRGIFQGDSLSPLWFCLALNPLSTLLEDSGLGYRLRRGGQAISHLLYMDDLKLFAPNNLRLMELLKVTETFSSAIRMKFGVDKCAVMHVKKGEIMESEGIQLSDSIQVRSLSSTESYKYLGMSEALGINGTDMKQSLRERFFGRLKKVLNSLLSGGNKVRAFNGWVMPVLMYTFGILKWTQTELDALDRRVRTLLTANRMHHPRSSVMRLYIPRKCGGRGFLNAKTLHNREMCSLREYFLKADVGMHRDVVAVDKGLTPLSMAKENWRKPVILTTDDRKEVWKGKELHGRFYRALYGSDVDFSASVAWLRFGDLFGETEGFVCAIMDEVILTNNYRKHIMKDGTVDVCRACHRPGESIRHIISGCSRLANGEYLHRHNQVARIIHQQLALKYKLVDSEVPYYKYVRDPVLENDHVTLYWDRSIITDRTIVANKPDIVVIDRLARRTMIIDVTIPHDENLVKAEKEKQIKYLDLAHEVVDMWNVDSAVIVPIVITANGLMAKSFDDHLSKLALRGWIKGLIQKAVLLDTARIVRRFLSLEP

SEQ ID NO: 29390 - protein, 1202 aa, Noctua fimbriata
MITRAAYRRARLPPPDPSLSSASPPPESSPIVSAVTPAVAVASSSSDEYFSPPTSPTPVRRQGRGRPPRSLGLRGHPAPSRVPAAGGCVQRMRWTHSINENVMRAYYGSTEGGTNLTAYRVGMLSLFQVLEPTVNVSAQRLSDQVRVIQRNHMLDDAVLDRLRSEVLSNRIVLTPAQTAVQASVIDATPPRFNPAVVEEDDRVAVVSSQCNDRLRSALEDALREYRSTPTELRPRLPRLPMHNKNRALVCALDSQLENIFESSENLVDTHSILYCGAVAACRLANVKFSNCDVATRPKPAVPAWQRRIERRIDGARVLIGKLHCFREGNTRPRVMRFVRRAFSGTGISPQEYMSRVTERIDFLKQKVYAWANRIRRYKRRVDRYSQNRMFQSDERWVYRAWERPELNMTDVCRPDDAATSSFWRSIWSVPVCHTEADWMRDVERVCEPIPEMEPILITPLDIARAVRPLPNWKSPGPDGLHNFWLKWLSSSHTCLASQFQSSLESGSLPQFLTTGVTHLLHKSGSPAEPKNYRPITCLSTVYKLLTSILRAKINTHIDKNSIMSASQNGCRNGSRGTKELLLIDMAISQQVRRSRKNLSTCWIDYKKAYDSVPHTWLMRVLELYKIDATLRAFLESCMGQWRTVLRYPGCRQIQGNDEPVWIKRGIFQGDSLSPLWFCLALNPLSTLLEDSGLGYRLRRGGQVISHLLYMDDLKLFAPNKLQLMELLKVTETFSSAIRMEFGVDKCAVMYVKRGEIMESEGIQLSDFIHLRSLSSSESYKYLGMSEALGINVTDMKQSLKERFFGRLNKVLHSLLSGGNKVRAFNGWVMPVLMYSFGVLKWTQTELDALDRRVRTLLTANRMHHPRSSVMRLYIPRKCGGRGFLNAKSLHNREMCSLREYFLKVEVGMHRDVVAVDKGLTPLSMAKENWRKPEVLTTDDRKEVWQGKELHGRFYRALHGPDVDFLASVSWLRFGDLFGETEGFVCAIMDEVMLTNNYRKYIMKDGTVDVCRACHRPGESIRHIISGCSRLANGEYLHRHNQVARIIHQQLALKYKLVESEVPYYKYVPDPVLEKNHVTLYWDQSIITDRTIVANKPDIVVIDRSARRVMIVDVTIPHDENLVKAEKEKQIKYLDLAHEVVDMWHVNSAIIVPIVVTANGLIAKSLDEHLSKLSLGGWIKGLIQKAVLLDTARIVRRFLSLEP

SEQ ID NO: 29391 - protein, 1206 aa, Noctua fimbriata
MITRSRAKQLQEAHTPSPGSSLSSASQPPRRATSVSTVSPVAAVASSSSDEFFSPPSTPPPSPRRRGRGRPPAGLGPRGQPAPNRVPAAGGNVSRMRWTQSINEQVMRAYYGATEGGTNLTAYRVGMLSLFQVLEPTVNVSAQRLSDQVRVIQRNHMLDDAVLDRLRSEVLSNRIVLTPAQTAVQASVIDATPPRFNPAVVEEDDRVAVVSSQCNDRLRSALEDALREYRSTPTELRPRLPRLPMHNKNRALVCALDSQLENIFESSENLVDTHSILYCGAVAACRLANVKFPNCDVATRPKPAVPAWQRRIERRIDGARVLIGKLHCFREGNTRPRVMRFVRRAFSGTGISPQEYMSRVTERIDFLKQKVYAWANRIRRYKRRVDRYSQNRMFQSDERWVYRAWERPELNMTDVCRPDDAAMSSFWRSIWSVPVCHTEADWMRDVERVCEPIPEMEPILITPLDIARAVRPLPNWKSPGPDGLHNFWLKWLSSSHTCLASQFQSSLESGSLPQFLTTGVTHLLHKSGSPAEPKNYRPITCLSTVYKLLTSILRAKINTHIDKNSIMSASQNGCRNGSRGTKELLLIDMAISQQVRRSRKDLSTCWIDYKKAYDSVPHTWLMRVLELYKIDATLRAFLESCMGQWRTVLRYPGCRQIQGNNEPVWIKRGIFQGDSLSPLWFCLALNPLSTLLEDSGLGYRLRRGGQVISHLLYMDDLKLFAPNKLRLMELLKVTETFSSAIRMEFGVDKCAVMYVKQGEIMKSEGIQLSDSIHLRTLSSTESYKYLGMSEALGINVTDMKQSLKERFFGRLNKVLHSLLSGGNKVRAFNGWVMPVLMYSFGVLKWTQTELDALDRRVRTLLTANRMHHPRSSVMRLYIPRKCGGRGFLNAKSLHNREMCSLREYFLKVEVGMHRDVVAVDKGLTPLSMAKENWRKPEVLTTDDRKEVWQGKELHGRFYRALHGPDVDFLASVSWLRFGDLFGETEGFVCAIMDEVMLTNNYRKYIMKDGTVDVCRACHRPGESIRHIISGCSRLANGEYLHRHNQVARIIHQQLALKYKLVESEVPYYKYVPDPVLEKDHVTLYWDQSIITDRTIVANKPDIVVIDRSARRVMIVDVTIPHDENLVKAEKEKQIKYLDLAHEVVDMWNVNSAIIVPIVVTANGLIAKNLDDHLSRLSLGGWIKGLIQKAVLLDTARIVRRFLSLEP

SEQ ID NO: 29392 - protein, 1199 aa, Noctua fimbriata
MLTRAAARRARLPPPDPSLSSASPPPESSPIVSAVTPAVAVASSSSDEYFSPPTSPTPVRRQGRGRPPRSLGLRGHTAPSRVPAAGGCVQRMRWTHSINENVMRAYYGSTEGGTNLTAYRVGMLSLFQVLEPTVNVSAQRLSDQVRVIQRNHMLDDAVLDRLRSEVLSNRIVLTPAQTAVQESVIDATPPRFNPAVVEEDDRVAVVSSQCNDRLRSALEDALREYRSTPTELRPRLPRLPMHNKNRALVCALDSQLENIFESSENLVDTHSILYCGACRLANVKFPNCDVATRPKPAVPAWQRRIERRIDGARVLIGKLHCFREGNTRPRVMRFVRRAFSETGISPQEYMSRVTERIDFLKQKVYAWANRIRRYKRRVDRYSQNRMFQNDERWVYRAWERPELNMTDVCRPDDAATSSFWRSIWSVPVCHTEADWMRDVERVCEPIPEMEPILITPLDIARAVRPLPNWKSPGPDGLHNFWLKWLSSSHTCLASQFQSSLESGSLPQFLTTGVTHLLHKSGSPAEPKNYRRITCLSTVYKLLTSILRAKINTHIDKNSIMSASQNGCRNGSRGTKELLLIDMAISQQVRRSRKDLSTCWIDYKKAYDSVPHTWLMRVLELYKIDATLRAFLESCMGQWRTVLRYPGCRQIQGNDEPVWIKRGIFQGDSLSPLWFCLALNPLSTLLEDSGLGYRLRRGGQVISHLLYMDDLKLFAPNKLQLMELLKVTETFSSAIRMEFGVDKCAVMYVKRGEIMESEGIQLSDSIHLRSLSSSESYKYLGMSEALGINVTDMKQSLKERFFGRLNKVLHSLLSGGNKVRAFNGWVMPVLMYSFGVLKWTQTELDALDRGVRTLLTANRMHHPRSSVMRLYIPRKCGGRGFLNAKSLHNREMCSLREYFLKVEVGMHRDVVAVDKGLTPLSMAKENWRKPEVLTTDDRKEVWQGKELHGRFYRALHGPDVDFLASVSWLRFGDLFGETEGFVCAIMDEVMLTNNYRKYIMKDGTVDVCRACHRPGESIRHIISGCSRLANGEYLHRHNQVARIIHQQLALKYKLVESEVPYYKYVPDPVLEKDHVTLYWDQSIITDRTIVANKPDIVVIDRSARRVMIVDVTIPHDENLVKAEKEKQIKYLDLAHEVVDMWNVNSAIIVPIVVTANGLIAKSLDDHLSKLSLGGWIKGLIQKAVLLDTARIVRRFLSLEP

SEQ ID NO: 29393 - protein, 1202 aa, Noctua fimbriata
MLTRAAARRARLPPPDPSLSSASPPPESSPIVSAVTPAVAVASSSSDEYFSPPTSPTPVRRQGRGRPPRSLGLRGHPAPSRVPAAGGCVQRMRWTHSINENVMRAYYGSTEGGTNLTAYRVGMLSLFQVLEPTVNVSAQRLSDQVRVIQRNHMLDDAVLDRLRSEVLSNRIVLTPAQTAVQASVIDATPPRFNPAVVEEDDRVAVVSSQCNDRLRSALEDALREYRSTPTELRPRLPRLPMHNKNRALVCALDSQLENIFESSENLVDTHSILYCGAVAACRLANVKFPNCDVATRPKPAVPAWQRRIERRIDGARVLIGKLHCFREGNTRPRVMRFVRRAFSGTGISPQEYMSRVTERIDFLKQKVYAWANRIRRYKRRVDRYSQNRMFQSDERWVYRAWERPELNMTDVCRPDDAATSSFWRSIWSVPVCHTEADWMRDVERVCEPIPEMEPILITPLDIARAVRPLPNWKSPGPDGLHNFWLKWLSSSHTCLASQFQSSLESGSLPQFLTTGVTHLLHKSGSPAEPKNYRPITCLSTVYKLLTSILRAKINTHIDKNSIMSASQNGCRNGSRGTKELLLIDMAISQQVRRSRKDLSTCWIDYKKAYDSVPHTWLMRVLELYKIDATLRTFLESCMGQWRTVLRYPGCRQIQGNDEPVWIKRGIFQGDSLSPLWFCLALNPLSTLLEDSGLGYRLRRGGQVISHLLYMDDLKLFAPNKLQLMELLKVTETFSSAIRMEFGVDKCAVMYVKRGEIMESEGIQLSDFIHLRSLSSSESYKYLGMSEALGINVTDMKQSLKERFFGRLNKVLHSLLSGGNKVRAFNGWVMPVLMYSFGVLKWTQTELDALDRRVRTLLTANRMHHPRSSVMRLYIPRKCGGRGFLNAKSLHNREMCSLREYFFKVEVGMHRDVVAVDKGLTPLSMAKENWRKPEVLTTDDRKEVWQGKELHGRFYRALHGPDVDFLASVSWLRFGDLFGETEGFVCAIMDEVMLTNNYRKYIMKDGTVDVCRACHRPGESIRHIISGCSRLANGEYLHRHNQVARIIHQQLALKYKLVESEVPYYKYVPDPVLEKNHVTLYWDQSIITDRTIVANKPDIVVIDRSARRVMIVDVTIPHDENLVKAEKEKQIKYLDLAHEVVDMWHVNSAIIVPIVVTANGLIAKSLDDHLSKLSLGGWIKGLIQKAVLLDTARIVRRFLSLEP

SEQ ID NO: 29394 - protein, 1199 aa, Noctua fimbriata
MITRAAYRRARLTTPDSPLRSASPPPDPGSPVSPAAAVASSSSDEYFSPPTSPTPVRRQGRGRPPRSLGLRGHPAPSRVPAAGGCVQRMRWTHSINENVMRAYYGSTEGGTNLTAYRVGMLSLFQVLEPTVNVSAQRLSDQVRVIQRNHMLDEAVLDRLRSEVLSNRIVLTPAQTAVQASVVDATPPRFNPAVVEEDDRVAVVSSQCNDRLRSALEDALREYRSTPTELRPRLPRLPMHNKNRALVCALDSQLKNIFESSENLVDTHSILYCGAVAACRLANVKFPNCDVATRPKPAVPAWQRRIERRIDGARVLIGKLYCFREGNTRPRVMRFVRRAFLGTEISPQEYMSRVTERIDFLKQKVYAWANRIRRYKRRVDRYSQNRMFQSDERWVYRAWERPELNMTDVCRPDDAATCSFWRSIWSVPVCHTEADWMRDVERVCEPIPEMEPILITPLDIARAVRPLPNWKSPGPDGLHNFWLKWLSSSHTCLASQFQSSLESGSLPQFLTTGVTHLLHKSGSPAEPKNYRPITCLSTVYKLLTSILRAKINTHIDKNSIMSASQNGCRSGSRGTKELLLIDMAISQQVRRSRKDLSTCWIDYKKAYDSVPHTWLMRVLELYKIDATLRAFLESCMGQWRTVLRYPVCGQIQGNDEPVWIKRGIFQGDSLSPLWFCLALNPLSTLLEDSGLGYRLRRGGQVISHLLYMDDLKLFAPNKLQLMELLKVTETFSSAIRMEFGVDKCAVMYVKQGEIMESEGIQLSDSIHLRTLSSTESYKYLGMSEALGINVTDMKQSLKERFFGRLNKVLHSLLSGGNKVRAFNGWVMPVLMYSFGVLKWTQTELDALDRRVRTLLTANRMHHPRSSVMRLYIPRKCGGRGFLNAKSLHNREMCSLREYFLKVEVGMHRDVVAVDKGLTPLSMAKENWRKPEVLTTDDRKEVWQGKELHGRFYRALHGPDVDFLASVSWLRFGDLFGETEGFVCAIMDEVMLTNNYRKYIMKDGTVDVCRACHRPGESIRHIISGCSRLANGEYLHRHNQVARIIHQQLAMKYKLVESEVPYYKYVPDPVLEKDHVTLYWDQSIITDRTIVANKPDIVVIDRSARRVMIVDVTIPHDENLVKAEKEKQIKYLDLAHEVVDMWNVNSAIIVPIVVTANGLIAKSLDDHLSKLSLGGWIKGLIQKAVLLDTARIVRRFLSLEP

SEQ ID NO: 29395 - protein, 1199 aa, Noctua fimbriata
MITRAAYRRARLTTPDSPLSSASPPPDPGSPVSPAAAVASSSSDEYFSPPTSPTPVRRQGRGRPPRSLGLRGHPAPSRVPAAGGCVQRMRWTHSINENVMRAYYGSTEGGTNLTAYRVGMLSLFQVLEPTVNVSAQRLSDQVRVIQRNHMLDEAVLDRLRSEVLSNRIVLTPAQTAVQASVVDATPPRFNPAVVEEDDRVAVVSSQCNDRLRSALEDALREYRSTPTELRPRLPRLPMHNKNRALVCALDSQLKNLFESSENLVDTHSILYCGAVAACRLANVKFPNCDVATRPKPAVPAWQRRIERRIDGARVLIGKLYCFREGNTRPRVMRFVRRAFLGTEISPQEYMSRVTERIDFLKQKVYAWANRIRRYKRRVDRYSQNRMFQSDETWVYRAWKRPELNMTDVCRPDDAATCSFWRSIWSVPVCHTEADWMRDVERVCEPIPEMEPILITPLDIARAVRPLPNWKSPGPDGLHNFWLKWLSSSHTCLASQFQSSLESESLPQFLTTGVTHLLHKSGSPAEPKNYRPITCLSTVYKLLTSILRVKINTHIDKNSIMSASQNGCRNGSRGTKELLLIDMAISQQVRRSGKDLSTCWIDYKKAYDSVPHTWLMRVLELYKIDATLRAFLESCMGQWRTVLRYPGCRQIQGNDEPVWIKRGIFQGDSLSPLWFCLALNPLSTLLEDSGLGYRLRRGGQVISHLLYMDDLKLFAPNKLRLMELLKVTETFSSAIRMEFGVDKCAVMYVKRGEIMESEGIQLSDSIHLRTLSSTESYKYLGMSEALGINVTDMKQSLKERFFGRLNKVLHSLLSGGNKVRAYNGWVMPVLMYSFGVLKWTQTELDALDRRVRTLLTANRMHHPRSSVMRLYIPRKCGGRGFLNAKSLHNREMCSLREYFLKVEVGMHRDVVAVDKGLTPLSMAKENWRKPEVLTTDDRKEVWQGKELHGRFYRALHGPDVDFLASVSWLRFGDLFGETEGFVCAIMDEVMLTNNYRKYIMKDGTVDVCRACHRPGESIRHIISGCSRLANGEYLHRHNQVARIIHQQLALKYKLVESEVPYYKYVPDPVLEKDHVTLYWDQSIITDRTIVANKPDIVVIDRSARRVMIVDVTIPHDENLVKAEKEKQIKYLDLAHEVVDMWNVNSAIIVPIVVTANGLIAKSLDDHLSKLSLGGWIKGLIQKAVLLDTARIVRRFLSLEP

SEQ ID NO: 29396 - protein, 1202 aa, Noctua fimbriata
MLTRAAARRARLPPPDPSLSSASPPPESSHIVSAVTPAVAVASSSSDEYFSPPTSPTPVRRQGRGRPPRSLGLRGHPAPSRVPAAGGCVQRMRWTHSINENVMRAYYGSTEGGTNLTAYRVGMLSLFQVLEPTVNVSAQRLSDQVRVIQRNHMLDDAVLDRLRSEVLSNRIVLTPAQTAVQASVIDATPPRFNPAVVEEDDRVAVVSSQCNDRLRSALEDALREYRSTPTELRPRLPRLPMHNKNRALVCALDSQLENIFESSENLVDTHSILYCGAVAACRLANVKFPNCDVATRPKPAVPAWQRRIERRIDGARVLIGKLYCFREGNTRPRVMRFVRRAFSGTGISPQEYMSRVTERIDFLKQKIYAWANRIRRYKRRVDRYSQNRMFQSDERWVYRAWERPELNMTDVCRPDDAATSSFWRSIWSVPVCHTEADWMRDVERVCEPIPEMEPILITPLDIARAVRPLPNWKSPGPDGLHNFWLKWLSSSHTCLASQFQSSLESGSLPQFLTTGVTHLLHKSGSPAEPKNYRPITCLSTVYKLLTSILRAKINTHIDKNSIMSASQNGCRNGSRGTKELLLIDMAISQQVRRSRKDLSTCWIDYKKAYDSVPHTWLMRVLELYKIDATLRAFLESCMGQWRTVLRYPGCRQIQGNDEPVWIKRGIFQGDSLSPLWFCLALNPLSTLLEDSGLGYRLRRGGQVISHLLYMDDLKLFAPNKLQLMELLKVTETFSSAIRMEFGVDKCAVMYVKQGEIMESEGIQLSDSIHLRTLSSTESYKYLGMSEALGINVTDMKQSLKERFFGRLNKVLHSLLSGGNKVRAFNGWVMPVLMYSFGVLKWTQTELDALDRRVRTLLTANRMHHPRSSVMRLYIPRKCGGRGFLNAKSLHNREMCSLREYFLKVEVGMHRDVVAVDKGLTPLFMAKENWRKPEVLTTDDRKEVWQGKELHGRFYRALHGPDVDFLASVSWLRFGDLFGETEGFVCAIMDEVMLTNNYRKYIMKDGTVDVCRACHRPGESIRHIISGCSRLANGEYLHRHNQVARIIHQQLALKYKLVESEVPYYKYVPDPVLEKDHVTLYWDQSIITDRTIVANKPDIVVIDRSARRVMIVDVTIPHDENLVKAEKEKQIKYLDLAHEVVDMWNVNSAIIVPIVVTANGLIAKSLDDHLSRLSLGGWIKGLIQKAVLLDTARIVRRFLSLEP

SEQ ID NO: 29397 - protein, 1202 aa, Atethmia centrago
MLTRSAARARPPPPDSSLSSASPPPVPSPTVSAVTTPAAVVASSSSDEYFSPPTSPTPVRRQGRGRPPKSLGLRGQLAPSRVPAAGGCVQRMRWTQSMNENVMRAYYGSTEGGINLTAYRARMLSLFQELEPTVNVSAQRLSDQVRVIQRNHRLDDAALDRLRSEVLSNHIVSTPAQTATHAPIFDAIPPRSNHDVEEEDDRVATVSSQCNVRLRSALEDAFREYRSTPTELRPRLPRLPMHKKNRALVCALDSLLKDFFESSEDLVDTHSILYCAAVAACRLANVKFPNCDEATRPKPAVPAWQCRIERRIDGARVLISKLYCFREGNTRPRVMRFVRRAFSGTGISPREYMSRVTERIDFLKQKVCAWASRIRRYKRRVDRYTQNRMFQSDERWVYRAWERPEQNETDMCRPDDATTTAFWRSIWSEPVCHAEADWMRDVERVCETIPEMEVVVITPSDIARAVRPLPNWKSPGPDGLHNFWLKWLTSSHTCLASQFQSSLESGSLPQFLTTGITHLLHKSGSPAEPKNYRPITCLSTVYKLLTSILRAKINTHIDSNSIMSASQNGCRNGSRGTKELLLIDMAISQQVRRSRKDLSTCWIDYKKAYDSVPHTWLMKVLELYKIDTTLRTFLESCMGQWRTVLRYPGCRRIQGNDEPVWIKRGIFQGDSLSPLWFCLALNPLSTLLEDSGLGYRLRRGGQVISHLLYMDDLKIFAPNKLRLMELLKVTETFSGAIRMEFGVDKCAVMHVKRGEIMESEGIQLSDSIHLRSLSSPESYKYLGMSEALGINVTDMKQLLKERFFGRLKKVLISLLSGGNKVRAFNGWVMPVLMYSFGILKWTQTELDALDRRVRTLLTANRMHHPRSSVMRLYIPRKCGGRGFLNAKTLHNREICSLREYFLKAEVGMHRDVVAVDKGLTPLSMAKENWCKPVVLTTDDRKEIWQNKELHGRFYRALHEPDVDFLASVSWLRFGDLFGETEGFVCAIMDEVILTNNYRRHIMMDGTVDVCRACHRPGESIRHIISGCSRLANGEYLHRHNQVARIIHQQLALKYKLVNSEVPYYKYVPDPVLENDHVTLYWDRSIITDRTIVANKPDIVVIDRLARRAMIVDVTIPHDDSLVKAEKEKQIKYLDLAHEVVDMWNVNSAVIVPIVVTANGLMAESLNHHLSRLSLGGWIKGLIQKAVLLDTARIVRRFLSLEP

SEQ ID NO: 29398 - protein, 1202 aa, Atethmia centrago
MLTRSAARARPPPPDSSLSSASPPPVPSPTVSAVTTPAAVVASSSSDEYFSPPTSPTPVRRQGRGRPPKSLGLRGQLAPSRVPAAGGCVQRMRWTQSMNENVMRAYYGSTEGGTNLTAYRVRMLSLFQKLEPTVNVSAQRLSDQVRVIQRNHRLDDAALDRLRSEVLSNHIVSTPAQTATHAPIINAIPPRSNHDVEEEDDRVATVSSQCNVRLRSALEDAFREYRSTPTELRPRLPRLPMHKKNRALVCTLDSLLKDFFESSEDLVDTHSILYCAAVAACRLANVKFPNCDGTTRPKPAVPAWQCRIERRIDGARVLIGKLYCFREGNTRPRVMRFVRRAFSGTGIGPREYMSRVTERIDFLKQKVCAWASRIRRYKRRVDRYTQNRMFQSDERWVYRAWERPEQNETDVCRPDDATTTAFWRSIWSVPVCHAEADWMRDVERVCETIPEMEVVIITPSDIARAVRPLPNWKSPGPDGLHNFWLKWLTSSHTCLASQFQSSLESGSLPQFLTTGITHLLHKSGSPAEPKNYRPITCLSTVYKLLTSILRAKINTHIDSNSIMSASQNGCRNGSRGTKELLLIDMAISQQVRRFRKDLSTCWIDYKKAYDSVPHTWLMRVLEFYKIDTTLRTFLESCMGQWRTVLRYPGCRQIQGNDEPVWIKRGIFQGDSLSPLWFCLALNPLSTLLEDSGLGYRLRRGGQVISHLLYMDDLKIFAPNKLQLMELLKVTETFSSAIRMEFGVDKCAVMHVKRGQIMESEGIQLSDSIHLISLSSPESYKYLGMSEALGINVTDMKQSLKERFFGRLKKVLISPLSGGNKVRAFNGWVMPVLMYSFGILKWTQTELDALDRRVRTLLTANRMHHPRSSVMRLYIPRKCGGRGFLNAKTLHNREICSLREYFLKTEVGMHRDVVAVDKGLTPLSMAKENWCKPVILTTDDRKEIWQNKELHGRFYRALHEPDVDFLASVSWLRFGDLFGETEGFVCAIMDEVILTNNYRRHIMKDGTVDVCRACHRPGESIRHIISGCSRLANGEYLHRHNQVARIIHQQLALKYKLVNSEVPYYKYAPDPVLENDHVTLYWDRSIITDRTIVANKPDIVMIDRLARRAMIVDVTIPHDENLVKAEKEKQIKYLDLAHEVVDMWNVDSAVIVPIVVTANGLMAESLNHHLSRLSLGGWIKGLIQKAVLLDTARIVRRFLSLES

SEQ ID NO: 29399 - protein, 868 aa, Atethmia centrago
MRFVRRVFSGTGISPREYMSRVTERIDFLKQKVCAWASRIRRYKRRVDRYTQNRMFQSDERWVYRAWERPEQNETDVYRPDDATTTAFWRSIWSVPVCHAEADWMRDVERVCETIPEMEVVIITPSDIARAVRPLPNWKSPGPDGLHNFWLKWLTSSHTCLASQFQSSLESGSLPQFLTTGITHLLHKSGSPAEPKNYRPITCLSTVYKLLTSILRAKINTHIDSNSIMSASQNGCRNGSRGTKELLLIDMAISQQVRRFRKDLSTCWIDYKKAYDSVPHTWLMRVLEFYKIDTTLRTFLESCMGQWRTVLRYPGCRQIQGNDEPVWIKRGIFQGDSLSPLWFCLALNPLSTLLEDSGLGYRLRRGGQVISHLLYMDDLKIFAPNKLQLMELLKVTETFSSAIRMEFGVDKCAVMHVKRGEIMESEGIQLSDSIYLRSLSSPESYKYLGMSEALGINVTDMKQSLKERFFGRLKKVLISPLSGGNKVRAFNGWVMPVLMYSFGILKWTQTELDALDRRVRTLLTANRMHHPRSSVMRLYIPRKCGGRGFLNAKTLHNREICSLREYFLKTEVGMHRDVVAVDKGLTPLSMAKENWCKPVILTTDDRKEIWQNKELHGRFYRALHEPDVDFLASVSWLRFGDLFGETEGFVCAIMDEVILTNNYRRHIMKDGTVDVCRACHRPGESIRHIISGCSRLANGEYLHRHNQVARIIHQQLALKYKLVNSEVPYYKYAPDPVLENDHVTLYWDRSIITDRTIVANKPDIMVIDRLARRAMIVDVTIPHDENLVKAEKEKQIKYLDLAHEVVDMWNVDSAVIVPIVVTANGLMAESLNHHLSRLSLGGWIKGLIQKAVLLDTARIVRRFLSLES

SEQ ID NO: 29400 - protein, 1202 aa, Atethmia centrago
MLTRSAARARPPPPDSSLSSASPPPVPSPTVSAVTTPAAVVASSSSDEYFSPPTSPTPVRRQGRGRPPKSLGLRGQLAPSRVPAAGGCVQRMRWTQSMNENVMRAYYGSTEGGTNLTAYRVRMLSLFQKLEPTVNVSAQRLSDQVRVIQRNHRLDDAALDRLRSEVLSNHIVSTPAQTATHAPIINAIPPRSNHDVEEEDDRVATVSSQCNVRLRSALEDAFREYRSTPTELRPRLPRLPMHKKNRALVCALDSLLKDFFESSEDLVDTHSILYCAAVAACRLANVKFPNCDGATLPKPAVPAWQCRIERRIDGARVLIGKLYCFREGNTRPRVMRFVRRAFSGTGISPREYMSHVTERIDFLKQKVCAWASRIRRYKRRVDRYTQNRMFQSDERWVYRSWERPEQNETDVCRPDDATTTAFWRSIWSVPVCHAEADWMRDVERVCETIPEMEIVIITPSDIARAVRPLPNWKSPGPDGLHNFWLKWLTSSHTCLASQFQSSLESGSLPQFLTTGITHLLHKSGSPAEPKNYRPITCLSTVYKLFTSILRAKINTHIDSNSIMSASQNGCRNGSRGTKELLLIDMAISQQVRRFRKGLSTCWIDYKKAYDSVPHTWLMRVLELYKIDTTLRTFLESCMGQWRTVLRYPGCRQIQENDEPVWIKRGIFQGDSLSPLWFCLALNPLSTLLEDSGLGYRLRRGGQVISHLLYMDDLKIFAPNKLQLMELLKVTETFSSAIRMEFGVDKCAVMHVKRGEIMESERIQLSDPIHLRSLSSPESYKYLGMSEALGINVTDMKQSLKERFFGRLKKVLISPLSGGNKVRAFNGWVMPVLMYSFGILKWTQTELDALDRRVRTLLTANRMHHPRSSVMRLYIPRKCGGRGFLNAKTLHNREICSLREYFLKTEVGMHRDVVAVDKGLTPLSMAKENWCKPVILTTDDRREIWQNKELHGRFYRALHEPDVDFLASVSWLRFGDLFGETEGFVCAIMDEVILTNNYRRHIMKDGTVDVCRACHRPGESIRHIISGCSRLANGEYLHRHNQVARIIHQQLALKYKLVNSEVPYYKYAPDPVLENDHVTLYWDRSIITDRTIVANKPDIVVIDRLARRAMIVDVTIPHDENLVKTEKEKQIKYLDLAHEVVDMWNVDSAVIVPIVVTANGLMAESLNHHLSRLSLDGWIKGLIQKAVLLDTARIVRRFLSLES

SEQ ID NO: 29401 - protein, 1111 aa, Atethmia centrago
MRWTQSMNENVMRAYYGSTEGGTNLTAYRVRMLSLFQELEPTVNVSAQRLSDQVRVIQRNHRLDDAALDRLRSEVLSNHIVSTPAQTATHAPIIDAIPPRSNHDVEEEDDRVATVSSQCNVRLRSALEDAFREYRSTPTELRPRLPRLPMHKKNRALVCALDSLLKDFFESSEDLVDTHSILYCAAVAACRLANVKFPNCDEATRPKPAIPAWQCRIERRIDGARVLISKLYCFREGNTRPRVMRFVRRAFSGTGISPREYMSRVTERIDFLKQKVCAWASRIRRYKRRVDRYTQNRMFQSDERWVYRAWERPEQNETDMCRPDDATTTAFWRSIWSEPVCHAEADWMRDVERVCETIPEMEVVVITPSDIARAVRPLPNWKSPGPDGLHNFWLKWLTSSHTCLASQFQSSLESGSLPQFLTTGITHLLHKSGSPAEPKNYRPITCLSTVYKLLTSILRAKINTHIDSNSIMSASQNGCRNGSRGTKELLLIDMAISQQIRRSRKDLSTCWIDYKKAYDSVPHTWLMKVLELYKIDTTLRTFLESCMGQWRTVLRYPGSRRIQGNDEPVWIKRGIFQGDSLSPLWFCLALNPLSTLLEDSGLGYRLRRGGQVISHLLYMDDLKIFAPNKLRLMELLKVTETFSGAIRMEFDVDKCAVMHVKRGEIMESEGIQLSDSIHLRSLSSAESYKYLGMSEALGINVTDMKQLLKERFFGRLKKVLISLLSGGNKVRAFNGWVMPVLMYSFGILKWTQTELDALDRRVRTLLTANRMHHPRSSVMRLYIPRKCGGRGFLNAKTLHNREICSLREYFLKAEVGMHRDVVAVDKGLTPLSMAKENWCKPVVLTTDDRKEIWQNKELHGRFYRALHEPDVDFLASVSWLRFGDLFGETEGFVCAIMDEVILTNNYRRHIMKDGTVDVCRACHRPGESIRHIISGCSRLANGEYLHRHNQVARIIHQQIALKYKLVNSEVPYYKYVPDPVLENEHVTLYWDRSIITDRTIVANKPDIVVIDRLARRAMIVDVTIPHDDNLAKAEKEKQIKYLDLAHEVVDMWNVNSAVIVPIVVTANGLMAESLNHHLSRLSLGGWIKGLIQKAVLLDTARIVRRFLSLEP

SEQ ID NO: 29402 - protein, 1202 aa, Atethmia centrago
MLTRSAARARPPPPDSSLSSASPPPVPSPTVSAVTTPAAVVALSSSDEYFSPPTSPTPVRRQGRGRPPKSLGLRGQLAPSRVPAAGGCVQRMRWTQSMNENVMRAYYGSTEGGTNLTAYRVRMLSLFQELEPTVNVSAQRLSDQVRVIQRNHRLDDAALDRLRSEVLSNHIVSTPAQTATHAPIIDAIPPRSNHDVEEEDDRVATVSSQCNVRLRSALEDAFREYRSTPTELRPRLPRLPMHKKNRALVCALDSLLKDFFESSEDLVDTHSILYCAAVAACRLANVKFPNCDEATRPKLAVPAWQYRIERRIDGARVLISKLYCFREGNTRPRVMRFVRRAFSGTGISPREYMSRVTERIDFLKQKVCAWASRIRRYKRRVDRYTQNRMFQSDERWVYRAWERPEQNETDMCRPDDATTTAFWRSIWSEPVCHAEADWMRDVERVCETIPEMEVVVITPSDIARAVRPLPNWKSPGPDGLHNFWLKWLTSSHTYLASQFQSSLESGSLPQFLTTGITHLLHKSGSPAEPKNYRPITCLSTVYKLLTSILRAKINTHIDSNSIMSASQNGCRNGSRGTKELLLIDMAISQQVRRSRKDLSTCWIDYKKAYDSVPHTWLMKVLELYKIDTTLRTFLESCMGQWRTVLRYPGCRRIQGNDEPVWIKRGIFQGDSLSPLWFCLALNPLSTLLEDSGLGYRLRRGGQVISHLLYMDDLKIFAPNKLRLMELLKVTETFSGAIRMEFGVDKCAVMHVKRGEIMESEGIQLSDSIHLRSLSSPESYKYLGMSEALGINVTDMKQLLKERFFGRLKKVLISLLSGGNKVRAFNGWVMPVLMYSFGILKWTQTELDALDRRVRTLLTANRMHHPRSSVMRLYIPRKCGGRGFLNAKTLHNREICSLREYFLKAEVGMHRDVVAVDKGLTPLSMAKENWCKPVVLTTDDRKEIWQNKELHGRFYRALHEPDVDFLASVSWLRFGDLFGETEGFVCAIMDEVILTNNYRRHIMKDGTFDVCRACHRPGESIRHIISGCSRLANGEYLHRHNQVARIIHQQLALKYKLVNSEVPYYKYVPDPVLENDHVTLYWDRSIITDRTIVANKPDIVVIDRLARRAMIVDVTIPHDDNLVKAEKEKQIKYLDLAHEVVDMWNVNSAVIVPIVVTANGLMAESLNHHLSRLSLGGWIKGLIQKAVLLDTARIVRRFLSLEP

SEQ ID NO: 29403 - protein, 1201 aa, Mesoligia furuncula
MLTRSAARRAHIPPPDSSLSPAQPPPEPSPIESAVTPAVAVASSSSDEYFSPPTSPTPVRRQVRGRPPNSLGIRGHPAPSRVPATGGCVQRMRWTQSMNENVMRVYYGSKEGGINLTAYRDRMLSLFQELEPTVNVSAQRLSDQVRVIQRNHRLDDIALDRLRSEVLINHIVSTSAQTAAQVSTVDAIPPRFNRVEEEDDRVDTVSSQCNVRLRSALEDALREYRSTPTELRPRLPRLPMHKKNRALVCALDSQLKNFFESSEDLVDTHSILYCVAVAACRLANVKFSSCDGATRPKPAVPAWQRRIERRIDGARVRIGKLYCFREGNTRPRVMRFVRRAFSGTGISPREYMSRVTERIDFLKQKVCAWASRIRRYKRRVDRYTQNRMFQSDERWVYRAWERPEQNVTDVCRPDDAATSAFWCSIWSVPVCHTEAGWMQDVERVCESVPEMEKVLITPSDVARAVRPLSNWKSPGPDGLHNFWLKWLISSHTCLASQFQSSLESGSLPQFLTTGVTHLLHKSGSPAEPKNYRPITCLSTVYKLLTSILRAKINKHIESNSIMSASQNGCRNGSRGTKELLLIDMAISQQVRRSRKDLSTCWIDYKKAYDSVPHTWLMRVLELYKIDATLRTFLESCMGQWKTVLRYPGCRQIQGNDEPVWIKRGIFQGDSLSPLWFCLALNPLSTLLEDSGLGYRLRRGGQVISHLLYMDDLKLFAPNKLRLMELLKVTKTFSSAIKMEFGVDKCAVMRVKRGEIMESEGIQLSDSISLRSLSSSESYKYLGMSEALGINDADMKQSLKERFFCRLKKVLISLISGGNKVRAFNGWVIPVLMYSFGILKWTQTELDALDRRVRTLLTANRMHHPRSSVMRLYIPRKCGGRGFLNEKTLHNREVCSLREYFLKAEVGMHRDVVAVDKGLTPLSMAKENWRKPVVLSTDDRKRVWQSKELHGRFYRALHEPGVDFIASVSWLRFGDLFGETEGFVCAIMDEVILTNNYRRHIMKDGTVDVCRACHRPGESIRHIISGCSRLANGEYLHRHNQVARIIHQQLALKYKLVDSEVPYYKYVPDPVLENDHVTLYWDRSIISDRTIVANKPDIVVIDRLARRTMIVDVTIPHDGNLVKAEKEKQIKYLDLAHEVVDMWNVSSAIIVPIVVSANGLMAESLDQHLSRLSLGGWIKGLIQKAVLLDTARIVRRFLSLEP

SEQ ID NO: 29404 - protein, 1209 aa, Xestia c-nigrum
MLTRHRAKLLRDAHPPSPGSSLSSASQPPGRATPVSTVSPVAAVASSSSDEFFSPPSTPPPPPSRGRRRGRGRPPAGLGPRGQQASSRVPAAGGNVSRMRWTQSMNENVMRAYYGATEGGSNLIAYRGQMLSLFQVLEPAVNVDAQRLSDQVRVIQRNHMLDDTVLDRLRSESRSNLVTPASPMIAVQLQTIPCTPLRSDYDSEEDGDEVISVSTQCNAQLRSALEGAFREYRSTAPELRPRLPRLPMHKKNKALVCALDSQLSNCFDSSKDLADTHSILYCGAVAACRVAHVKFPNNDRTTRPKLAVPAWQCRIERRIGEARVLIGKLICFREGNTRPRVMRFVRRAFSGTDVSFRDYLARITERIDFLKQKICAWASRIRRYKRRVERYTQNRSFQSDERWVYRAWERPDQGVTDTRLPDDDAMRSFWRSIWSVPVSHTEGDWIRKVEQVCDQIQEMGAIIISPQDVACAVRPLPNWKSPGPDGLHNFWIKWFQSSHARLASQFQSALESGSLPQFMTTGITHLLHKSGSTAEPKNYRPITCLPTVYKVLTSILRAKINKHIESNSIMSTSQNGCRNGSRGTKELLLIDMAISQQVRRSRKNLSTCWIDYKKAYDSVPHTWLMRVLELYKINATLRAFLESCMGQWKTVLRYPGCGQIQGSDEPVWIKRGIFQGDSLSPLWFCLALNPLSTLLENSGLGYRLRKDGQVISHLLYMDDLKLFAPNKLQLLELLKVTETFSNAIRMEFGVDKCAVMYVKRGEIMESEGLQLSDSIHLRSLSSSESYKYLGMSEALGINVTDMKQSLRERFFGRLKKVLNSLLSGGNKVRAFNGWVMPVLMYSFGILKWTQTELDALDRRVRTLLTANRMHHPRSSMMRLYIPRKCGGRGFLNAKNLHNREVCSLREYFLEADVGMHRDVVSVDKGLTPLSLANGNWRKPKVLDTNDRREEWQGKELHGRFYRALHGPDVDFLASVSWLRFGDLFGETEGFVCAIMDEVMMTNNYRKYIVKDGTVDICRACHRPGESIRHIISGCSSLANGEYLHRHNLVARIIHQQLALKYNLVESEVPYYKYAPDPVLVNGNITLYWDRPITTDRTVVANRPDIVVIDRLERRTMIVDITVPHDENLVKAEQDKKNKYLDLAREVVDMWDVSTAIIVPIVVSANGLIAKSLDQHLRRLSLGSWIKGLIQKAVLLDTARIVRRFLSQEP

SEQ ID NO: 29405 - protein, 868 aa, Xestia c-nigrum
MRFVRRAFSGTEISPQEYMSRVTERIDFLKQKVYAWASRIRRYKRRVDRYSQNRMFQSDERWVYRAWERPQQNMTDVCRPDDAATSSFWRSIWSVPVCHSEADWMRDVERVCEPIPTMEPILITPLDIARAVRPLPNWKSPGPDGLHNFWLKWFSSSHTCLASQFQSSLESGSLPQFLTTGITHLLHKSGSPAEPKNYRPITCLSTVYKLLTSILRTKINTHVDSNSIMSASQNGCRNGSRGTKELLLIDMAISQQVRRARKDLSTCWIDYKKAYDSVPHSWLKRVLELYKIDATLRTFLESCMGQWRTVLRYPGCRQIQGNDEPVWITRGIFQGDSLSPLWFCLALNPVSTLLENSGLGYRLRKDGQVISHLLYMDDLKLFAPNKLQLMELLKVTETFSSAIGMEFGVDKCAVMYVKRGKIMGSEGLQLSDSIHLRSLSSSESYKYLGMSEALGINVTDMKQSLKERFFGRLKKVLNSLLSGGNKVRAFNGWVMPVLMYSFGILKWTQTELDALDRRVRTLLTENRMHHPRSSVMRLYIPRKCGGRGFLNAKTLHNCEVCSLREYFLKADVGMHRDVVAVDKGLTPLSMAKENWRKPVVLTTDDRKKEWQGKELHGRFYRALHGPDVDFLASVSWLRFGDLFGETEGFVCAIMDEVMLTNNYRKYIMKDGTVDVCRACHCPGESIRHIISGCSRLANGEYLHRHNQVARIIHQQLALKFKLVESEVPYYKYVPDPVLVKDHVTLYWDQSIITDRTIVANKPDIVVIDRSARRVMIIDVTIPHDENLVKAEKEKQMKYLDLAHEVRDMWNMNSVIIVPIVVTANGLIAKSLDEHLSKLSLGGWIKGLIQKAVLLDTARIVRRFLSLQP

SEQ ID NO: 29406 - protein, 1203 aa, Omphaloscelis lunosa
MLTRSAARLARPPPPDSSLSSASPPPVPSPTVSATTTPAAVVASSSSDEYFSPPTSPTPVRRQGRGRPPKSLGLRGQPAPSRVPAAGGCVQRMRWTQSMNENVMRAYYGSTEGGTNLTAYRVRMLSLFQELEPTVNVSAQRLSDQVRVIQRNHRLDDTALDRLRSEVLSNHIVSTRAQTAAQASNIDATPPRFNHGVEEEDDRVATVSSQCNNRLRSALEDAFREYRYTSTELRPRLPRLPMHSKNRALVCALDSQLTNFFESSEDLIDTHSILYCAAVAACRLANVKFPNCDGATRPKPVVPAWQCRIERRIDGARVLIGKLYCFREGNTRPRVMRFVRRAFSGTGISPQDYMSRVTERIDFLKQKVCAWASRIRRYKRRVDRYTQNRVFQSDERWVYRAWERPEQNVTDVCRPDDAATSAFWRSIWSVPVCHTEAGWMQDVERVCETIPVMDAVFITPLDVARAVRPLPNWKSPGPDGLHNFWLKWLSSSHTRLASQFQSSLESGSLPQFLTTGVTHLLHKSGNPAEPKNYRPITCLSTLYKLLTSILRTKINTHIDSNSIMSVSLNGCRNGSRGTKELLLIDMAISQQVRRSRKDLSTCWIDYKKAYDSVPHTWLMRVLELYKVDTTLRTFLMSCMGQWRTVLRYPGCRQTQGNDEPVWIKRGIFQGDSLSPLWFCLALNPLSTLLEDSGLSYRLRRGGQVISHLLYMDDLKLFAPNKLRLMELLKVTETFSGAIRMEFGVDKCAVMHVKRGEIMESEGIQLSDSIHLKSFSSAENYRYLGMSESLGINVADMKQSLKERFFGRLKKVLISFLSGGNKVRAFNGWVMPVLMYSFGILKWTQTELDALDRRVRTLLTANRMHHPHSSVMRLYIPRKCGGRGFLNAKTLHNREVCSLREYFFKADVGMHRDVVAVDNGLTPLSMAKENWRKPVVLTTDDRKEVWQSKALHGRYFRALHEPDVDFLASVSWLRFGDLFGETDGFICAIMDEVILTNNYRRHIMKDGTVDVCRACHRPGESIRHIISGCSRLANGEYLHRHNQVARIIHQQLALKYKLVDSEVPYYKYVPDPVLENDHVTLYWDRSIITDRTIVANKPDIVVIDRLARHAMIVDVTIPHDENLVKAEKEKQIKYLDLAHEVVDMWNLSSAIIVPIVVTANGLMAKSLDQHLSRLSLDGWIKRLIQKAVLLDTARIVRRFLSLQP

SEQ ID NO: 29407 - protein, 1203 aa, Omphaloscelis lunosa
MLTRSAARLARPPPPDSSLSSASPPPVPSPTVSATTTPAAVVASSSSDEYFSPPTSPTPVRRQGRGRPPKNLGLRGQPAPSRVPAAGGCVQRMRWTQSMNENVMRAYYGSTEGGTNLTAYRVRMLSLFQELEPTVNVSAQRLSDQVRVIQRNHRLDDTALDRLRSEVLSNHIVSTLAQTAAQASNIDATPPRFNHGVEEEDDRVATVSSQCNNRLRSALEDAFREYRYTPTELRPRLPRLPMHNKNRALVCALDSQLTNFFESSEDLIDTHSILYCVAVAACRLANVKFPNCDGATRPKPVVPAWQCRIERRIDGARVLIGKLYCFREGNTRPRVMRFVRRAFSGTGISPQDYMSRVTERIDFLKQKVCAWASRIRRYKRRVDRYTQNRVFQSDERWVYRAWERPEQNVTDVCRPDDAATSAFWRSIWSVPVCHTEAGWMQDVERVCETIPVMDAVFITPLDVATAVRPLPNWKSPGPDGLHNFWLKWLSSSHTRLASQFQSSLESGSLPQFLTTGVTHLLHKSGNPAEPKNYRPITCLSTVYKLLTSILRTKINTHIDNNSIMSVSQNGCRNGSRGTEELLLIDMAISQQVRRSRKDLSTCWIDYKKAYDSVPHTWLMRVLELYKVDTTLRTFLMSCMGQWRTVLRNPGCRQTQGNDEPVWIKRGIFQGDSLSPLWFCLALNPLSTLLEDSGLGYRLRRGGQVISHLLYMDDLKLFAPNRLRLMELLKVTETFSGAIRMEFGVDKCAVMHVKRGEIMESEGIQLSDSIHLRSLSSAKNYRYLGMSESLGINVADMKQSLKERFFGRLKKVLISFLSGGNKVRAFNGWVMPDLMYSFGILKWTQTELDALDRRVRTLLTANRMHHPHSSVMRLYIPRKCGGRGFLNAKTLHNREVCSLREYFFKADVGMHRDVVAVDNGLTPLSMAKENWRKPVVLTTDDRKEVWQSKALHGRYFRALHEPDVDFLASVSWLRFGDLFGETEGFICAIMDEVILTNNYRRHIMKDGTVDVCRACHRPGESIRHIISGCSRLANGEYLHRHNQVARIIHQQLALKYKLVDSEVPYYKYVPDPVLENDHVTLYWDRSIITDRTIVANKPDIVVIDRLARHAMIVDVTIPHDENLVKAEKEKQIKYLDLAHEVVVMWNVSSAIIVPIVVTANGLMAKSLDQHLSRLSLDGWIKRLIQKAVLLDTARIVRRFLSLQP

SEQ ID NO: 29408 - protein, 868 aa, Sesamia nonagrioides
MRFVRQAFSGTGISPREYINNVTERIDFLKQKVCAWASRIRRYKKRVDRYTQNRMFQSDERWVYRAWEQPEQNEADECRPDDATTSAFWRGIWSVSVCHTEGDWTQDVEQVCEAIPEMDNILITPLDVATAVRSLPNWKSPGPDGLHNFWLKWLSSSHTCLASQFQSSLESGSLPQFLTTGITHLLHKSGSTAEPKNYRPITCLPTVYKVLTSILKAKINNHLDSNSIMSVSQNGCRSGSRGTKELLLIDMAISQQVRRSRKDLSTCWIDYKKAYDSVPHTWLMRVLELYKINATLRTFLRSCMGQWKTVLRYPGSRQIQGNDEPVWIKRGIFQGDSLSPLWFCLALNPLSTLLEDSGLGYRLKRGGQVISHLLYMDDLKLFAPNKLHLMKLLNVTETFSSGIKMEFGVDKCAVMHVKRGQIMESEGITLPDSIHLRSLSSIESYKYLGMSEALGINDADMKQSLKERFFGRLKKVLNSLLSGGNKVRAFNGWVMPVLMYSFGILKWTQTELDALDRRVRTLLTANRMHHPRSSVMRLYIPRKCGGRGFLNAKTLHNREVFSLREYFLKTVVGMHHDVVTVDKGLTPLSMAKENWHKPIILTTDDRKMVWQSKELHGRFYRALHGPDVDFLASVSWLRFGDLFGETEGFVCAIMDEVILTNNYRRYIMKDGTIDVCRACHHPGESIRHIISGCSRLANSEYLHRHNQVARIIHQQLALKYKLVDSEVPYYKYVPDPVLENDHVTLYWDRSIITDRTIVANKPDIVVIDRLARLAMIVDVTIPHDGNLVKAEKEKQMKYLDLAHEVVDMWNVNSAVIVPIVVSANGLIAKSLDQHLLRLSLGSWIKGLIQKAVLLDTARIVRRFLSLEP

SEQ ID NO: 29409 - protein, 1203 aa, Sesamia nonagrioides
MLTRSAARERARPPSPDSLLSSASPPPVSSATVNAVTTPAAAVALSSSDEYFSPPTSPTPVRRQGRGRPPKSLGLRGHPAPSRVPAAGGCVQRMRWSQTMNENVMRAYYGATEGGTNLTAYRERMLSLFQALEPTVNVSAQRLSDQVRVIQRNHRLDDTALDRLRSEVLSNQIAPTLTQTAALASIIDAVPPRSNRVEEEDDRVETVSSQYNDRLRSTLEDAFREYRSTPTDLRPRLPRLPMHKKNRALMSALDSQLKNVFESSEDLIDTHSILFCAAVVVCRLANIKFPNCDEANRPKPAVPAWQHRIERRIDGARVLIGKLYCFREGNTRPRVMRFVRQAFSGTGISPREYLTHVTERIGFLKQKVCAWANRIRRYKRRVDRYTQNRMFQSDERWVYRAWERSELNEADVCRPDVAATSAFWRSIWSVPVCHAEGDWIQNVEQVCEIIPEMDTILITPIDVATAVRSLPNWKSPGPDGLHNFWLKWLSSSHTCLASQFQSSLECGSLPQFLTTGITHLLHKSGSTAEPNNYRPITCLPTVYKVLTSILKAKINKHLDSNSIMSVSQNGCKSGTRGTKELLLIDMAISQQVRRSRKDLSTCWIDYKKAYDSVPHTWLMRVLELYKINATLRTFLRSCMRQWKTVLRYPGSRRIQGNDEPVWIKRGIFQGDSLSPLWFCLALNPLSTLLEDSGLGYRLKRGGQVISHLLYMDDLKLFAPNKLHLMKLLNVTETFSSVIKMEFGVDKCAVMHVERGQIMESEGITLPDSIHLRSLSSFESYKYLGMSEALGINDADMKQSLKERFYGRLKKVLKSLLSGGNKVRAFNGWVMPVLMYSFGILKWTQTELDALDRRVRTLLTANRMHHPRSSVMRLYIPRKCGGRGFLNAKTLHNREVCSLREHFLKTVVGMHHDVVTVDKGLTPLSMAKENWHKPIILTTDDRKMIWQSKELHGRFYRALHEPDVDFLASVSWLRFSDLFGETEGFVCAIMDEVILTNNYRRFIMKDGTIDVCRACHHPGESIRHIISGCSRLANGEYLHRHNQVARIIHQQLALKYKLVDSEVPYYKYVPDPVLENDHATLYWDRSIITDRTIVSNKPDIVVIDRLARLAMIVDVTIPHDGNLVKAEKEKQIKYLDLAHEVVDMWNVNSAVIVPIVVSANGLIAKSLDQHLLRLSLGSWIKGLIQKAVLLDTARIVRRFLSLEP

SEQ ID NO: 29410 - protein, 868 aa, Sesamia nonagrioides
MRFVRQAFSGTGISPREYINHLTERIDFLKQKVCAWASRIRRYKRRVDRYTQNRMFQSDERWVYRAWERPEQNEADVCRPDNATTSAFWRGIWSVSVCHTEGNWIQNVERVCETIPEMDTILITPSDVAAAVRSLPNWKSPGPDGLHNFWLKWLSSSHTCLASQFQSSLESGSLPQFLTTGITHLLHKSGSTAEPKNYRPVTCLPTVYKVLTSILKAKINKHLNSNSIMSVSQNGCKSGSRGTKELLLIDMAISQQVRRSRKDLSTCWIDYKKAYDSVPHTWLMRVLELYKVNATLRTFLRSCMGQWKTVLRYPGSRRIQGNDEPVWIKRGIFQGDSLSPLWFCLALNPLSTLLEDSGLGYRLKRGGQVISHLLYMDDLKLFAPNKLHLMKLLNVTETFSSGIKMEFGVDKCAVMHVKRGQIMESEGITLPDSIHLRSLSSFESYKYLGMSEALGINDADMKQSLKERFFGRLKKVLKSLLSGGNKVRAFNGWVMPVLMYSFGILKWTQTELDALDRRVRTLLTANRMHHPRSSVMRLYIPRKCGGRGFLNAKTLHNREVCSLREHFFKTVVGMHHDVVTVDKGLTPLSMAKENWHKPIILTTDERKMIWQSKELHGRFYRALHEPDVDFLASVSWLRFSDLFGETEGFVCAIMDEVILTNNYRRYIMKDGTIDVCRACHHPGESIRHIISGCSRLANSEYLHRHNQVARIIHQQLALKYKLVDSEVPYYKYVPDPVLENDHVTLYWDRSIITDRTIVANKPDIVVIDRLARLAMIVDVTIPHDGNLVKAEKEKQIKYLDLAHEIVDMWNVNSAVIVPIVVSANGLIAKSLDQHLLRLSLGSWIKGLIQKAVLLDTARIVRRFLSLEP

SEQ ID NO: 29411 - protein, 1199 aa, Mamestra configurata
MLTRAASRRARPPSPDPSLSSASPPPDSGSPMSPAVAVASSSSDEYFSPPTSPTPVRWQGRGRPPRGLGPRGQPAPSRVPATGGCVQRMRWTQSMNENVMRAYYGSTEGGTNLTAYRVRMLSLFQDLEPTVNVSAQRLSDQVRVIQRNHRLDDAALDRLRSEVLNNLIISTPTQTAVQAPVNGRITPRPNNVSDEVDDRVVTVSSQCNDRLRSALEDALREYRSTPTELRPRLPRLPMHKKNRALVCALDSLLQNIFESSESLVDTHSILYCGAVAACRIANVKFPGCDEAIRPKPAAPAWQRRIERRIDETRALIGKLYCFREGNTRPRVMRFVRRAFSGTEISPRDFTSRVTERIDFLKQKVCAWASRIRRYKRRVDRYSQNRMFQSDERWVYRAWERPEQSVTDVCRPDDVATSIFWRSIWSVPICHAEGGWMRDVERVCEAIPQMEKITITTLDVAKAVRPLPNWKSPGPDGLHNFWLKWYSSSHALLASQFQSSLDSGSLPQFLTTGVTHLLHKTGSPTEPKNYRPITCLSTVYKLLTSILRAKINEHIESNSIMSASQNGCRKGSRGTKELLLIDMAISQQVRRSRKDLSTCWIDYKKAYDSVPHTWLMKVLELYKIDATLRTFLESCMRQWKTVLRYPGCRPIQGSDEPVWIKRGIFQGDSLSPLWFCLALNPLSTLLEDSGLGYRLRRGGQAISHLLYMDDLKLFAPNNLRLMELLKVTETFSSAIRMEFGVDKCAVMHVKKGEIMESEGIHLSDSIQVRSLSSTETYKYLGMLEALGINGTDMKQSLRERFFGRLKKVLNSLLSGGNKVRAFNGWVMPVLMYTFGILKWTQTELDALDRRVRTLLTANRMHHPRSSVMRLYIPRKCGGRGFLNAKTLHNREMCSLREYFLKADVGMHRDVVAVDKGLTPLSMAKENWRTPVILTTDDRKEVWKGKELHGRFYRALHGSDVDFSASVAWLRFGDLFGETEGFVCAIMDEVILTNNYRRHIMKDGTVDMCRACHRPGESIRHIISGCSRLANGEYLHRHNQVARIIHQQLALKYKLVDSEVPYYKYVPDPVLENDHVTLYWDRSIITDRTIVANKPDIVVIDRLARRTMIIDVTIPHDENLVKAEKEKQIKYLDLAHEVVDMWNVDSAVIVPIVVTANGLMAKSFDDHLSKLALRSWVKGLIQKAVLLDTARIVRRFLSLEP

SEQ ID NO: 29412 - protein, 1200 aa, Mythimna ferrago
MLTRAAAQRARIPPPDSLLSSASPPPDPGSSVSPAAAVASSSSDEYFSPPTSPTPVRRPGRGRPPNGLGFRGQPAPSRVPAAGGCVQRMKWTQSMNENVMRAYYGATEGGTNLTAYRVRMLSLFQDLEPTVNVSAQRLSDQVRVIQRNHRLDDAALDRLRSQVLSNPIVSTPQQIQTVGPSTSVTTTSRYDHVEDEADDRVDRVSSQCNDRLRSALEDALREYRSTPTELRPRLPRLPMHKKNRALVCALDSLLKNVFESSDSLLDTHSILYCGAVAACRLANVKFPCYGVATRPTPAAPAWQCGIERRIDEARALIGKLYCFREGNTRPRVMRFVRRAFSGTEISPREYMSRVTERIDFLKQKVCAWANRIRRYKRRVDRYSQNRMFQSDERWVYRAWERPGQNVTDGFRPDRVATNTFWRSIWSEPVCHNEGGWMRDVERVCEAIPEMDKVFITPLDVARAVRPLPNWKSPGPDGLQNFWLKWYSSSHAILASQFQSSLESGSLPQILTTGTTHLLHKTGSTADPKNYRPITCLSTVYKLLTSILRVKITLHIEKNSIMFASQNGCRNGSRGTKELLLIDMAISQQVRRSRKDLSTCWIDYKKAYDSVPHTWLMKVLELYKIDATLRTFLESCMRQWKTVLRYPGCRPIQGNDEPIWIRRGIFQGDSLSPLWFCLALNPLSTLLEDSGLGYRLRRGDQVLSHLLYMDDLKLFAHNNSQLMELLKVTETFSSAIRMEFGVDKCAVMHVRRGEIVESEGIQLSDSIHLRSLSSTETYKYLGMSEALGINVADMKQTLKERFFGRLKKVLNSLLSGGNKVRAFNGWVMPVLMYSFGILKWTQTELDALDRRVRTLLTANRMHHPRSSVMRLYIPRKCGGRGFLNAKTLHNREVCSLREYFLKTDVGMHRDVIAVDKGLTPLSMAKENWRKPVVLTTDDRKEVWKGKELHGRFFRALHEPDVDFSASVAWLRFSNLFGETEGFVCAIMDEVILTNNYRRHIMKDGTVDVCRACHRPGESIRHIISGCSRLANGEYLHRHNQVARILHQQLALKYNLVDSEVPYYRYVPDPVLENDHVTLYWDRSIITDRTIVANKPDIVVIDRLARRAMIVDVTIPHDENLVKAEKEKQIKYLDLAHEVVDMWNVDSAIIVPIVVTANGLIAKSFDDHLSKLSLHGWIKGLIQKAVLLDTARIVRRFLSLEP

SEQ ID NO: 29413 - protein, 868 aa, Mythimna ferrago
MRFVRRAFLGTGISPQGYMSRVTERIDFLKQKVCAWASRIRRYKRRVDRYSQNRMFQSDERWVYRAWERPEHSVIGECRPDDFATITFWRNIWSVPVSHAEGGWMRDVERVCEAIPEMEKVTITPEDVTKAVRPLPNWKSPGPDGLQNFWLKWYSSSHAPLASQFQSILESGPLPEYLTTGVTHLLHKTGNPVDPKNYRPITCLSTVYKLLTSILRAKINIHIENNQIISPSQNGCRNGSRGTKELLLIDMAISQQTRRSRKDLSTCWIDYKKAYDSVPHTWLMRVLELYKIDTTLRTFLESCMRQWKTVLRYPGCRPIQGNDEPIWIKRGIFQGDSLSPLWFCLALNPLSTLLEDSGLGYRLRRGGQVISHLLYMDDLKLFAPSNLQLMELLKVTETFSSAIRMEFGVDKCAGMHVKRGEIMESEGIQLPDSIHLRSLSSTETYKYLGMSEALGIDNADMKQSLKERFFGRLKKVLNSLLSGGNKVRAFNGWVMPVLMYSFGILKWTQTELDALDRRVRTLLTANRMHHPRSSVMRLYIPRKCGGRGFLNAKTLHNREVCSLREYFLKTDVGMHRDVVAVDKGLTPLSMAKEDWHKPVIMTTDNRKEIWKGKELHGRFFRALHEPDVDFLASVAWLRFSDLFGETEGFVCAIMDEVILTNNYRRYIMKDGTVDVCRACHRPGESIRHIISGCSRLANGEYLHRHNQVARIIHQQLALKYNLVDLEVPYYKYVPDPVLENDHVTLYWDRSIITDRTIVANKPDIVVIDRLARRAMIVDITIPHDENLVKAEKEKQMKYLDLAHEVVDMWNVDSAVIVPIVVTANGLIAKSFDDHLSKLSLRGWIKGQIQKAVLLDTARIVRKFLSLEP

SEQ ID NO: 29414 - protein, 1155 aa, Noctua pronuba
MLIKPPTSPTPVRRQGRGRPPRSLGLRGHPAPSRVPATGGCVQRMRWTHPINENVMRAYYGSTEGGTNLTAYRVRMLSLFQVLEPTVNVSAQRLSDQVRVIQRNHMLDDAALDRLRSEVLSNPIVLTPSQTVVQASTIDITPPRSNPAVAEEDDRVATVSSQCNDRLRSALEDALREYRYTRTEFRPRLPRLPMHKKNRALVCALDSQLKNLFESSENLVDAHSILYCGAVAACRLANVKFTNSDTATRPKPAVPAWQCRIERRIDGARVLIGKLQCFREGNTRPRVMRFVRRAFSGTGISPQEYMSRVTDRIDFLKQKVYAWANRIRRYKRRVDRYSQNRMFQSDERWVYRAWERPEQNMTDVCRPDDATTSSFWSSIWSVPVCYTEADWMRDVERMCEPIPEMEPILITPQDIARAVRPLPNWKSPGPDGLHNFWLKWLSSSHTCLASQFQSSLESGSLPQFLTTGVTHLLHKSGSPAEPKNYRPITCLSTVYKLLTSILRAKINTHIDKNSIMSASQNGCRNGSRGTKELLLIDMAISQQVRRSRKDLSTCWIDYKKAYDSVPHTWLMRVLELYKVDATLRAFLESCMGQWRTVLRYPGCRQIQGNNEPVWIKRGIFQGDSLSPLWFCLALNPLSTLLEDSGLGYRLRRGGQVISHLLYMDDLKLFAPNKLRLMELLKVTETFSSAIRMEFGVDKCAVMYVKRGEIMESEGIQLSDSIHLRSLSSSESYKYLGMSEALGINVTDMKQSLRERFFGRLKKVLNSLLSGGNKVRAFNGWVMPVLMYSFGILKWTQTELDALDRRVRTLLTANRMHHPRSSVMRLYIPRKCGGRGFLNAKTLHNREVCSLREYFLKAEVGMHRDVVAVDKGFTPLSMAKENWRKPVVLTTDDRKEVWQGKELHGRFYRALHGPDVDFLASVSWLRFGDLFGETEGFVCAIMDEVMLTNNYRKYIMKDGTVDVCRACHRPGESIRHIISGCSRLANGEYLHRHNQVARIIHQQLALKYKLVESEVPYYKYVPDPVLEKDHVTLYWDRSIITDRTIVANKPDIVVIDRSARRVMIVDVTIPHDENLVKAEKEKQIKYLDLAHEVVDMWNVNSAVIVPIVVTANGLMAKSFDDHLSKLSLGGWIKGLIQKAVLLDTARIVRRFLSLEP

SEQ ID NO: 29415 - protein, 1205 aa, Ochropleura plecta
MLTRRRAQEQQALPPSPGSSLSSASQSPGRATHVSAVSPVAAVASSSSDEFFSPPSSPPPTRQRRGRGRPPAGLGSRGQQAPIRIPAAGGNVSRMRWTSSINANVMRAYYGSTEGGTNLTAYRVRMLSLFQDLEPTINVSAQRLSDQVRVIQRNHMLDDAALDRLRSEVLSNRIILTTPQTAVQASVIDGMQPRSDPAVVEEDDRVATVSSQCNERLRSALEDALRDYRSTPAELRPRLPRLPMHKKNRALVCALDSQLKNLFESNEDLVDTHSILYCGAVAVCRLANVKFPSCDVATRPKPSVPTWQCRIERRIDEARVLIGKLYCFREGNTRPRVMRFVRRAFSGTGISPQEYMSRTTERIDFLKQKVYAWANRIRRYKRRVDRYLQNRIFRSDERWVYRAWERPEQSVTDVCRPDDVATSSFWHSIWSVPVCHTEADWMRDVERVCETIPDMEPILITSLDIASAVRPLPNWKSPGPDGLHNFWLKWLTSSHTRLASQFQSCLESGSLPQFLTTGVTHLLYKSGSPAEPKNYRPITCLSTVYKLLTSILRAKINSHIDKNSIMSASQNGCRNGSRGTKELLLIDMAISQQVRRSRKDLSTCWIDYKKAYDSVPHTWLKRVLELYKIDATLRAFLESCMGQWRTVLRYPGCRQIQGNDEPVWIKRGIFQGDSLSPLWFCLALNPLSTLLEDSGLGYRLRRGGQVISHLLYMDDLKLFASNKLRLMELLKVTETFSNAIRMEFGVDKCAVMYVKRGEIMESEGIQLSDSIHLRSLSSSESYKYLGMSEALGINVADMKQLLRERFFGRLKKVLKSLLSGGNKVRAFNSWVMPVIMYSFGILKWTQTELDALDRRVRTLLTGNRMHHPRSSAMRLYIPRKCGGRGFLNAKTLHNREVCSLREYFLKTDVGMHRDVVAVDKGLTPLSMAKENWRKPVVLTTDDRKVVWQGKELHGRFYKALHGPDVDFLASVSWLRFGDLFGETEGFVCAIMDEVMLTNNYRKYIMKDGTVDVCRACHRPGESIRHIISGCSRLANSEYLHRHNQVARIIHQQLALKYNLVESEVPYYKYVPDPVLEKDHVTLYWDRSIITDRTIVANKPDIVVIDRSARRVMIIDVTIPHDENLVKAEKEKQLKYLDLAHEVVDMWNVNSAIIVPIVVTANGLIAKSLDEHLSKLSLGGWIKGLIQKAVLLDTARIVRRFLSLEP

SEQ ID NO: 29416 - protein, 983 aa, Ochropleura plecta
MRFATIDPLPPNLDPDYHGYPCIKKNRALVCALDSQLKNLFESSEDLVDTHSILYCGAVAVCRLANVKFPSCDVATRPKPSVPAWQCRIERRIDEARVLIGKLYCFREGNTRPRVMRFVRRAFSGTGISPQEYMSRTTERIDFLKQKVYAWANRIRRYKRRVDRYSQNRMFRSDERWVYRAWERPEQSVTDVCRPDDVATSSFWHNIWSVPVCHTEADWMRDVECVCETIPEMEPILITSLDIASAVRPLPNWKSPGPDGLHNFWLKWLSSSHTRLASQFQSCLESGSLPQFLTTGVTHLLYKSGSPAEPKNYRPITCLSTVYKLLTSILRAKINSHIDNNSIMSASQNGCRNGSRGTKELLLIDMAISQQVRRSRKDLSTCWIDYKKAYDSVPHTWLKRVLELYKIDATLRAFLESCMGQWRTVLRYPGCRQIQGNDEPVWIKRGIFQGDSLSPLWFCLALNPLSTLLEDSGLGYRLRRGGQVISHLLYMDDLKLFAPNKLRLMELLKVTETFSNAIRMEFGVDKCAVMYVKRGEIMESEGIQLSDSIHLRSLSSSESYKYLGMSEALGINVADMKQLLRERFFGRLKKVLKSLLSGGNKVRAFNSWVMPVIMYSFGILKWTQTELDALDRRVRTLLTGNRMHHPRSSVMRLYIPRKCGGRGFLNAKTLHNREVCSLREYFLKTDVGMHRDVVAVDKGLTPLSMAKENWRKPVVLTTDDRKVVWQGKELHGRFYKALHGPDVDFLASVSWLRFGDLFGETEGFVCAIMDEVMLTNNYRKYIMKDGTVDVCRACHRPGESIRHIISGCSRLANSEYLHRHNQVARIIHQQLALKYNLVESEVPYYKYVPDLVLEKDHVTLYWDRSIITDRTIVANKPDIVVIDRSARRVMIIDVTIPHDENLVKAEKEKQLKYLDLAHEVVDMWNVNSAIIVPIVVTANGLIAKSLDEHLSKLSLGGWIKGLIQKAVLLDTARIVRRFLSLEP

SEQ ID NO: 29417 - protein, 1199 aa, Hecatera dysodea
MLTRAATLRARHPPPGSPLSSASPPPDIESQVSPAAAVASSSSDEYFSPPTSPPPVRRQGRGRPPRGLGPRGQPAPSRVPATGGCVQRMRWTQSMNENVMRAYYGSTEGGINLTAYRVRMLSLFQDLEPTVNVSAQRLSDQVRVIQRSHRLDEAALDRLRSEVLNNLIISTPTQTAVQAPGNGAIIPRPIHVCDEVVDRVVTVSSQCNDRLRSALEDALREYRSTPTELRPRLPRLPMHKKNRALVCALDSLLKNIFESSENLVDTHSILYCGAVAACRVANVKFTNSDGATRPKKSAPAWQCRIERRIDEARVLIGKLYCFREGNTRPRVMRFVRRAFVGTEISPQEYMSRVTERIDFLKQKVCAWANRIRRYKRRVDRYSQNRMFQSDERWVYRAWERPEQSVTDVCRPDDVTTNTFWRSIWSVPVCHAEAGWMRDVERVCEAIPQMEKITITTVDIATAVRPLPNWKSPGPDGLHNFWLKWYSSSHALLASQFQSSLDSGSLPQFLTTGVTHLLHKTGSPAEPKNYRPITCLSTVYKLLTSILRVKMNEHIESNSIMSYSQNGCRKGSRGTKELLLIDMAISQQVRRSRKDLSTCWIDYKKAYDSVPHTWLLKVLELYKVDATLRTFLESCMRQWKTVLRYPGCRPIQGSEEPVWIKRGIFQGDSLSPLWFCLALNPLSTLLEDSGLGYRLRRGGQTISHLLYMDDLKLFAPNNLRLMELLKVTETFSSAIRMEFGVDKCAVMHVKKGEIMESEGIQLSDSIQVRSLSSTETYKYLGMSEALGINGADMKQSLKERFFGRLKKVLNSLLSGGNKVRAFNGWVMPVLMYSFGILKWTQTELDALDRRVRTLLTANRMHHPRSSVMRLYIPRKCGGRGFLNAKTLHNREMRSLREYFLKADVGMHRDVVAVDKGLTPLSMAKENWRKPVIPTTDDRREVWRGKELHGRFYRALYGSDVDFSASVAWLRFGDLFGETEGFVCAIMDEVILTNNYRRHIMKDGTVDVCRACHRPGESIRHIISGCSRLANGEYLHRHNQVARIIHQQLALKYKLVDSEVPYYKYVPDPVLENDHVTLYWDRSIITDRTIIANKPDIVVIDRLARRTMIIDVTIPHDENLVKAEKEKQIKYLDLAHEVVDMWNVDSAVIVPIVVTANGLMAKSFDEHLSKLALHGWLKGLIQKAVLLDTARIVRRFLSLEP

SEQ ID NO: 29418 - protein, 1199 aa, Hecatera dysodea
MLTRAATLRARHPPPGSPLSSASPPPDIESQVSPAVAVASSSSDEYFSPPTSPPPVRRQGRGRPPRGLGPRGQPAPSRVPATGGCVQRMRWTQSMNENVMRAYYGSTEGGINLTAYRVRMLSLFQDLEPTVNVSAQRLSDQVRVIQRSHRLDEAALDRLRSEVLNNLIISTPTQTAVQAPGSGAIIPRPIHVCDEVVDRVVTVSSQCNDRLRSALEDALREYRSTPTELRPRLPRLPMHKKNRALVCALDSLLKNIFESSENLVDTHSILYCGAVAACRVANVKFSNSDGATRPKNAAPAWQCRIERRIDEARVLIGKLYCFREGNTRPRVMRFVRRAFLGTEISPQEYMSRVTERIDFLKQKVCAWANRIRRYKRRVDRYSQNRMFQSDERWVYRAWERPEQSVTDVCRPDDVTTNTFWRSIWSVPVCHAEGGWMRDVERVCEAIPQMEKITITTVDIATAVRPLPNWKSPGPDGLHNFWLKWYSSSHALLASQFQSSLDSGSLPQFLTTGITHLLHKTGSPAEPKNYRPITCLSTVYKLLTSILRVKINEHIERNSIMSYSQNGCRKGSRGTKELLLIDMAISQQVRRSRKDLSTCWIDYKKAYDSVPHTWLLKVLELYKVDATLRTFLESCMRQWKTVLRYPGCRPIQGNEEPVWIKRGIFQGDSLSPLWFCLALNPLSTLLEDSGLGYRLRRGGQTISHLLYMDDLKLFAPNNLRLMELLKVTETFSSAIRMEFGVDKCAVMHVKKGEIMESEGIQLSDSIQVRSLSSTETYKYLGMSEALGINGADMKQSLKERFFGRLKKVLNSLLSGGNKVRAFNGWVMPVLMYSFGILKWTQTELDALDRRVRTLLTANRMHHPRSSVMRLYIPRKCGGRGFLNAKTLHNREMCSLREYFLKADVGMHRDVVAVDKGFTPLSMAKENWRKPVIPTTDDRREVWRGKELHGRFYRALYGSDVDFSASVAWLRFGDLFGETEGFVCAIMDEVILTNNYRRHIMKDGTVDVCRACHRPGESIRHIISGCSRLANGEYLHRHNQVARIIHQQLALKYKLVDSEVPYYKYVPDPVLENDHATLYWDRSIITDRTIIANKPDIVVIDRLARRTMIIDVTIPHDENLVKAEKEKQIKYLDLAHEVVDMWNVDSAVIVPIVVTANGLMAKSFDEHLSKLALHGWLKGLIQKAVLLDTARIVRRFLSLEP

SEQ ID NO: 29419 - protein, 1200 aa, Mythimna impura
MLTRAAARRARHPPPGSPLSSASPPPDLESAVSPVAAVASSSSDEYFSPPTSPTPVRRPGRGRPPRSLGSRGQPAPSRVPAAGGCVQRMRWTQSMNENVMRAYYGSTEGGTNLTAYRVRMLSLFQELEPTVNVTTQRLSDQVRVIQRNHRLDDAALDRLRSEVLSNRIISTPIQTQTAAPRATDAILPQSNHVDDEADDRVVTVSSQCNDRLRSALEDALREYRSTPIDLRPRLPRLPMHKKNRALVCALDSLLENVFESSVNLADTHSILYCGAIAACRLANVKLPSCDGATRPKSVAPAWQCRIEKRIDGARALIGKLYCFREGNTRPRVMRYVRRAFSGTGISPPEYLSHVTERIDFLKQKVCAWANRIRRYKRRVDRYSQNRMFQSDERWVYRAWERPEQNVTDVTRPDAVATNAFWRNIWSVPVCHTEDGWMREVERVCEAIPEMEKVIISPTDVARAVRPLPNWKSPGPDGLQNFWLKWYSSSHALLASQFQSSLESGSLPQFLTTGVTHLLHKTGSTAEPKNYRPITCLSTVYKLLTSILRTKINQHIDNNSIMSASQNGCRNGSRGTKELLLIDMTISQQVRRSRKDLSTCWIDYKKAYDSVPHTWLMRVLELYKIDATLRTFLESCMGQWNTVLRYPGCRSIRRDDEPIWIKRGIFQGDSLSPLWFCLALNPLCTLLEESGLGYRLRRDGQVLSHLLYMDDLKLIAPNKLRLMELLKVTETFSNAIRMEFGVDKCAVMHVKRGEIMESEGIQLSDSIHLRSLSSTETYKYLGMSEALGINVADMKQSLKERFFGRLKKVLNSLLSGGNKVRAFNGWVMPVLMYSFGILKWTQTELDALDRRVRTLLTANRMHHPRSSVMRLYIPRKCGGRGFLNTKTLHNREVCSLREYFHKTDVGMHRDVVAVDKGLTPLSMAKENWRKPVVLTTDDRKEVWKSKELHGRFYRALHESDVDFAASVAWLRFSNLFGETEGFICAIMDEVILTNNYRRYIMKDGTIDVCRACHRPGESIRHIISGCSRLANGEYLHRHNQVARIIHQQLALKYNLVYSEVPYYRYVPDPVLENDHVTLYWDRSIITDRTIVANKPDIVVIDRLARRVMIVDVTIPHDENLVKAEKEKQIKYLDLAHEVVDMWNVDSAVIVPIVVTANGLIAKSFDDHLSKLSLRGWIKGLIQKAVLLDTARIVRRFLSLEP

SEQ ID NO: 29420 - protein, 1199 aa, Phlogophora meticulosa
MLTRAAKRRARPPSPDSPLSSASPPPDLGSPVTPTVAAASSSSDEYFSPPTSPTPVRRQGRGRPPKSLGSRGQPAPSQVPATGGCVQRMRWTQSMNENVMRAYYGSTEGGTNLTAYRARMLSVFQVLEPTVNVSAQRLSDQVRVIQRNHRLDDTALDRLRSEVLNNHIVLTSTQTAVQAPIINATPSPSNHVSEEADDRVVTVSSQCNEKLRSALEDALREYRSTPTELRPRLPRLPMHKKNRALVCALDSLLKDLFESSGDLVDTHSILYCAAVAACRLANVKFPNNDVAIRPKPAVPAWQSRIERRIDGARVLIGKLYCFREGNTRPRVMRFVRRAFAGTGISPREYMSRIVERIDFLKQKVCAWANRIRRYKRRVDRYSQNRMFQSDERWVYRAWERPEQDVADVHRPDDTTTNAFWRNIWSVPVGHTEAHWMRDVERVCETITEMEKIIITPLDVATAVRPLPNWKAPGPDGLHNFWLKWLGSSHTRLASQFQSCLESGSLPQFLTTGITHLLYKSGSTTEPKNYRPITCLSTVYKLLTSILRAKIAEHIVGNSIMSASQNGCRNGSRGTKELLLIDMAISQQVRRSHKDLTTCWIDYKKAYDSVPHAWLMRVLELYKIDATLRTFLESCMGQWRTVLRYPGCRQIQGNDEPIWIKRGIFQGDSLSPLWFCLALNPLSTLLEDSGLGYRLRRGGQVISHLLYMDDLKLFAPNNLQLMELLKITESFSSTIRMEFGVDKCAVMHVKRGEIVESEGIQLSDSIQLRSLSSSDNYKYLGMSEALGINVTDMKQSLKERFFGRLKKVLNSLLSGGNKVRAFNGWVMPVLMYSFGILKWTQTELDALDRRVRTLLTANRMHHPRSSVMRLYIPRKCGGRGFLNAKTLYNREVCNLRDYFLKTEVGMHRDVVAVDKGLTPLSMAKENWRKPVVLTTDDRKQVWQSKELHGRFYRALHGPDVDFIAPVSWLRFGDLFGETEGFVCAIMDEVILTNNYRKHIMKDGTVDMCRACHRPGESIRHIISGCSRLANGEYLHRHNQLARIIHQQLALRYKLVESEVPYYKYVPDPVLEDDHVTLYWDRSIITDRTIVANKPDIVVIDRLARRAMIVDVTIPHDENLVKAEKEKQIKYLDLAHEVVDMWNVDSAVIVPIVVTANGLLAKSLDDHLSRLSLHGWIKGLIQKAVLLDTARIVRRFLSLQP

SEQ ID NO: 29421 - protein, 1080 aa, Phlogophora meticulosa
MLSLFQVLEPTVNVSAQRLSDQVRVIQRNHRLDDTALDRLRSEMLNNHIVLTSTQTAVQAPIINATPSPSNHVSEEADDRVVTVSSQCNEKLRSALEDALREYRSTPTELRPRLPRLPMHKKNRALVCNLDSLLKDLFESSGDLVDTHSILYCAAVAACRLANVKFPNNDVAIRPKPAVPAWQSRIERRIDGARVLIGKLYCFREGNTRPRVMRFVRRAFAGTGISPREYMSRIVERIDFLKQKVCAWANRIRRYKRRVDRYSQNRMFQSDERWVYRAWERPEQDVADVHRPDDTTTNTFWRNIWSVPVCHTEAHWIRDVERVCETITEMEKIIITPLDVATAVRPLPNWKAPGPDGLHNFWLKWLGSSHTRLASQFQSCLESGSLPQFLTTGITHLLYKSGSTTEPKNYRPITCLSTVYKLLTSILRAKIAEHIVGNSIMSASQNGCRNGSRGTKELLLIDMAISQQVRRSHKDLSTCWIDYKKAYDSVPHAWLMRVLELYKINATLRTFLESCMGQWRTVLRYPGCRQIQGNDEPIWIKRGIFQGDSLSPLWFCLALNPLSTLLEDSGLGYRLRRGGQVISHLLYMDDLKLFAPNNLQLMELLKITESFSSTIRMEFGVDKCAVMHVKRGEIVESEGIQLSDSIQLRSLSSSENYKYLGMSEALGINVTDMKQSLKERFFGRLKKVLNSLLSGGNKVRAFNGWVMPVLMYSFGILKWTQTELDALDRRVRTLLTANRMHHPRSSVMRLYIPRKCGGRGFLNAKTLCNREVCNLRDYFFKTEVGMHRDVVAVDKGLTPLSMAKENWRKPVVLTTDDRKQVWQSKELHGRFYRALHGPDVDFIASVSWLRFGDLFGETEGFVCAIMDEVILTNNYRKHIMKDGTVDMCRACHRPGESIRHIISGCSRLANGEYLHRHNQVARIIHQQLALRYKLVESEVPYYKYVPDPVLEDDHVTLYWDRSIITDRTIVANKPDIVVIDRLARRAMIVDVTIPHDENLVKAEKEKQIKYLDLAHEVVDMWNVNSAVIVPIVVTANGLLAKSLDDHLSRLSLHGWIKGLIQKAVLLDTARIVRRFLSLQP

SEQ ID NO: 29422 - protein, 902 aa, Phlogophora meticulosa
MRFVRRAFAGTGISPREYMSRIVERIDFLKQKVCAWANRIRRYKRRVDRYSQNRMFQSDERWVYRAWERPEQDVADVHRPDDTTTNTFWRNIWSVPVCHTEAHWIRDVERVCETITEMEKIIITPLDVATAVRPLPNWKAPGPDGLHNFWLKWLGSSHTRLASQFQSCLESGSLPQFLTTGITHLLYKSGSTTEPKNHRPITCLSTVYKLLTSILRAKIAEHIVGNSIMSASQNGCRNGSRGTKELLLIDMAISQQVRRSHKDLSTCWIDYKKAYDSVPHAWLMRVLELYKIDATLRTFLESCMGQWRTVLRYPGCWQIQGNDEPIWIKRGIFQGDSLSPLWFCLALNPLSTLLEDSGLGYRLRRGGQVISHLLYMDDLKLFAPNNLQLMELLKITESFSSTIRMEFGVDKCAVMHVKRGEIVESEGIQLPDSIQLRSLSSSDNYKYLGMSEALGINVTDMKQSLKERFFGRLKKVLNSLLSGGNKVRAFNGWVMPVLMYSFGILKWTQTELDALDRRVRTLLTANRMHHPRSSVMRLYIPRKCGGRGFLNAKTLYNREVCNLRDYFLKTEVGMHRDVVAVDKGLTPLSMAKENWRKPVVLTTDDRKQVWQSKELHGRFYRALHGPDVDFIASVSWLRFGDLFGETEGFVCAIMDEVILTNNYRKHIMKDGTVDMCRACHRPGESIRHIISGCSRLANGEYLHRHNQVARIIHQQLALRYKLVESEVPYYKYVPDPVLEDDHVTLYWDRSIITDRTIVANKPDIVVIDRLARRAMIVDVTIPHDENLVKAEKEKQIKYLDLAHEVVDMWNVDSAVIVPIVVTANGLLAKSLDDHLSRLSLHGWIKGLNTEGSTPRYGSHCEEVPVSATLTAGSLDPASAIGGILFFIFLNVFVFFIFKYLKI

SEQ ID NO: 29423 - protein, 962 aa, Cosmia trapezina
MHKKNRALMCALDSLLKDFFESSENLVDTHSILYCAAVAACRLANVKFPNCDGATRPKPAVPAWQCRIERRIDGARVLIGKLYCFRQGNTRPRVMRFVRRAFSGTGISPPEYMSRVTERIDFLKQKVCAWASRIRRYKRRVDRYTQNRMFQSDERWVYRAWERPEQNMTDVCRPDDAATSAFWRSIWWVPVCHAEAGWMKDVERVCEAIPEMEPVLITPLDVARAVRPLPNWKSPGPDGLHNFWLKWLISSHTRLASQFQSSLESGSLPQFLTTGVTHLLHKSGSPAEPKNYRPITCLSTIYKLLTSILRAKINMHIDSNSIMSTSQNGCRNGSRGTKELLLIDMAINQQVRRSRKDLSTCWIDYKKAYDSVSHAWLMRVLELYKIDATLRTFLESCMGQWRTVLRYPGCRRIRGNDEPVRIKRGIFQGDSLSPLWFCLALNPLSTLLEDSGLGYRLRRGGQVISHLLYMDDLKLFAPNKLRLMELLKVTESFSSAIRMEFGVDKCAVMHVKRGEIMESEGIQLSDSIHLRSLSSSETYKYLGMSEALGINVADMKQSLRERFFGRLKKVLISLLSGGNKVRACNGWVMPVLMYSFGILKWTQTELDALDRRVRTLLTANRMHHPRSSVMRLYIPRKCGGRGFLNAKTLHNREVCSLREYFLKSDVGMHRDVVAVDKGLTPLSMAKENWRKPVVLTTDDRKKVWQSKELHGRFYRALHEPSVDFLASVSWLRFGDLFGETEGFVCAIMDEVILTNNYRRYIMKDGTVDVCRACHRPGESIRHIISGCSRLANGEYLHRHNQVARIIHQQLALKYKLVDSEVPYYKYVPDPVLENDHVTLYWDRSIITDRTIIANKPDIVVIDRLARRAMIVDVTIPHYGNLVKAEKEKQIKYLDLAHEVVDMWNVDSAVIVPIVVTANGLIADSLDQHLSRLSLGGWIKGQIQKAVLLDTARIVRRFLSLQP

SEQ ID NO: 29424 - protein, 1202 aa, Cosmia trapezina
MLTRSAARARPPPPDSSLSSASPPPVSSPTVGAVMTPAAAVASSSSDEYFSPPTSPTPVRRQGRGRPPRSLGLRGQPAPSRVPAAGGCVQRMRWTQSMNENVMRAYYGSTEGGTNLTAYRVRMLSLFQELEPTVNVSAQRISDQVRVIQRNHRLDDAALDRLRSEVLSNHIISNPTQTAVQPSIIDALPPRSNHVVEEVDDRVATVSSQYNDRLRDALEDAFCEYRSTPTELRPRLPRLPMHKKNRALMCALDSLLKDFFESSENLVDTHSILYCAAVAACRLANVKFPNCDGATRPKPAVPAWQCRIERRIDGARVLIGKLYCFRQGNTRPRVMRFVRRAFSGTGISPPEYMSRVTERIDFLKQKVCAWASRIRRYKRRVDRYTQNRMFQSDERWVYRAWERPEQNVTDVCRPDDAATSAFWRSIWSVPVCHAEAGWMKDVERVCEAIPEMEPVLITPLDVARAVRPLPNWKSPGPDGLHNFWLKWLISSHTRLASQFQSSLESGSLPQFLTTCVTHLLHKSDSPAEPKNYRPITCLSTIYKLLTSILRAKINMHIDSNSIMSTSQNGCRNGSRGTKELLLIDMAISQQVRRSRKDLSTCWIDYKKAYDSVSHAWLMRVLELYKIDATLRTFLESCMGQWRTVLRYPGCRRIQGNDEPVRIKRGIFQGDSLSPLWFCLALNPLSTLLEDSGLGYRLRRGGQVISHLLYMDDLKLFAPNKLRLMELLKVTETFSSAIRMEFGVDKCAVMHVKRGEIMESEGIQLSDSIHLRSLSSSETYKYLGMSEALGINVADMKQSLRERFFGRLTKVLISLLSGGNKVRAFNGWVMPVLMYSFGILKWTQTELDALDRRVRTLLTANRMHHPRSSVMRLYIPRKCGGRGFLNAKTLHNREVCSLREYFLKSDVGMHRDVVAVDKGLTPLSMAKENWRKPVVLTTDDRKKVWQSKELHGRFYRALHEPDVDFLASVSWLRFGDLFGETEGFVCAIMDEVILTNNYRRYIMKDGTVDVCRACHRPGESIRHIISGCSRLANGEYLHRHNQVARIIHQQLALKYKLVDSEVPYYKYVPDPVLENDHVTLYWDRSIITDRTIVANKPDIVVIDRLARRAMIVDVTIPHDGNLVKAEKEKQIKYLDLAHEVVDMWNVDSAVIVPIVVTANGLIADSLDQHLSRLSLSGWIKGQIQKAVLLDTARIVRRFLSLQP

SEQ ID NO: 29425 - protein, 1199 aa, Mamestra brassicae
MLTRAALQRARPPPPDPSLSSASPPPDIGSPLSPAVAVASSSSDEYFSPPTSPTPVRRQGRGRPPRGLGPRGQPAPSRVPATGGCVQRMRWTQSMNENVMRAYYGSTEGGTNLTAYRVRMLSLFQDLEPTVNVSAQRLSDQVRVIQRNHRLDDAALDRLRSEILNNLIISTPTQTAVQAPVNGRITPRPNNVSDEVDDRVVTVSSQCNDRLRSTLEDALREYRSTPTELRHRLPRLPMHKKNRALVCALDSLLQNIFESSESLVDTHSILYCGAVAACRIANVKFPGCDEAIRPKPAAPAWQRRIERRIDETRALIGKLYCFREGNTRPRVMPFVRRAFSGTEISPRDFTSRVTERIDFLKQKVCAWASRIRRYKRRVDRYSQNRMFQSDERWVYRAWERPEQSVTDVCRPDDVATSIFWRSIWSVPICHAEGGWMRDVERVCEAIPQMEKIIITTLDVAKAVRPLPNWKSPGPDGLHNFWLKWYSSSHALLASQFQSSLDSGSLPQFLTTGVTHLLHKTGSPTEPKNYRPITCLSTVYKLLTSILRAKINEHIESNTIMSASQNGCRKGSRGTKELLLIDMAISQQVRRSRKDLSTCWIDYKKAYDSVPHTWLMKVLELYKIDATLRTFLESCMRQWKTVLRYPGCRPIQGSDEPVWIKRGIFQGDSLSPLWFCLALNPLSTLLEDSGLGYRLRRGGQAISHLLYMDDLKLFAPNNLRLMELLKVTETFSSAIRMEFGVDKCAVMHVKKGEIMESEGIHLSDSIQVRSLSSTETYKYLGMLEALGINGTDMKQSLKERFFGRLKKVLNSLLSGGNKVRAFNGWVMPVLMYTFGILKWTQTELDALDRRVRTLLTANRMHHPRSSVMRLYIPRKCGGRGFLNAKTLHNREMCSLREYFLKADVGMHRDVVAVDKGLTPLSMSKENWRTPVILTTDDRKEVWKGKELHGRFYRALHGSDVDFSASVAWLRFGDLFGETEGFVCAIMDEVILTNNYRRHIMKDGTVDMCRACHRPGESIRHIISGCSRLANGEYLHRHNQVARIIHQQLALKYNLVDSEVPYYKYVPDPVLENDHVTLYWDRSIITDRTIVANKPDIVVIDRLARRTMIIDVTIPHDENLVKAEKEKQIKYLDLAYEVVDMWNVESAVIVPIVVTANGLMAKSFDDHLSKLALRSWVKGLIQKAVLLDTARIVRRFLSLEP

SEQ ID NO: 29426 - protein, 1199 aa, Mamestra brassicae
MITRAAARRAHPPPPGSSLSSASPTPDIGSQVSPVVAVASSSSDEYFSPPTSPTPVRRQGRGRPPRSLGSRGQSALSRVPAAGGCVQRMRWTQSMNENVMRAYYGSTEGGTNLTAYRVRMLSLFQDLEPTVNVSAQRLSDQVRVIQHNCRLDDAALERLRSEVLSNLIISTPTQTVVQAPASGAITPRPNNGSDEVDDRVVTVSSQCNDRLRSALEDALREYRLTPTELRPRLPRLPMHKKNRALVCALDSLLQNIFESSESLVDTHSILFCGAVAACRIANVKFPSCDEAIRPKPAAPAWQCRIERRIDEARALIGKLYCFREGNTRPRVMRFVRRAFSGTGISSREYTFRVTERIDFLKQKVCAWANRIRRYKRRVDRYSQNRMFQSDERWVYRAWERPEQSVTDVYRPDDVATSTFWRSIWSVPICHAEGGWMRDVERVCEAIPQMEKITITTLDIAKAVRPLPNWKSPGPDGLHNFWLKWYSSSHALLASQFQSSLESGSLPQFLTTGITHLLHKTGSPAEPKNYRPITCLSTVYKLLTSILRAKINEHIESNSIMSASQNGCRKGSRGTKELLLIDMAISQQVRRSRKDLSTCWIDYKKAYDSVPHTWLMKVLELYKIDATLRTFLESCMRQWKTVLRYPGCQPIQGSDEPVWIKRGIFQGDSLSPLWFCLALNPLSTLLEDSGLGYRLRRGGQAISHLLYMDDLKLFAPNNLRLMELLKVTETFSSAIRMEFGVDKCAVMHVKKGEIMESEGIQLSDSIQVRSLGSTESYKYLGMSEALGINGTDMKQSLRERFFGRLKKVLNSLLSGGNKVRAFNGWVMPVLMYTFGILKWTQTELDALDRRVRTLLTANRMHHPRSSVMRLYIPRKCGGRGFLNAKTLHNREMCSLREYFLKADVGMHRDVVAVDKGLTPLSMAKENWRKPVILTTDDRKEVWKGKELHGRFYRALYGSDVDFSASVAWLRFGDLFGETEGFVCAIMDEVILTNNYRKHIMKDGTVDVCRACHRPGESIRHIISGCSRLANGEYLHRHNQVARIIHQQLALKYKLVDSEVPYYKYVPDPVLENDHVTLYWDRSIITDRTIVANKPDIVVIDRLARRTMIIDVTIPHDENLVKAEKEKQIKYLDLAHEVVDMWNVDSAVIVPIVITANGLMAKSFDDHLSKLALRGWIKGLIQKAVLLDTARIVRRFLSLEP

SEQ ID NO: 29427 - protein, 1202 aa, Noctua fimbriata
MITRAAYRRARLPPPDPSLSSASPPPESSPIVSAVTPAVAVASSSSDEYFSPPTSPTPVRRQGRGRPPRSLGLRGHPAPSRVPAAGGCVQRMRWTHSINENVMRAYYGSTEGGTNLTAYRVGMLSLFQVLEPTVNVSAQRLSDQVRVIQRNHMLDDAVLDRLRSEVLSNRIVLTPAQTAVQASVIDATPPRFNPAVVEEDDRVAVVSSQCNDRLRSALEDALREYRSTPTELRPRLPRLPMHNKNRELVCALDSQLENIFESSENLVDTHSILYCGAVAACRLANVKFSNCDVATRPKPAVPAWQRRIERRIDGARVLIGKLHCFREGNTRPRVMRFVRRAFSGTGISPQEYMSRVTERIDFLKQKVYAWANRIRRYKRRVDRYSQNRMFQSDERWVYRAWERPELNMTDVCRPDDAATSSFWRSIWSVPVCHTEADWMRDVERVCEPIPEMEPILITPLDIARAVRPLPNWKSPGPDGLHNFWLKWLSSSHTCLASQFQSSLESGSLPQFLTTGVTHLLHKSGSPAEPKNYRPITCLSTVYKLLTSILRAKINTHIDKNSIMSASQNGCRNGSRGTKELLLIDMAISQQVRRSRKDLSTCWIDYKKAYGSVPHTWLMRVLELYKIDATLRAFLESCMGQWRTVLRYPGCRQIQGNDEPVWIKRGIFQGDSLSPLWFCLALNPLSTLLEDSGLGYRLRRGGQVISHLLYMDDLKLFAPNKLQLMELLKVTETFSSAIRMEFGVDKCAVMYVKRGEIMESEGIQLSDFIHLRSLSSSESYKYLGMSEALGINVTDMKQSLKERFFGRLNKVLHSLLSGGNKVRAFNGWVMPVLMYSFGVLKWTQTELDALDRRVRTLLTANRMHHPRSSVMRLYIPRKCGGRGFLNAKSLHNREMCSLREYFLKVEVGMHRDVVAVDKGLTPLSMAKENWRKPEVLTTDDRKEVLQGKELHGRFYRALHGPDVDFLASVSWLRFGDLFGETEGFVCAIMDEVMLTNNYRKYIMKDGTVDVCRACHRPGESIRHIISGCSRLANGEYLHRHNQVARIIHQQLALKYKLVESEVPYYKYVPDPVLEKNHVTLYWDQSIITDRTIVANKPDIVVIDRSARRVMIVDVTIPHDENLVKAEKEKQIKYLDLAHEVVDMWHVNSAIIVPIVVTANGLIAKSLDEHLSKLSLGGWIKGLIQKAVLLDTARIVRRFLSLEP

SEQ ID NO: 29428 - protein, 1202 aa, Noctua fimbriata
MITRAASRRARLPPPDQSLSSASPPPESSPIVSAVTPAVAVASSSSDEYFSPPTSPTPVRRQGRGRPPRSLGLRGHPAPSRVPAAGGCVQRMRWTHSINENVMRAYYGSTEGGTNLTAYRVGMLSLFQVLEPTINVSAQRLSDQVRVIQRNHMLDDAVLDRLRSEVLSNRIVLTPAQTAVQASVIDATPPRFNPAVVEEDDRVAVVSSQCNDRLRSALEDALREYRSTPTELRPRLPRLPLHNKNRALVCALDSQLKNLFESSENLVDTHSILYCGAVAACRLANVKFPNCDVATRPKPAVPAWQRRIECRIDGARVLIGKLHCFREGNTRPRVMRFVRRAFSGTGISPQEYMSRVTERIDFLKQKVYAWANRIRRYKRRVDRYSQNRMFQSDERWVYRAWERPDQNMTDMCRPDDAATSSFWRSIWSVPVCHTEADWMRDVEQVCKPIPEMEPILITPLDVARAVRPLPNWKSPGPDGLHNFWLKWLSSSHTCLASQFQSSLESGSLPQFLTTGVTHLLHKSGSPAEPKNYRPITCLSTVYKLLTSILRAKINTHIDKNSIMSASQNGCRNGSRGTKELLLIDMAISQQVRRSRKDLSTCWIDYKKAYDSVPHTWLMRVLELYKIDATLRAFLESCMGQWRTVLRYPGCRQIQGNDEPVWIKRGIFQGDSLSPLWFCLALNPLSTLLEDSGLGYRLRRGGQVISHLLYMDDLKLFAPNKLQLMELLKVTETFSSAIRMEFGVDKCAVMYVKQGEIMESEGIQLSDSIHLRTLSSTESYKYLGMSEALGINVTDMKQSLKERFFGRLNKVLHSLLSGGNKVRAFNGWVMPVLMYSFGVLKWTQTELDALDRRVRTLLTANRMHHPRSSVMRLYIPRKCGGRGFLNAKSLHNREMCSLREYFFKVEVGMHRDVVAVDKGLTPLSMAKENWRKPEVLTTDDRKEVWQGKELHGRFYRALHGPDVDFLASVSWLRFGDLFGETEGFVCAIMDEVMLTNNYRKYIMKDGTVDVCRACHRPGESIRHIISGCSRLANGEYLHRHNQVARIIHQQLALKYKLVESEVPYYKYVPDPVLEKDHVTLYWDQSIITDRTIVANKPDIVVIDRSARRVMIVDVTIPHDENLVKAEKEKQIKYLDLAHEVVDMWNVNSAIIVPIVVTANGLIAKSLDDHLSKLSLGGWIKGLIQKAVLLDTARIVRRFLSLEP

SEQ ID NO: 29429 - protein, 1111 aa, Noctua fimbriata
MKWTHSINENVMRAYYGSTEGGTNLTAYRVGMLSLFQVLEPTVNVSAQRLSDQVRVIQRNHMLDDAVLDRLRSEVLSNRIVLTPAQTAVQASVIDATPPRFNPAVVEEDDRVTVVSSQCNDRLRSALEDALREYRSTPTELRPRLPRLPMHNKNRALVCALDSQLENIFESSENLVDTHSILYCGAVAACRLANVKFPNCDVATRPKPAVPAWQRRIERRIDGARVLIGKLHCFREGNTRPRVMRFVRRAFSGTGISPQEYMSRVTERIDFLKQKVYAWANRIRRYKRRVDRYSQNRMFQSDERWVYRAWERPELNMTDVCRPDDAATSSFWRSIWSVPVCHTEADWMRDVERVCEPIPEMEPILITPLDIARAVRPLPNWKSPGPDGLHNFWLKWLSSSHTCLASQFQSSLESGSLPQFLTTGVTHLLHKSGSPAEPKNYRPITCLSTVYKLLTSILRAKINTHIDKNSIMSASQNGCRNGSRGTKELLLIDMAISQQVRRSRKDLSTCWIDYKKAYDSVPHTWLMRVLELYKIDATLRAFLESCMGQWRTVLRYPGCRQIQGNDEPVWIKRGIFQGDSLSPLWFCLALNPLSTLLEDSGLGYRLRRGGQVISHLLYMDDLKLFAPNKLQLMALLKVTETFSSAIRMEFGVDKCAVMYVKRGEIMESEGIQLSDSIHLRSLSSSESYKYLGMSEALGINVTDMKQSLKERFFGRLNKVLHSLLSGGNKVRAFNGWVMPVLMYSFGVVKWTQTELDALDRRVRTLLTENRMHHPRSSVMRLYIPRKCGGRGFLNAKSLHNREMCSLREYFLKVEVGMHRDVVAVDKGLTPLSMAKENWRKPEVLTTDDRKEVWQGKELHGRFYRALHGPDVDFLASVSWLRFGDLFGETEGFVCAIMDEVMLTNNYRKYIMKDGTVDVCRACHRPGESIRHIISGCSRLANGEYLHRHNQVARIIHQQLALKYKLVESEVPYYKYVPDPVLEKDHVTLYWDQSIITDRTIVANKPDIVVIDRSARRVMIVDVTIPHDENLVKAEKEKQIKYLDLAHEVVDMWHMNSAVIVPIVVTANGLIAKSLDDHLSKLSLGGWIKGLIQKAVLLDTARIVRRFLSLEP

SEQ ID NO: 29430 - protein, 1200 aa, Noctua fimbriata
MITRAAYRRARLPPPDPSLSSASPPPESSPIVSAVTPAVAVASSSSDEYFSPPTSPTPVRRQGRGRPPRSLGLRGHPAPSRVPAAGGCVQRMRWTHSINENVMRAYYGSTEGGTNLTAYRVGMLSLFQVLEPTVNVSAQRLSDQVRVIQRNHMLDDAVLDRLRSEVLSNRIVLTPAQTAVQASVIDATPPRFNPAVVEEDDRVAVVSSQCNDRLRSALEDALREYRSTPTELRPRLPRLPMHNKNRALVCALDSQLENIFESSENLVDTHSILYCGAVAACRLANVKFSNCDVATRPKPAVPAWQRRIERRIDGARVLIGKLHCFREGNTRPRVMRFVRRAFSGTGISPQEYMSRVTERIDFLKQKVYAWANRIRRYKRRVDRYSQNRMFQSDERWVYRAWERPELNMTDVCRPDDAATSSFWRSIWSVPVCHTEADWMRDVERVCEPIPEMEPILITPLDIARAVRPLPNWKSPGPDGLHNFWLKWLSSSHTCLASQFQSSLESGSLPQFLTTGVTHLLHKSGSPAEPKNYRPITCLSTVYKLLTSILRAKINTHIDKNSIMSASQNGCRNGSRGTKELLLIDMAISQQVRRSRKDLSTCWIDYKKAYDSVPHTWLMRVLELYKIDATLRAFLESCMGQWRTVLRYPGCRQIQGNDEPVWIKRGIFQGDSLSPLWFCLALNPLSTLLEDSGLGYRLRRGGQVISHLLYMDDLKLFAPNKLQLMELLKVTETFSSAIRMEFGVDKCAVMYVKRGEIMESEGIQLSDFIHLRSLSSSESYKYLGMSEALGINVTDMKQSLKERFFGRLNKVLHSLLSGGNKVRAFNGWVMPVLMYSFGVLKWTQTELDALDRRVRTLLTANRMHHPRSSVMRLYIPRKCGGRGFLNAKSLHNREMCSLREYFLKVEVGMHRDVVAVDKGLTPLSMAKENWRKPEVLTTDDRKEVWQGKELHGRFYRALHGPDVDFLASVSWLRFGDLFGETEGFVCAIMDEVMLTNNYRKYIMKDGTVDVCRACHRPGESIRHIISGCSRLGNGEYLHRHNQVARIIHQQLALKYKLVESEVPYYKYVPDPVLEKNHVTLYWDQSIITDRTIVANKPDIVVIDRSARRVMIVDVTIPHDENLVKSEKEKQIKYLDLAHEVVDMWHVNSAIIVPIVVTANGLIAKSLDDHLSKLSLGGWIKGLIQKAVLLDTARIVRRFLSL

SEQ ID NO: 29431 - protein, 1202 aa, Noctua fimbriata
MLTRAAARRARLPPPDPSLSSASPPPESSPIVSAVTPAVAVASSSSDEYFSPPTSPTPVRRQGRGRPPRSLGLRGHPAPSRVPAAGGCVQRMRWTNSINENVMRAYYGSTEGGTNLTAYRVGMLSLFQVLEPTVNVSAQRLSDQVRVIQRNHMLDDAVLDRLRSEVLSNRIVSTPAQTAVQASVIDATPPRFNPAVVEEDDRVAVVSSQCNDRLRSALEDALREYRSTPTELRPRLPRLPMHNKNRALVCALDSQLENIFESSENLVDTHSILYCGAVAACRLANVKFPNCDVATRPKPAVPAWQRRIERRIDGARVLIGKLHCFREGNTRPRVMRFVRRAFSGTGISPQEYMSRVTERIDFLKQKVYAWANRIRRYKRRVDRYSQNRMFQSDERWVYRAWERPELNMTDVCRPDDATTSSFWRSIWSVPVCHTEADWMRDVERVCEPIPEMEPILITPLDIARAVRPLPNWKSPGPDGLHNFWLKWLSSSHTCLASQFQSSLESGSLPQFLTTGVTHLLHKSGSPAEPKNYRPITCLSTVYKLLTSILRAKINTHIDKNSIMSASQNGCRNGSRGTKELLLIDMTISQQVRRSRKDLSTCWIDYKKAYDSVPHTWLMRVLELYKIDATLRAFLESCMGQWRTVLRYPGCRQIQGNDEPVWIKRGIFQGDSLSPLWFCLALNPLSTLLEDSGLGYRLRRGGQVISHLLYMDDLKLFAPNKLRLMELLKVTETFSSAIRMEFGVDKCAVMYVKQGEIMESEGIQLSDSIHLRTLSSTESYKYLGMSEALGINVTDMKQSLKERFFGRLNKVLRSLLSGGNKVRAFNGWVMPVLMYSFGVLKWTQTELDALDRRVRTLLTANRMHHPRSSVMRLYIPRKCGGRGFLNAKSLHNREMCSLREYFFKVEVGMHRDVVAVDKGLTPLSMAKENWRKPEVLTTDDRKEVWQGKELHGRFYRALHGPDVDFLASVSWLRFGDLFGETEGFVCAIMDEVMLTNNYRKYIMKDGTVDVCRACHRPGESIRHIISGCSRLANGEYLHRHNQVARIIHQQLALKYKLVESEVPYYKYVPDPVLEKDHVTLYWDQSIITDRTIVANKPDIVVIDRSARRVMIVDVTIPHDENLVKAEKEKQIKYLDLAHEVVDMWHMNSAVIVPIVVTANGLIAKSLDDHLSKLSLGGWIKGLIQKAVLLDTARIVRRFLSLEP

SEQ ID NO: 29432 - protein, 1202 aa, Atethmia centrago
MLTRSAARARPPPPDSSLSSASPPPVPSPTVSAVTTPAAVVASSSSDEYFSPPTSPIPVRRQGRGRPPKSLGLRGQLAPSRVPAAGGCVQRMRWTQSMNENVMRAYYGSTEGGTNLTAYRVRMLSLFQKLEPTVNVSAQRLSDQVRVIQRNHRLDDAALDRLRSEVLSNHIVSTPAQTATHAPIINAIPPRSNHDVEEEDDRVATVSSQCNVRLRSALEDAFREYRSTPTELRPRLPRLPMHKKNRALVCTLDSLLKDFFESSEDLVDTHSILYCAAVAACRLANVKFPNCDGATRPKPAVPAWQCRIERRIDGARVLIGKLYCFREGNTRPRVMRFVRRAFSGTGISPREYMSRVTERIDFLKQKVCAWASRIRRYKRRVDRYTQNRMFQSDERWVYRAWERPEQNETDVCRPDDATTTAFWRSIWSVPVCHAEADWMRDVERVCETIPEMDVVIITPSDIARAVRPLPNWKSPGPDGLHNFWLKWLTSSHTCLASQFQSSLESGSLPQFLTTGITHLLHKSGSPAEPKNYRPITCLSTVYKLLTSILRAKINTHIDSNSIMSASQNGCRNGSRGTKELLLIDMAISQQVRRFRKDLSTCWIDYKKAYDSVPHTWLMRVLEFYKIDTTLRTFLESCMGQWRTVLRYPGCRQIQGNDEPVWIKRGIFQGDSLSPLWFCLALNPLSTLLEDSGLGYRLRRGGQVISHLLYMDDLKIFAPNKLQLMELLKVTETFSSAIRMEFGVDKCAVMHVKRGEIMESEGIQLSDSIHLRSLSSPESYKYLGMSEALGINVTDMKQSLKERFFGRLKKVLISPLSGGNKVRAFNGWVMPVLMYSFGILKWTQTELDALDRRVRTLLTANRMHHPRSSVMRLYIPRKCGGRGFLNAKTLHNREICSLREYFLKTEVGMHRDVVAVDKGLTPLSMAKENWCKPVILTTDDRKEIWQNKELHGRFYRALHEPDVDFLASVSWLRFGDLFGETEGFVCAIMDEVILTNNYRRHIMKDGTVDVCRACHRPGESIRHIISGCSRLANGEYLHRHNQVARIIHQQLALKYKLVNSEVPYYKYAPDPVLENDDVTLYWDRSIITDRTIVANKPDIVVIDRLARRAMIVDVTIPHDENLVKAEKEKQIKYLDLAHEVVDMWNVDSAVIVPIVVTANGLMAESLNHHLSRLSLGGWIKGLIQKAVLLDTARIVRRFLSLES

SEQ ID NO: 29433 - protein, 1203 aa, Atethmia centrago
MLTRAASKRARPPPPDSSLSSASPPPVSSPTVSAVITPAAVVASSSSDEYFSPPTSPTPVRRQGRDRPPKSLGLRGHPAPSRVPAAGGCVQRMRWTQSMNENVMRAYYGSTEGGTNLTAYRVRMLSLFQELEPTVNVSAQRLSDQVRVIQRNRRLDDATLDRLRSEVLSNYIISTPAQTAVHTPIIDVIPPRSNHGVEEEDDRAATVSSQCNIRLRSALEDAFREYRSTPTELRPRLPRLPMHKKNRALMCALDSQLKVFFESSEDLVDTHSILYCAAVAACRLANVKFPNSDGATRPKPAVPAWQCRIERRIDKARVLIGKLYCFREGNTRPRVMRFVRRAFSGTGISPREYMSHITERIDFLKQKVCAWASRIRRYKRRVDRYTQNRMFQSDERWVYRAWERPKQNVTDVCRPDDATTTAFWRSIWSVPVCHVEADWMRDVERVCETIPEMEVVIITPSDIARAVRPLPNWKSPGPDGLHNFWLKWLTSSHTCLASQFQSSLESGSLPQFMTTGITHLLHKSGSPAEPKNYRPITCLSTVYKLLTSILRAKINTHIDSNSIMSASQNGCRNGSRGTKELLLIDMAISQQVRRSRKDLSTCWIDYKKAYDSVPHTWLMRVLELYKIDTTLRTFLESCMGQWRTVLRYPGCRQIQGNDEPVWIKRGIFQGDSLSPLWFCLALNPLSMQLEDSGLGYRLRRGGQIISHLLYMDDLKIFAPNKLQLMKLLKVTETFSSAIRMEFGVDKCAVMHVKRGEIMESEGIQLSDSIHLRSLSSPESYKYLGMSEALGINVTDMKQSLKERFFGRLKKVLISLLSGGNKVRAFNSWVMPVLTYSFGILKWTQTELDALDRRVRTLLTANRMHHPRSSVMRLYIPRKCGGRGFLNAKTLHNREICSLREYFLKTEVGMHRDVVAVDKGLTPLSMAKENWCKPVVLTTDDRKEIWQSKELHGRFYRALHEPDVDFLASVSWLRFGDLFGETEGFVCAIMDEVILTNNYRRHIMKDGTVDVCRACHRPGESIRHIISGCSRLANGEYLHRHNQVARIIHQQLALKYKLVNSEVPYYKYAPDPVLENDHVTLYWDRSIITDRTIVANKPDIVVIDRLARRAMIVDVTIPHDENLVKAEKEKQIKYLDLAHEVVDMWNVDSAVIVPIVVTANGLMAESLNHHLSRLSLGGWIKGLIQKAVLLDTARIVRRFLSLES

SEQ ID NO: 29434 - protein, 1203 aa, Atethmia centrago
MLTRAASKRARPPPPDSSLSSASPPPVSSPTVNAVITPAAVVASSSSDEYFSPPTSPTPVRRQGRDRPPKSLGLRGHPAPSRVPAAGGCVQRMRWTQSMNENVMRAYYGSTEGGTNLTAYRVRMLSLFQELEPTVNVSAQRLSDQVRVIQRNRRLDDATLDRLRSEVLSNYIISTPAQTAVHTPIIDVIPPRSNHGVEEEDDRAATVSSQCNARLRSALKDAFREYRSTPTELRPRLPRLPMHKKNRALMCALDSQLKVFFESSEDLVDTHSILYCAAVAACRLANVKFPNSDGATRPKPAVPAWQCRIERRIDKARVLIGKLYCFREGNTRPRVMRFVRRAFSGTGISPREYMSHITERIDFLKQKVCAWASRIRRYKRRVDRYTQNRMFQSDERWVYRAWERPKQNVTDVCRPDDATTTAFWRSIWSVPVCHVEADWMRDVERVCETIPEMEVVIITPSDIARAVRPLPNWKSPGPDGLHNFWLKWLTSSHTCLASQFQSSLESGSLPQFMTTGITHLLHKSGSPAEPKNYRPITCLSTVYKLLTSILRAKINTHIDSNSIMSASQNGCRNGSRGTKELLLIDMAISQQVRRSRKDLSTCWIDYKKAYDSVPHTWLMRVLELYKIDTTLRTFLESCMGQWRTLLRYPGCRQIQGNDEPVWIKRGIFQGDSLSPLWFCLALNPLSMQLEDSGLGYRLRRGGQIISHLLYMDDLKIFAPNKLQLMKLLKVTETFSSAIRMEFGVDKCAVMHVKRGEIMESEGIQLSDSIHLRSLSPPESYKYLGMSEALGINVTDMKQSLKERFFGRLKKVLISLLSGGNKVRAFNSWVMPVLTYSFGILKWTQTELDALDRRVRTLLTANRMHHPRSSVMRLYIPRKCGGRGFLNAKTLHNREICSLREYFLKTEVGMHRDVVAVDKGLTPLSMAKENWCKPVVLTTDDRKEIWQSKELHGRFYRALHEPDVDFLASVSWLRFGDLFGETEGFVCAIMDEVILTNNYRRHIMKDGTVDVCRACHRPGESIRHIISGCSRLANGEYLHRHNQVARIIHQQLALKYKLVNSEVPYYKYVPDPVLENDHVTLYWDRSIITDRTIVANKPDIVVIDRLARRAMIVDVTIPHDDNLVKAEKEKQIKYLDLAHEVVDMWNVNSAVIVPIVVTANGLMARSLNHHLSRLALDGWIKGLIQKAVLLDTARIVRRFLSLEP

SEQ ID NO: 29435 - protein, 1202 aa, Atethmia centrago
MLTRSAARARPQPPDSSLSSASPPPVPSPTVSAVTTPAAVVASSSSDEYFSPPTSPTPVRRQGRGRPPKSLGLRGQLAPSRVPAAGGCVQRMRWTQSMNENVMRAYYGSTEGGTNLTAYRVRMLSLFQKLEPTVNVSAQRLSDQVRVIQRNHRLDDAALDRLRSEVLSNHIVSTPAQTATHAPIINAIPPRSNHDVEEEDDKVATVSSQCNVRLRSALEDAFREYRSTPTELRPRLPRLPMHKKNRALVCALDSLLKDFFESSEDLVDTHSILYCAAVAACRLANVKFPNCDGATRPKPAVPAWQCRIERRIDGARVLIGKLYCFREGNTRPRVMRFVRRAFSGTGISPREYMSRVTERIDFLKQKVCAWASRIRRYKRRVDRCTQNRMFQSDERWVYRSWERPEQNETDVCRPDDATTTAFWRSIWSVPVCHAEADWMRDVERVCETIPEMEVVIITPSDIARAVRPLPNWKSPGPDGLHNFWLKWLTSSHTCLASQFQSSLESGSLPQFLTTGITHLLHKSGSPAEPKNYRPITCLSTVYKLLTSILRAKINTHIDSNSIMSASQNGCRNGSRGTKELLLIDMAISQQVRRFRKDLSTCWIDYKKAYDSVPHTWLMRVLELYKIDTTLRTFLESCMGQWRTVLRYPGCRQIQGNDEPVWIKRGIFQGDSLSPLWFCLALNPLSTLLEDSGLGYRLRRGGQVISHLLYMDDLKIFAPNKLQLMELLKVTETFSSAIRMEFGVDKCAVMHVKRGEIMESEGIQLSDSIHLRSLSSPESYKYLGMSEALGINVTDMKQSLKERFFGRLKKVLISPLSGGNKVRAFNGWVMPVLMYSFGILKWTQTELDALDRRVRTLLTANRMHHPRSSVMRLYIPRKCGGRGFLNAKTLHNREICSLREYFLKTEVGMHRDVVAVDKGLTPLSMAKENWCKPVILTTDDRKEIWQNKELHGRFYRALHEPDVDFLASVSWLRFGDLFGETEGFVCAITDEVILTNNYRRHIMKDGTVDVCRACHRPGESIRHIISGCSRLANGEYLHRHNQVARIIHQQLALKYKLVNSEVPYYKYAPDPVLENDHVTLYWDRSIITDRTIVANKPDIVVIDRLARRAMLVDVTIPHDENLVKAEKEKQIKYLDLAHEVVDMWNVDSAVIVPIVVTANGQVAESLNYHLSRLSLGGWIKGLIQKAVLLDTARIVRRFLSLES

SEQ ID NO: 29436 - protein, 868 aa, Atethmia centrago
MRFVRRAFSGTGISPREYMSHITERIDFLKQKVCAWASRIRRYKRRVDRYTQNRMFQSDERWVYRAWERPKQNVTDVCRPDDATTTAFWRSIWSVPVCHVEADWMRDVERVCETIPEMEVVIITPSDIARAVRPLPNWKSPGPDGLHNFWLKWLTSSHTCLASQFQSSLESGSLPQFMTTGITHLLHKSGSPAEPKNYRPITCLSTVYKLLTSILRAKINTHIDSNSIMSASQNGCRNGSRGTKELLLIDMAISQQVRRSRKDLSTCWIDYKKAYDSVPHTWLMRVLELYKIDTTLRTFLESCMGQWRTVLRYPGCRQIQGNDEPVWIKRGIFQGDSLSPLWFCLALNPLSMQLEDSGLGYRLRRGGQIISHLLYMDDLKIFAPNKLQLMKLLKVTETFSSAIRMEFGVDKCAVMHVKRGEIMESEGIQLSDSIHLRSLSSPESYKYLGMSEVLGINVTDMKQSLKERFFGRLKKVLISLLSGGNKVRAFNSWVMPVLTYSFGILKWTQTELDALDRRVRTLLTANRMHHPRSSVMRLYIPRKCGGRGFLNAKTLHNREICSLREYFLKTEVGMHRDVVAVDKGLTPLSMAKENWCKPVVLTTDDLKEIWQSKELHGRFYRALHELDVDFLASVSWLRFGDLFGETEGFVCAIMDEVILTNNYRRHIMKDGTVDVCRACHRPGESIRHIISGCSRLANGEYLHRHNQVARIIHQQLALKYKLVNSEVPYYKYVPDPVLENDHVTLYWDRSIITDRTIVANKPDIVVIDRLTRRAMIVDVTIPHDDNLVKAEKEKQIKYLDLAHEVVDMWNVNSAVIVPIVVTVNGLMARSLNHHLSRLALDGWIKGLIQKAVLLDTARIVRRFLSLEP

SEQ ID NO: 29437 - protein, 1202 aa, Atethmia centrago
MLTRSAARARPPPPDSSLSSASPPPVPSPTVSAVTTPAAVVASSSSDEYFSPPTSPTPVRRQGRGRPPKSLGLRGQLAPSRVPAAGGCVQRMRWTQSMNENVMRAYYGSTEGGTNLTAYRVRMLSLFQKLEPTVNVSAQRLSDQVRVIQRNHRLDDAALDRLRSEVLSNHIVSTPAQTATHAPIINAIPPRSNHDVEEEDDKVATVSSQCNVRLRSALEDAFREYRSTPTELRPRLPRLPMHKKNRALVCALDSLLKDFFESSEDLVDTHSILYCAAVAACRLANVKFPNCDGATRPKPAVPAWQCRIERRIDGARVLIGKLYCFREGNTRPRVMRFVRRAFSGTGISPREYMSRVTERIDFLKQKVCAWASRIRRYKRRVDRCTQNRMFQSDERWVYRSWERPEQNETDVCRPDDATTTAFWRSIWSVPVCHAEADWMRDVERVCETIPEMEVVIITPSDIARAVRPLPNWKSPGPDGLHNFWLKWLTSSHTYLASQFQSSLESGSLPQFLTTGITHLLHKSGSPAEPKNYRPITCLSTVYKLLTSILRAKINTHIDSNSIMSASQNGCRNGSRGTKELLLIDMAISQQVRRFRKDLSTCWIDYKKAYDSVPHTWLMRVLELYKIDTTLRTFLESCMGQWRTVLRYPGCRQIQGNDEPVWIKRGIFQGDSLSPLWFCLALNPLSTLLEDSGLGYRLRRGGQVISHLLYMDDLKIFAPNKLQLMELLKVTETFSSAIRMEFGVDKCAVMHVKRGEIMESEGIQLSDSIHLRSLSSPESYKYLGMSEALGINVTDMKQSLKERFFGRLKKVLISPLSGGNKVRAFNGWVMPVLMYSFGILKWTQTELDALDRRVRTLLTANRMHHPRSSVMRLYIPRKCGGRGFLTAKTLHNREICSLREYFLKTEVGMHRDVVAVDKGLTPLSMAKENWCKPVILTTDDRKEIWQNKELHGRFYRALHEPDVDFLASVSWLRFGNLFGETEGFVCAIMDEVILTNNYRRHIMKDGTVDVCRACHRPGESIRHIISGCSRLANGEYLHRHNQVARIIHQQLALKYKLVNSEVPYYKYAPDPVLENDHVTLYWDRSIITDRTIVANKPDIVVIDRLARRAMLVDVTIPHDENLVKAEKEKQIKYLDLAHEVVDMWNVDSAVIVPIVVTANGLMAENLNYHLSRLSLGGWIKGLIQKAVLLDTARIVRRFLSLES

SEQ ID NO: 29438 - protein, 983 aa, Mesoligia furuncula
MHYASIGPLQPNLGPDYHGYPCTKKNRALVCALDSQLKNFFESSEDLVDTHSILYCAAVAACRLANVKFSSCDGATRPKPAVPAWQRRIERRIDGARVLIGKLYCFREGNTRPRVMRFVRRAFSGTGISPREYMSRVTERIDFLKQKVCAWASRIRRYKRRVDRYTQNRMFQSDERWVYRAWERPEQNVTDVYRPDDAATSAFWCSIWSVPVCHTEAGWMQDVERVCESVPEMEKVLITPSDVARAVRPLSNWKSPGPDGLHNFWLKWLISSHTCLASQFQSSLESGSLPQFLTTGVTHLLHKSGSPAEPKNYRPITCLSTVYKLLTSILRAKINKHIESNSIMSASQNGCRNGSRGTKELLLIDMAISQQVRRSRKDLSTCWIDYKKAYDSVPHTWLMRVLELYKIDATLRTFLESCMGQWKTVLRYPGCRQIQGNDEPVWIKRGIFQGDSLSPLWFCLALNPLSTLLEDSGLGYRLRRGGQVISHLLYMDDLKLFAPNKLRLMELLKVTKTFSSAIKMEFGVDKCAVMHVKRGEIMESEGIQLSDSISLRSLSSSESYKYLGMSEALGINDADMKQSLKERFFCHLKKVLISLLSGGNKVRAFNGWVMPVLMYSFGILKWTQTELDALDRRVRTLLTANRMHHPRSSVMRLYIPRKCGGRGFLNAKTLHNREVCSLREYFLKAEVGMHRDVVAVDKGLTPLSMAKENWRKPVVLSTDDRKRVWQSKELHGRFYRALHEPGVDFIASVSWLRFGDLFGETEGFVCAIMDEVILTNNYRRHIMKDGTVDVCRACHRPGESIRHIISGCSRLANGEYLHRHNQVARIIHQQLALKYKLVDSEVPYYKYVPDPVLENDHVTLYWDRSIITDRTIVANKPDIVVIDRLARRTMIVDVTIPHDGNLVKAEKEKQIKYLDLAHEVVDMWKVSSAIIVPIVVSANGLMAESLDQHLSRLSLGGWIKGLIQKAVLLDTARIVRRFLSLEP

SEQ ID NO: 29439 - protein, 1199 aa, Xestia c-nigrum
MITRAASRRALIPSPDSSLSSASPPPDPGSPVSPVAAVASSSSDEYFSPPTSPTPVRRAGRGRPPKGLGLRGQQAPSRVPATGGCVQRMKWTQLMNENVMRAYYGSTEGGTNLTAYRVRMLSLFQDLEPTVNASAQRLSDQVRVIQRNHLLDGAALDRLRSEVLSNRIILTPAQTAVQASSIDANPPRSNPAVVEEDDRVATVSSQCNDRLRSALEDALHEYRSTSAELRPRLPRLPMHKKNRALVCALDSQLKNVFESSEDLVDTHSILFCGAVAACRLANVKFPNCDLATRPKPAVPAWQRRIERRIDGARVLIGKLHCFREGNTRPRVMRFVRRAFSGTEISPQEYMSRVTERIDFLKQKVYAWASRIRRYKRRVDRYSQNRMFQSDERWVYRAWERPQQNMTDVCRPDDAATSSFWRSIWSVPVCHSEADWMRDVERVCEPIPTMEPILITPLDIARAVRPLPNWKSPGPDGLHNFWLKWFSSSHTCLASQFQSSLESGSLPQFLTTGITHLLHKSGSPAEPKNYRPITCLSTVYKLLTSILRTKINTHVDSNSIMSASQNGCRNGSRGTKELLLIDMAISQQVRRARKDLSICWIDYKKAYDSVPHSWLKRVLELYKIDATLRTFLESCMGQWRTVLRYPGCRQIQGNDEPVWIKRGIFQGDSLSPLWFCLALNPVSTLLENSGLGYRLRKDGQVISHLLYMDDLKLFAPNKLQLMELLKVTETFSSAIGMEFGVDKCAVMYVKRGKIMGSEGLQLSDSIHLRSLSSSESYKYLGMSEALGINVTDMKQSLKERFFGRLKKVLNSLLSGGNKVRAFNGWVMPVLMYSFGILKWTQTELDALDRRVRTLLTENRMHHPRSSVMRLYIPRKCGGRGFLNAKTLHNREVCSLREYFLKVDVGMHRDVVAVDKGLTPLSMAKENWRKPVVLTTDDRKKEWQGKELHGRFYRALHGPDVDFLASVSWLRFGDLFGETEGFVCAIMDEVMLTNNYRKYIMKDGTVDVCRACHCPGESIRHIISGCSRLANGEYLHRHNQVARIIHQQLALKFKLVESEVPYYKYVPDPVLVKDHVTLYWDQSIITDRTIVANKPDIVVIDRSARRVMIIDVTIPHDENLVKAEKEKQMKYLDLAHEVREMWNMNSVIIVPIVVTANGLIAKSLDEHLSKLSLGGWIKGLIQKAVLLDTARIVRRFLSLQP

SEQ ID NO: 29440 - protein, 1199 aa, Xestia c-nigrum
MITRAASRRALIPSPDSSLSSASPPPDPGSPVSPVAAVASSSSDEYFSPPTSPTPVRRAGRGRPPKGLGLRGQQAPSRVPATGGCVQRMKWTQLMNENVMRAYYGSTEGGTNLTAYRVRMLSLFQDLEPTVNASAQRLSDQVRVIQRNHLLDGAALDRLRSEVLSNRIILTPAQTAVQASSIDANPPRSNPAVVEEDDRVATVSSQCNDRLRSALEDALHEYRSTSAELRPRLPRLPMHKKNRALVCALDSQLKNVFESSEDLVDTHSILFCGAVAACRLANVKFPNYDLATRPKPAVPAWQRRIERRIDGARVLIGKLHCFREGNTRPRVMRFVRRAFSGTEISPQEYMFRVTERIDFLKQKVYAWASRIRRYKRRVDWYSQNRMFQSDERWVYRAWERPQQNMTDVCRPDDAATSSFWRSIWSVPVCHSEADWMRDVERVCEPIPTMEPILITPLDIARAVRPLPNWKSPGPDGLHNFWLKWFSSSHTCLASQFQSSLESGSLPQFLTTGITHLLHKSGSPAEPKNYRPITCLSTVYKLLTSILRTKINTHVDSNSIMSASQNGCRNGSRGTKELLLIDMAISQQVRRARKDLSTCWIDYKKAYDSVPHSWLRRVLELYKIDATLRTFLESCMGQWRTVLRYPGCRQIQGNDEPVWIKRGIFQGDSLSPLWFCLALNPVSTLLENSGLGYRLRKDGQVISHLLYMDDLKLFAPNKLQLMELLKVTETFSSAIGMEFGVDKCAVMYVKRGKIMGSEGLQLSDSIHLRSLSSSESYKYLGMSEALGINVTDMKQSLKERFFGRLKKVLNSLLSGGNKVRAFNGWVMPVLMYSFGILKWTQTELDALDRRVRTLLTENRMHHPRSSVMRLYIPRKFGGRGFLNAKTLHNREVCSLREYFLKADVGMHRDVVAVDKGLTPLSMAKENWRKPVVLTTDDRKKEWQGKELHGRFYRALHGPDVDFLASVSWLRFGDLFGETEGFVCAIMDEVMLTNNYRKYIMKDGTVDVCRACHCPGESIRHIISGCSRLANGEYLHRHNQVARIIHQQLALKFKLVESEVPYYKYVPDPVLVKDHVTLYWDQSIITDRTIVANKPDIVVIDRSARRVMIIDVTIPHDENLVKAEKEKQMKYLDLAHEVRDMWNMNSVIIVPIVVTANGLIAKSLDEHLSKLSLGGWIKGLIQKAVLLDTARIVRRFLSLQP

SEQ ID NO: 29441 - protein, 982 aa, Xestia c-nigrum
MHKKNRALVCALDSQLKNMFESSEDLVDTHSILFCGAVAACRLANVKFPNCDIATRPKPAVPAWQRRIERRIDGARVLIGKLYCFREGNTRPRVMRFVRRAFSGTEISPQEYMSRVTERIDFLKQKVYAWASRIRRYKRRVDRYSQNRMFQSDERWVYRAWERPLQNMTDVCRPDDAATSSFWRSIWSVPVCHSEADWMRDVERVCEPIPTMEPILITPLDIARAVRPLPNWKSPGPDGLHNFWLKWFSSSHTCLASQFQSSLESGSLPQFLTTGVTHLLHKSGSPAEPKNYRPITCLSTVYKLLTSILRTKINTHVDNNSIMSTSQNGCRNGSRGTKELLLIDMAISQQVRRARKDLSTCWIDYKKAYDSVPHSWLKRVLELYKIDATLRAFLESCMGQWRTVLRYPGCRQIQGNDEPVWIKRGIFQGDSLSPLWFCLALNPVSTLLENSGLGYRLRKDGQVISHLLYMDDLKLFAPNKLQLMELLKVTETFSSAIGMEFGVDKCAVMYVKRGKIMGSEGLQLSDSIHLRSLSSSESYKYLGMSEALGINVTDMKQSLKERFFGRLKKVLNSLLSGGNKVRAFNGWVMPVLMYSFGILKWTQTELDALDRRVRTLLTENRMHHPRSSVMRLYIPRKCGGRGFLNAKTLHNREVCSLREYFLKADVGMHRDVVAVDKGLTPLSMAKENWRKPVVLTTDDRKKEWQGKELHGRFYRALHGPDVDFLASVSWLRFGDLFGETEGFVCAIMDEVMLTDNYRKYIMKDGTVDVCRACHCPGESIRHIISGCSRLANGEYLHRHNQVARIIHQQLALKFKLVESEVPYYKYVPDPVLVKDHVTLYWDQSIITDRTIVANKSYIVVIDRSARRVMIIDVTIPHDENLVKAEKEKQMKYLDLAHEVRDMWNMNSVIIVPIVVTANGLIAKSLDEHLSKLSLGGWIKGLIQKAVLLDTARIVRRFLSLQPYPPVTWTLLPTPADPYFLYF

SEQ ID NO: 29442 - protein, 962 aa, Xestia c-nigrum
MHKKNRALVCALDSQLKNIFESSEDLVDTHSILFCGAVAACRLANVKFPNCDIAIRPKPAVPAWQRRIERRIDGARVLIGKLYCFREGNTRPRVMRFVRRAFSGTEISPQEYMSRVTERIDFLKQKVYAWASRIRRYKRRVDRYSQNRMFQSDERWVYRAWERPQQNMTDVCRPDDAATSSFWRSIWSVPVCHSEADWMRDVERVCEPIPTMEPILITPLDIARAVRPLPNWKSPGPDGLHNFWLKWFSSSHTCLASQFQSSLESGSLPQFLTTGVTHLLHKSGSPAEPKNYRPITCLSTVYKLLTSILRMKINTHVDSNSIMSASQNGCRNGSRGTKELLLIDMAISLQVRRARKDLSICWIDYKKAYDSVPHSWLKRVLELYKIDATLRAFLESCMGQWRTVLRYPGCRQIQGNDEPVWIKRGIFQGDSLSPLWFCLALNPVSTLLENSGLGYRLRKDGQVISHLLYMDDLKLFAPNKLQLMELLKVTETFSSAIGMEFGVDKCAVMYVKRGKIMGSEGLQLSDSIHLRSLSSSESYKYLGMSEALGINVTDMKQSLRERFFGRLKKVLNSLLSGGNKVRAFNGWVMPVLMYSFGILKWTQTELDALDRRVRTLLTENRMHHPRSSVMRLYIPRKCGGRGFLNAKTLHNREVCSLREYFIKADVGMHRDVAAVDKGLTPLSMAKENWRKPVVLTTDDRMKEWQGKELHGRFYRALHGPDVDFLASVSWLRFGDLFGETEGFVCAIMDEVMLTNNYRKYIMKDGTVDVCRACHLPGESIRHIISGCSRLANGEYLHRHNQVARIIHQQLALNFNLVELEVPYYKYVPDPVLVKDHVTLYWDQSIITDRTIVANKPDIVVIDRSARRVMIIDVTIPHDENLVKAEKEKQIKYLDLAHEVRDMWNMDSVIIVPIVVSANGLIAKSLDEHLSRLSLGGWIKGLIQKAVLLDTARIVRRFLSLQP

SEQ ID NO: 29443 - protein, 1199 aa, Xestia c-nigrum
MITRAASRRALIPSPDSSLSSASPPPDPGSPVSPVAAVASSSSDEYFSPPTSPTPVRRAGRGRPPKGLGLRGQQAPSRVPATGGCVQRMKWTQLMNENVMRAYYGSTEGGTNLTAYRVRMLSLFQDLEPTVNASAQRLSDQVRVIQRNHLLDGAALDRLRSEVLSNRIILTPAQTAVQASSIDANPPRSNPAVVEEDDRAATVSSQCNDRLRSALEDALHEYRSTSAELRPRLPRLPMHKKNRALVYALDSQLKNVFESSEDLVDTHSILFCGAVAACRLANVKFPNCDLATRPKPAVPAWQRRIERRIDGARVLIGKLHCFREGNTRPRVMRFVRRAFSGTEISPQEYMSRVTERIDFLKQKVYAWASRIRRYKRRVDRYSQNRMFQSDERWVYRAWERPQQNMTDVCRPDDAATSSFWRSIWSVPVCHSEADWMRDVERVCEPIPTMEPILITPLDIARAVRPLPNWKSPGPDGLHNFWLKWFSSSHTCLASQFQSSLESGSLPQFLTTGITHLLHKSGSPAEPKNYRPITCLSTVYKLLTSILRTKINTHVDSNSIMSASQNGCRNGSRGTKELLLIDMAISQQVRRARKDLSTCWIDYKKAYDSVPHSWLKRVLELYKIDATLRTFLESCMGQWRTVLRYPGFRQIQGNDEPVWIKRGIFQGDSLSPLWFCLALNPVSTLLENSGLGYRLRKDGQVISHLLYMDDLKLFAPNKLQLMELLKVTETFSSAIGMEFGVDKCAVMYVKRGKIMGSEGLQLSDSIHLRSLSSSESYKYLGMSEALGINVTDMKQSLKERFFGRLKKVLNSLLSGGNKVRAFNGWVMPVLMYSFGILKWTQTELDALDRRVRTLLTENRMHHPRSSVMRLYIPRKCGGRGFLNAKTLHNREVCSLREYFLKVEVGMHRDVVAVDKGLTPLSMAKENWRKPVVLTTDDRKKEWQGKELHGRFYRALHGPDVDFLASVSWLRFGDLFGETEGFVCAIMDEVMLTNNYRKYIMKDGTVDVCRACHRPGESIRHIISGCSRLANGEYLHRHNLVARIIHQQLALKYNLVESEVPYYRYVPDPVLVNGSITLYWDQSIITDRTVIANRPDIVVMDRSERRAMIVDITVPHDENLVKAEKDKQIKYLDLAREVIDMWEVDTAIIVPIVVSAHGLIAKSLDQHLRRLSLGSWIKGLIQKAVLLDTARLVRRFLSLEP

SEQ ID NO: 29444 - protein, 1110 aa, Sesamia nonagrioides
MRWSQTMNENVMRAYYGATEGGTNLTAYRERMLSLFQALEPTVNVSAQRLSDQVRVIQRNHRLDDTALDRLRSEVLSNQIAPTLTQTAALASIIDAVPPRSNRVEEEDDGVETVSSQYNDRLRSTLEDAFREYRFTPTDLRPRLPRLPMHKKNRALVSALDSQLKNVFESSEDLIDTHSILFCGAVAACRLANIKFPNCDEANRPRPAVPAWQHRIERRIDGARVLIGKLYCFREGNTRPRVMRFVRQAFSGTGIGPREYISHVTERIDFLKQKVCAWASRIRRYKRRVDRYTQNRMFQSDERWVYRAWERTEQNEADVCRPDDAATSAFWRSIWSVPVCHAEGDWIQDVEQVCEMIPEMDTILITPIDVATAVRSLPNWKSPGPDGLHNFWLKWLSSSHTCLASQFQSSLESGSLPQFLTTGITHLLHKSGSTAEPNNYRPITCLPTVYKVLTSILKAKINKHLDSNSIMSVSQNGCRSGSRGTKELLLIDMAISQQVRRSRKDLSTCWIDYKKAYDSVPHTWLMRVLELYKVNATLRTFLRSCMGQWKTVLRYPGSRRIQGNDEPVWIKRGIFQGDSLSPLWFCLALNPLSTLLEDSGLGYRLRRGGQVISHLLYMDDLKLFAPNKLHLMKLLNVTETFSSGIKMEFGVDKCAVMHVKRGQIMESEGITLPDSIHLRSLSSVESYKYLGMSEALGINDADMKQSLKERFFGRLKKVLKSLLSGGNKVRAFNGWVMPVLMYSFGILKWTQTELDALDRRVRTLLTANRMHHPRSSVMRLYIPRKCGGRGFLNAKTLHNREVCSLREHFLKTVVGMHHDVVTVDKGLTPLSMAKENWHKPIILTTNDRKLIWQSKELHGRFYRALHEPDVDFLASVSWLRFSDLFGETEGFVCAIMDEVILTNNYRRYIMKDGTIDVCRACHHPGESIRHIISGCSRLANGEYLHRHNQVARIIHQQLALKYKLVDSEVPYYKYVPDPVLENDHATLYWDRSIITDRTIVANKPDIVVIDRLARLAMIVDVTIPHDGNLVKAEKEKQIKYLDLAHEVVDMWNVNSAVIVPIVVSANGLIAKSLDQHLLRLSLGSWIKGLIQKAVLLDTARIVRRFLSLEP

SEQ ID NO: 29445 - protein, 868 aa, Sesamia nonagrioides
MRFVRQAFSGTGISPREYINHLTERIDFLKQKVCAWASRIRRYKRRVDRYTQNRMFQSDERWVYRAWERPEQNEADVCRPDDATTSAFWRGIWSVSVCHTEGNWIQNVEQVCEIIPEMDTILITPSDVAAAVRSLPNWKSPGPDGLHNFWLKWLSSSHTCLASQFQSSLESGSLPQFLTTGITHLLHKSGSTAEPKNYRPITCLPTVYKVLTSILKAKINKHLNSNSIMSVSQNGCKSGSRGTKELLLIDMAISQQVRRSRKDLSTCWIDYKKAYDSVPHTWLMRVLELYKVNATLRTFLRSCMGQWKTVLRYPGSRRIQGNDEPVWIKRGIFQGDSLSPLWFCLALNPLSTLLEDSGLGYRLKRGGQVISHLLYMDDLKLFAPNKLHLMKLLNVTETFSSGIKMEFGVDKCAVMHVKRGQIMESEGITLPDSIHLRSLSSFESYKYLGMSEALGINDADMKQSLKERFFGRLKKVLKSLLSGGNKVRAFNGWVMPVLMYSFGILKWTQTELDALDRRVRTLLTANRMHHPRSSVMRLYIPRKCGGRGFLNAKTLHNREVCSLREHFFKTVVGMHHDVVTVDKGLTPLSMAKENWHKPIILTTDDRKLIWQSKELHGRFYRALHEPDVDFLASVSWLRFSDLFGETEGFVCAIMDEVILTNNYRRYIMKDGTIDVCRACHHPGESIRHIISGCSRLANSEYLHRHNQVARIIHQQLALKYKLVDSEVPYYKYVPDPVLENDHVTLYWDRSIITDRTIVANKPDLVVIDRLARLAMIVDVTIPHDGNLVKAEKEKQIKYLDLAHEIVDMWNVNSAVIVPIVVSANGLIAKSLDQHLLRLSLGSWIKGLIQKAVLLDTARIVRRFLSLEP

SEQ ID NO: 29446 - protein, 814 aa, Sesamia nonagrioides
MFQSDERWVYRAWERPEQNEADECRPDDATTSAFWRGIWSVSVCHTEGDWTQDVEQVCETIPEMDNILITPLDVATAVRSLPNWKSPGPDGLHNFWLKWLSSSHTCLASQFQSSLESGSLPQFLTTGITHLLHKSGSTAEPKNYRPITCLPTVYKVLTSILKAKINNHLDSNSIMSVSQNGCRSGSRGTKELLLIDMAISQQVRRSRKDLSTCWIDYKKAYDSVPHTWLMRVLELYKINATLRTFLRSCMGQWKTVLRYPGSRQIQGNDEPVWIKRGIFQGDSLSPLWFCLALNPLSTLLEDSGLGYRLKRGGQVISHLLYMDDLKLFAPNKLHLMKLLNVTETFSSGIKMEFGVDKCAVIHVKRGQIMESEAITLPDSIHLRSLSSFESYKYLGMSEALGINDADMKQSLKERFFGRLRKVLNSLLSGGNKVRAFNGWVMPVLMYSFGILKWTQTEIDALDRRVRTLLTANRMHHPRSSVMRLYIPRKCGGRGFLNAKTLHNREVCSLREYFLKTVVGMHHDVVTVDKGLTPLSMAKENWHKPIILTTDDRRMVWQSKELHGRFYRALHGPDVDFLASVSWLRFGDLFGETEGFVCAIMDEVILTNNYRRYIMKDGTIDVCRACHHPGESIRHIISGCSRLANSEYLHRHNQVARIIHQQLALKYKLVDSEVPYYKYVPDPVLENDHVTLYWDRSIITDRTIVANKPDIVVIDRLARLAMIVDVTIPHDGNLVKAEKEKQMKYLDLAHEVVDMWNVNSAVIVPIVVSANGLIAKSLDQHLLRLSLGSWIKGLIQKAVLLDTARIVRRFLSLEP

SEQ ID NO: 29447 - protein, 1203 aa, Sesamia nonagrioides
MLTRSAARQRARPPSPDSLLSSASPPPVSSATVNAVTTPAAAVALSSSDEYFSPPTSPTPVRRQGRGRPPKSLGLRGHPAPSRVPAAGGCVQRMRWSQTMNENVMRAYYGATEGGTNLTAYRERMLSLFQALEPTVNVSAQRLSDQVRVIQRNHRLDDTALDRLRSEVLSNQIAPTLTQTAALASIIDAVPPRSNRVEEEDDRVETVSSQYNDRLRSTLEDAFREYRSTPTDLRPRLPRLPMHKKNRALVSALDSQLKNVFESSEDLIDTHSILFCAAVAACRLANIKFPNCDEANRPKPAVPAWQHRIERRIDGARVLIGKLYCFREGNTRPRVMRFVRQAFSGTGISPREYLTNVTERIDFLKQKVCAWANRIRRYKRRVDRYTQNRMFQSDERWVYRAWERSELNEADVCRPDVAATSAFWRSIWSVPVCHAEGDWIQNVEQVCEMIPEMDSILITPIDVATAVRSLPNWKSPGPDGLHNFWLKWLSSSHTCLASQFQSSLESGSLPQFLTTGITHLLHKSGSTAEPNNYRPITCLPTVYKVFTSILKAKINKHLDSNSIMSVSQNGCKSGSRGTKELLLIDMAISQQVRRSRKDLSTCWIDYKKAYDSVPHTWLMRVLELYKINATLRTFLRSCMGQWKTVLRYPGSRRIQGNDEPVWIKRGIFQGDSLSPLWFCLALNPLSTLLEDSGLGYRLKRGGQVISHLLYMDDLKLFAPNKLHLMKLLNVTETFSSGIKMEFGVDKCAVMHVERGQIMESEGITLPDSIHLRSLSSFESYKYLGMSEALGINDADMKQSLKERFFGRLKKVLISLLSGGNKVRAFNGWVMPVLMYSFGILKWTQTELDALDRRVRTLLTANRMHHPRSSVMRLYIPRKCGGRGFLNAKTLHNREVCSLREHFLKTVVGMHHDVVTVDKGLTPLSMAKENWHKPIILTTDDRKMIWQSKELHGRFYRALHGPDVDFLASVSWLRFGDLFGETEGFVCAIMDEVILTNNYRRYIMKDGTIDVCRACHHPGESIRHIISGCSRLANSEYLHRHNQVARIIHQQLALKYKLVDSEVPYYKYVPDPVLENDHVTLYWDRSIITDRTIVANKPDIVVIDRLARLAMIVDVTIPHDGNLVKAEKEKQMKYLDLAHEVVDMWNVNSAVIVPIVVSANGLIAKSLDQHLLRLSLGSWIKGLIQKAVLLDTARIVRRFLSLEP

SEQ ID NO: 29448 - protein, 1204 aa, Apamea monoglypha
MLKMLTRSAARARLLPPDSSLSPAPPPLESSPIESAVTPAVAVASSSSDEYFSPPTSPTPVRRQGRGRPPRSLGLRGHPAPSRVPAAGGCVQRMRWTQSMNENVMRAYYGSTEGGINLTAYRERLLSLFQELEPTVNVSAQRLSDQVRVIQRNHRLDDIALDRLRSEVLSNQIVSTLAQTAAQASTIDAIPPRSNHGEEEDDDRVDTVSSQCNVRLRSALEDAFREYRSTPTELRPRIPRLPMHKKNRALVCALDSQLKNFFESSEDLVDTHSILYCAAVAACRLANVKFPNCDGATRPKPAVPAWQYRIERRIDGARVLIGKLYCFREGNTRPRVMRFVRQAFSGTGISPREYISNVTERIDFLKQKVCAWASRIRRYKRRVDRYTQNRMFQSDERWVYRAWERPEQNVTDVCRPDDANTNAFWRSIWSVPVYHAEGGWMQDIERVCETIPEMDPVLITPLDVARAVRPLPNWKSPGPDGLHNFWLKWLISSHSRLASQFQSSLESGSLPQFLTTGVTHLLHKSGSPAEPKNYRPITCLSTVYKLLTSILRAKINTHIDNNSIMSASQNGCRNGSRGTKELLLIDMAISQQVRRSRKDLSTCWIDYKKAYDSVPHAWLMRVLELYKIDATLRTFLESCMGQWRTVLRYPGCRQIQGNDEPVWIKRGIFQGDSLSPLWFCLALNPLSTLLEDSGLGYRLKRGGQVISHLLYMDDLKLFAPNKLRLLELLKVTETFSSAIRMEFGVDKCAVMHVKRGEIMESEGIQLSDSIHLRSLSSSESYKYLGMSEALGINVADMKQTLRERFFGRLKKVLVSLLSGGNKVRAFNSWVMPVLMYSFGILKWTQTELDALDRRVRTLLTANRMHHPRSSVMRLYIPRKCGGRGFLNAKTLHNREVCNLREYFIKAEVGMHRDVVAVDKGLTPLSMAKENWRKPVILTTDDRKEVWQSKELHGRFYRALHEPGVDFLASVSWLRFGDLFGETEGFVCAIMDEVVLTNNYRRYIMKDGTVDVCRACHRPGESIRHIISGCSRLANGEYLHRHNQVARIIHQQLALKYKLVDSEVPYYKYVPDPVLENDHVTLYWDRSIITDRTIVANKPDIVVIDRLARRTMIVDVTIPHDGNLVKAEKEKQIKYLDLAHEVVDMWNVSSAIIVPIVVSANGLMAESLDQHLSRLSLGGWIKGLIQKAVLLDTARIVRRFLSLEP

SEQ ID NO: 29449 - protein, 1200 aa, Mythimna ferrago
MLTRSATRRARHPPTGSLLSSASPPPDPGSPVSPVAAVASSSSDEYFSPPTSPTPVRRPGRGRPPNGLGPRGQQAPSRVPAAGGCVQRMKWTQSINENVMRAYYRATEGGTNLTAYRVRMLSLFQELEPSVNVTTQRLSDQVRVIQRNHRLDDAALDRLRSEVLSNRIISTPIQTQTAAPRATDTIMPRPNYGDDEADDRVVTVSSQCNDQLRSALEDALREYRSTPIALRPRLPRLPMHKKNRALVCALDSLLENVFESSVNLVDTHSILYCGAIAACRLANVKLPSCDGATRPKPAVPAWQCRIERRIDEARALIGKLYCFREGNTRPRVMRYVRRAFSGTGVSPREYLAHVTERIDFLKQKVCAWANRIRRYKRRVDRYSQNRMFQSDERWVYRDWERPEQSVTDVLRPDVAATNEFWRSIWSVPVCHTEGGWMRDIERVCEAIPEMEKVFISPIDVARAVRPLPNWKSPGPDGLQNFWLKWYSSSHALLASQFQSSLESGSLPQFLTTGVTHLLHKTGSTAEPKNYRPITCLSTVYKLLTSILRTKINNHIENNSIMSASQNGCRNGSRGTKELLLIDMAISQQVRRSRKDLSTCWIDYKKAYDSVPHTWLMRVLELYKIDATLRTFLESCMGEWNTVLRYPGCRSIRGDDEPIWIKRGIFQGDSLSPLWFCLALNPLSTLLEDSGLGYRLRRGGQVLSHLLYMDDLKLIAPNKLQLMELLKVTETFSSAIRMEFGVDKCAVMHVKRGEIMESEGIQLSDSIHLRSLSSTETYKYLGMSEALGINVTDMKQSLRERFFSRLKKVLNSLLSGGNKVRAFNGWVMPVLMYSFGILKWTQTELDALDRRVRTLLTANRMHHPRSSVMRLYIPRKCGGRGFLNAKTLHNREVCSLREYFQKTDVGMHRDVVAVDKGLTPLSMAKENWRKPVVLTTDDRREVWKNKELHGRFYRALHEPDVDFGASVAWLRFSNLFGETEGFICAIMDEVILTNNYRRYIMKDGTVDVCRACHRPGESIRHIISGCSRLANGEYLHRHNQVARIIHQQLALKYKLMESEVPYYRYVPDPVLENDHVTLYWDRSIITDRTIIANKPDIVVIDRLARRAMIVDVTIPHDENLVKAEKEKKIKYLDLAHEVVDLWNVDSAVIVPIVVSVNGLIAKSFDDHLSKLALRGWIKGLIQKAVLLDTARIVRRFLSLEP

SEQ ID NO: 29450 - protein, 1200 aa, Mythimna ferrago
MLTRAAAQRARIPPPDSLLSSASPPPDPGSSVSPAAAVASSSSDEYFSPPTSPTPVRRPGRGRPPNGLGFRGQPAPSRVPAAGGCVQRMKWTQSMNENVMRAYYGATEGGTNLTAYRVRMLSLFQDLEPTVNVSAQRLSDQVRVIQRNHRLDDAALDRLRSQVLSNPIVSTPQQIQTVGPSTSVTTTSRYDHVEDEADDRVDRVSSQCNDRLRSALEDALREYRSTPTELRPRLPRLPMHKKNRALVCALDSLLKNVFESSDSLLDTHSILYCGAVAACRLANVKFPCYGVATRPTPAAPAWQCRIERRIDEARALIGKLYCFREGNTRPRVMRFVRRAFSGTEISPREYMSRVTERIDFLKQKVCAWANRIRRYKRRVDRYSQNRMFQSDERWVYRAWERPGQNVTDGFRPDRVATNTFWRSIWSEPVCHNEGGWMRDVERVCEAIPEMDKVFITPLDVARAVRPLPNWKSPGPDGLQNFWLKWYSSSHAILASQFQSSLESGSLPQILTTGTTHLLHKTGSTADPKNYRPITCLSTVYKLLTSILRVKITLHIEKNSIMFASQNGCRNGSRGTKELLLIDMAISQQVRRSRKDLSTCWIDYKKAYDSVPHTWLMKVLDLYKIDATLRTFLESCMRQWKTVLRYPGCRPIQGNDEPIWIRRGIFQGDSLSPLWFCLALNPLSTLLEDSGLGYRLRRGGQVLSHLLYMDDLKLFAHNNSQLMELLKVTETFSSAIRMEFGVDKCAVMHVRRGEIVESEGIQLSDSIHLRSLSSTETYKYLGMSEALGINVADMKQTLKERFFGRLKKVLNSLLSGGNKVRAFNGWVMPVLMYSFGILKWTQTQLDALDRRVRTLLTANRMHHPRSSVMRLYIPRKCGGRGFLNAKTLHNREVCSLREYFLKTDVGMHRDVVAVDKGLTPLSMAKENWRKPVVLTTDDRKEVWKGKELHGRFFRALHEPDVDFSASVAWLRFSNLFGETEGFVCAIMDEVILTNNYRRHIMKDGTVDVCRACHRPGESIRHIISGCSRLANGEYLHRHNQVARILHQQLALKYNLVDSEVPYYRYVPDPVLENDHVTLYWDRSIITDRTIVANKPDIVVIDRLARRAMIVDVTIPHDENLVKAEKEKQIKYLDLAHEVVDMWNVDSAIIVPIVVTANGLIAKSFDDHLSKLSLHGWIKGLIQKAVLLDTARIVRRFLSLEP

SEQ ID NO: 29451 - protein, 1200 aa, Mythimna ferrago
MLTRAAAQRARLPPADSLLSSASPPPDPGSSVSPTAAVASSSSDEYFSPPTSPTPVRRPGRGRPPNGLGFRGQPAPSRVPAAGGCMQRMKWTQSMNENVMRAYYGSTEGGTNLTAYRVRMLSLFQDLEPTVNVSAQRLSDQVRVIQRNRRLDDAALDRLRSQVLSNPIVSTPQQIQTVGPSTSVTTTPRYDHVVDEADDRVDRVSSQCNDRLRSALEDALREYRSTPTELRPRLPRLPMHKKNRALVCALDSLLKNVFESSDSLLDTHSILYCGAVAACRLANVKFPCYGVATRPTPAAPAWQCRIERRIDEARALIGKLYCFREGNTRPRVMRFVRRAFSGTEISPREYMSRVTERIDFLKQKVCAWANRIRRYKRRVDRYSQNRMFQSDERWVYRAWERPGQNVTDGFRPDSVATNTFWRSIWSEPVCHNEGGWMRDVERVCEAIPEMDKVFITPLYVARAVRPLPNWKSPGPDGLQNFWLKWYSSSHAILASQFQSSLESGSLPQILTTGTTHLLHKTGSTADPKNYRPITCLSTVYKLLTSILRVKIALHIEKNSIMFASQNGCRNGSRGTKELLLIDMAISQQVRRSRKDLSTCWIDCKKAYDSVPHTWLMKVLELYKIDATLRTFLESCMRQWKTVLRYPGCRPIQGNDEPIWIKRGIFQGDSLSPLWFCLALNPLSTLLEDSGLGYRLRRGGQVLSHLLYMDDLKLFAHNNSQLMELLKVTETFSSAIRMEFGVDKCAVMHVRRGEIVESEGIQLSDSINLRSLSSTETYKYLGMSEALGINVADMKQTLKERFFGRLKKVLNSLLSGGNKVRAFNGWVMPVLMYSFGILKWTQTELDALDRRVRTLLTANQMHHPRSSVMRLYIPRKCGGRGFLNAKTLHNREVCSLREYFLKTDVGMHRDVVAVDKGLTPLSMAKENWRKPVVLTTDDRKEVWKGKELHGRFYRALHEPDVDFSASVAWLRFSNLFGETEGFVCAIMDEVILTNNYRRHIMKDGTVDVCRACHRPGESIRHIISGCSRLANGEYLHRHNQVARILHQQLALKYNLVDSEVPYYRYVPDPVLENDHVTLYWDRSIITDRTIVANKPDIVVIDRSARRAMIVDVTIPHDENLVKAEKEKQIKYLDLAHEVVDMWNVDSAIIVPIVVTANGLIAKSFDDHLSKLSLHGWIKGLIQKAVLLDTARIVRRFLSLEP

SEQ ID NO: 29452 - protein, 1200 aa, Mythimna ferrago
MLTRAAAQRARLPPPDSLLSSASPPPDPGSTVSPAAAVASSSSDEYFSPPTSPTPVRRPGRGRPPNGLGFRGQPAPSRVPAAGGCVQRMKWTQSMNENVMRAYYGSTEGGTNLTAYRVRMLSLFQDLEPTVNVSAQRLSDQVRVIQRNHRLDDAALDRLRSQVLSNPIVSTPQQIQTAGPSTSVTTTPRYVHVEDEADDRVDRVSSQCNDRLRSALEDALREYRSTPTELRPRLPRLPMHKKNRALVCALDSLLKNIFESSDNLLDTHSILYCGAVAACRLANVKFPCYGVATRPTPAAPAWQCRIERRIDEARALIGKLYCFREGNTRPRVMRFVRRAFSGTEISPREYMSRVTERIDFLKQKVCAWANRIRRYKRRVDRYSQNRMFQSDERWVYRAWERPGQNVTDGFRPDSVATNTFWRSIWSEPVCHNEGGWMRDVERVCEAIPEMDKVFITPLDVARAVRPLPNWKSPGPDGLQNFWLKWYSSSHAILASQFQSSLESGSLPQILTTGTTHLLHKTGSTADPKNYRPITCLSTVYKLLTSILRVKITLHIEKNSIMFASQNGCRNGSRGTKELLLIDMAISQQVRRSRKDLSTCWIDYKKAYDSVPHTWLMKVLELYKIDATLRTFLESCMRQWKTVLRYPGCRPIQGNDEPIWIKRGIFQGDSLSPLWFCLALNPLSTLLEDSGLGYRLRRGGQVLSHLLYMDDLKLFAHNNSQLMELLKVTETFSSAIRMEFGVDKCAVMHVRRGEIVESEGIQLSDSIHLRSLSSTETYKYLGMSEALGINVVDMKQTLKERFFGRLKKVLNSLLSGGNKVRAFNGWVMPVLMYSFGILKWTQTELDALDRRVRTLLTANRMHHPRSSVMRLYIPRKCGGRGFLNAKTLHNREVCSLREYFLKTDVGMHRDVVAVDKGLTPLSMAKENWRKPVVLTTDDRKEVWKGKELHGRFFRALHEPDVDFSASVAWLRFSNLFGETEGFVCAIMDEVILTNNYRRHIMKDGTVDVCRACHRPGESIRHIISGCSRLANGEYLHRHNQVARILHQQLALKYNLVDSEVPYYRYVPDPVLENDHVTLYWDRSIITDRTIVANKPDIVVIDRLARRAMIVDVTIPHDENLVKAEKEKQIKYLDLAHEVVDMWNVDSAIIVPIVVTANGLIAKSFDDHLSKLSLHGWIKGLIQKAVLLDTARIVRRFLSLEP

SEQ ID NO: 29453 - protein, 1201 aa, Hydraecia micacea
MLTRLAAKRARLTPPDSSLSSAPPPPESSPIESAVTPTVAVASSSSDEYFSPPTSPTPVRRQGRGRPPRSLGLRGQPAPSRVPATGGCVQRMRWTQFMNENVMRAYYGSTEGGTNLTAYRDRMLSLFQELEPTVNVSAQRLSDQVRVIQRNHRLDDIALDRLRSEVLSNHIVSTPAQTAAQTSTVDAIPPRSNHVEEEDDRVDTVSSQCNVRLRSALEDAFHEYRLTPTELRPRLPRLPMHKKNRALVCALNSQLKNFFESSEDLVDTHSILYCATVAACRLANVKFPICDGATRPKPAVPAWQHRIERRIDGARVLIGKLYCFREGNTRPRVMRFVKRAFSGTGISPREYISHITERIDFLKQKVCAWASRIRRYKRRIDRYTQNRMFQSDERWVYRAWERPEQNMTDVCRPDDATTSAFWRSIWSVPVCHTEAGWIQDVERVCETVPEMETILITPLDVARAVRPLPNWKSPGPDGLHNFWLKWLNSSHTCLASQFQSSLESGSLPQFLTTGVTHLLHKSGSPAEPKNYRPITCLSTVYKLLTSILRAKINTHIENNSIMSASQNGCRNGSRGTKELLLIDMAISQQVRRSRKDLSTCWIDYKKAYDSVPHTWLMRVLELYKIDATLRTFLESCMGQWKTVLRYPGCRQIQGNDEPVWIKRGIFQGDSLSPLWFCLALNPLSTLLEDSSLGYRLRRGGQVISHLLYMDDLKLFAPTGLHLMELLKVTETFSSAIRMEFGVDKCAVMHVKRGEIMESEGIQLSDSINLRSLSSSESYKYLGMSEALGINVTDMKQSLKERFFCRLRKVLISLLSGGNKVRAFNGWVMPVLMYSFGILKWTQTELDALDRRVRTLLTANRMHHPRSSVMRLYIPRKCGGRGFLNAKTLHNREVCSLREYFLKAEVGMHRDVVAVDKGLTPLSMAKENWRKPVVLTTDDRKKVWQSKELHGRFYRALHEPGVDFLASVSWLRFGDLFGETEGFVCAIMDEVILTNNYRRHIMKDGTVDVCRACHRPGESIRHIISGCSRLANGEYLHRHNQVARIIHQQLALKYKLVDSEVPYYKYVPDPVLENDHVTLYWDRSIITDRTIVANKPDIVVIDRLARRTMIVDVTIPHDGNLVKAEKEKQMKYLDLAHEVVDMWNVSSAVIVPIVVSANGLMAEGLDEHLSRLSLGGWIKSLIQKAVLLDTARIVRRFLSLEP

SEQ ID NO: 29454 - protein, 868 aa, Ochropleura plecta
MRFVRRAFSGTGISPQEYMSRTTERIDFLKQKVYAWANRIQRYKRRVDRYSQNRMFRSDERWVYRAWERPEQSVTDVCRPDDVATSSFWHSIWSVRVCHTEAGWMRDVERVCETIPEMEPILITSLDIASAVRPLPNWKSPGPDGLHNFWLKWLSSSHTRLASQFQSCLESGSLPQFLTTGVTHLLYKSGSPAEPKNYRPITCLSTVYKLLTSILRAKINSHIVKNSIISASQNGCRNGSRGTKELLLIDMAISQQVRRSRKDLSTCWIDYKKAYDSVPHTWLKRVLELYKIDTTLRTFLESCMGQWRTVLRYPGCRQIQGNDEPVWIKRGIFQGDSLSPLWFCLALNPLSTLLEDSGLGYRLRRGGQVISHLFYMDDLKLFAPNKLRLMELLKVTETFSNAIRMEFGVDKCAVMYVKRGEIMESEGIHLSDSIHLRSLSSSESYKYLGMSEALGINVADMKQLLRERFFGRLKKVLKSLLSGGNKVRAFNSWVMPVLMYSFGILKWTQTELDALDRRVRTLLTANRMHHPRSSVMRLYIPRKCGGRGFLNAKTLHNREVCSLREYFLKTDVGMHRDVVAVDKGLTPLSMAKENWRKPVVLTTDYRKEVWQGKELHGRFYKALHGPDVDFLASVSWLRFGDLFGETEGFVCAIMDEVMLTNNYRKYIMKDGTVDVCRACHRPGESIRHIISGCSRLANGEYLHRHNQVARIIHQQLALKYNLVESEVPYYKYVPDPVLEKDHVTLYWDRSIITDRTIVANKPDIVVIDRSARRVMIIDVTIPHDENLVKAEKEKQLKYLDLAHEVVDMWNVNSAIIVPIVITANGLIAKSLDEHLSKLSLGGWIKGLIQKAVLLNTARIVRRFLSLEP

SEQ ID NO: 29455 - protein, 962 aa, Ochropleura plecta
MHKKNRALVCALDSQLKNLFESSEDLVDTHSILYCGAVAVCRLANVKFPNCDVATRPKPSVPAWQCRIERRIDEARALIGKLYCFREGNTRPRVMRFVRRAFSGTGISPQEYMSRTTERIDFLKQKVYAWANRIQRYKRRVDRYSQNRMFRSDERWVYRAWERPEQSVTDVCRPDDVATSSFWHSIWSVRVCHTEAGWMRDVERVCETIPEMEPILITSLDIASAVRPLPNWKSPGPDGLHNFWLKWLSSSHTRLASQFQSCLESGSLPQFLTTGVTHLLYKSGSPAEPKNYRPITCLSTVYKLLTSILRAKINSHIVKNSIISASQNGCRNGSRGTKELLLIDMAISQQVRRSRKDLSTCWIDYKKAYDSVPHTWLKRVLELYKIDTTLRTFLESCMGQWRTVLRYPGCRQIQGNDEPVWIKRGIFQGDSLSPLWFCLALNPLSTLLEDSGLGYRLRRGGQVISHLFYMDDLKLFAPNKLRLMELLKVTETFSNAIRMEFGVDKCAVMYVKRGEIMESEGIHLSDSIHLRSLSSSESYKYLGMSEALGINVADMKQLLRERFFGRLKKVLKSLLSGGNKVRAFNSWVMPVLMYSFGILKWTQTELDALDRRVRTLLTANRMHHPRSSVMRLYIPRKCGGRGFLNAKTLHNREVCSLREYFLKTDVGMHRDVVAVDKGLTPLSMAKENWRKPVVLTTDYRKEVWQGKELHGRFYKALHGLDVDFLASVSWLRFGDLFGETEGFVCAIMDEVMLTNNYRKYIMKDGTVDVCRACHRPGESIRHIISGCSRLANGEYLHRHNQVARIIHQQLALKYNLVESEVPYYKYVPDPVLEKDHVTLYWDRSIITDRTIVANKPDIVVIDRSARRVMIIDVTIPHDENLVKAEKEKQLKYLDLAHEVVDMWNVNSAIIVPIVITANGLIAKSLDEHLSKLSLGGWIKGLIQKAVLLNTARIVRRFLSLEP

SEQ ID NO: 29456 - protein, 962 aa, Ochropleura plecta
MHKKNRALVCALDSQLKNLFESSENLVDTHSILYCGAVAVCRVANVKFQNSDVATRPKPSVPVWQCRIERRIDEARVLIGKLYCFREGNTRPRVMRFVRRAFSGTGISPQEYLSCTTERIDFLKQKVYAWANRIRRYKRRVDRYSQNRMFRSDERWVYRAWERPEQSVTDVCRPDDVATSSFWHSIWSVPVCHTEADWMRDVERVCETIPEMEPILITSIDIASAVRPLPNWKSPGPDGLHNFWLKWLSSSHTRLASQFQSCLESGSLPQFLTTGITHLLYKSGSPAEPKNYRPITCLSTVYKLLTSILRAKINSHIDKNSIMSASQNGCRNGSRGTKELLLIDMAISQQVRRSRKDLSTCWIDYKKAYDSVPHTWLKRVLELYKIDATLRAFLESCMGQWRTVLRYPGCRLIQGNDEPVWIKRGIFQGDSLSPLWFCLALNPLSTLLEDSGLGYRLRRGGKVISHLLYMDDLKLFAPNKLRLMELLKVTETFSNAIRMEFGVDKCAVMYVKRGEIMESEGIQLSDSIHLRSLSSSESYKYLGMSEALGINVADMKQLLRERFFGRLKKVLKSLLSGGNKVRAFNSWVMPVLMYSFGILKWTQTELDALDRRVRTLLTGNRMHHPRSSVMRLYIPRKCGGRGFLNAKTLHNREVCSLREYFLKTDVGMHRDVVAVDKGLTPLSMAKENWRKPVVLTTNDRKVVWQGKELHGRFYKALHGPDVDFLASVSWLRFGDLFGETEGFVCAIMDEVMLTNNYRKYIMKDGTVDVCRACHRPGESIRHIISGCSRLANSEYLHRHNQVARVIHQQLALKYNLVESEVPYYKYVPDPVLEKDHVTLYWDRSIITDRTIVANKPDIVVIDRSARRVMIIDVTIPHDENLVKAEKEKQLKYLDLAHEVVDMWNVNSAIIVPIVITANGLIAKSLDEHLSKLSLGGWIKGLIQKAVLLNTARIVRRFLSLEP

SEQ ID NO: 29457 - protein, 962 aa, Ochropleura plecta
MHKKNRALVCALDSQLKNLFESSEDLVDTHSILYCGAVAVCRLANVKFPNCDVATRPKPSVPVWQCRIERRIDEARALIGKLYCFREGNTRPRVMRFVRRAFSGTGISPQEYMSRTTERIDFLKQKVYAWANRIQRYKRRVDRYSQNRMFRSDERWVYRAWERPEQSVTDVCRPDDVATSSFWHSIWSVRVCHTEAGWMRDVERVCETIPEMEPILITSLDIASAVRPLPNWKSPGPDGLHNFWLKWLSSSHTRLASQFQSCLESGSLPQFLTTGVTHLLYKSGSPAEPKNYRPITCLSTVYKLLTSILRAKINSHIVKNSIISASQNGCRNGSRGTKELLLIDMAISQQVRRSRKDLSTCWIDYKKAYDSVPHTWLKRVLELYKIDTTLRTFLESCMGQWRTVLRYPGCRQIQGNDEPVWIKRGIFQGDSLSPLWFCLALNPLSTLLEDSGLGYRLRRGGQVISHLFYMDDLKLFAPNKLRLMELLKVTETFSNAIRMEFGVDKCAVMYVKRGEIMESEGIHLSDSIHLRSLSSSESYKYLGMSEALGINVADMKQLLRERFFGRLKKVLKSLLSGGNKVRAFNSWVMPVLMYSFGILKWTQTELDALDRRVRTLLTANRMHHPRSSVMRLYIPRKCGGRGFLNAKTLHNREVCSLREYFLKTDVGMHRDVVAVDKGLTPLSMAKENWRKPVVLTTDYRKEVWQGKELHGRFYKALHGPDVDFLASVSWLRFGDLFGETEGFVCAIMDEVMLTNNYRKYIMKDGTVDVCRACHRPGESIRHIISGCSRLANGEYLHRHNQVARIIHQQLALKYNLVESEVPYYKYVPDPVLEKDHVTLYWDRSIITDRTIVANKPDIVVIDRSARRVMIIDVTIPHDENLVKAEKEKQLKYLDLAHEVVDMWNVNSAIIVPIVITANGLIAKSLDEHLSKLSLGGWIKGLIQKAVLLNTARIVRRFLSLEP

SEQ ID NO: 29458 - protein, 1207 aa, Ochropleura plecta
MLTRRRAQEQQALPSSPGSSLSSASQPPGRATRVSAVSPVTAVASSSSDEFFSPPSSPPPPPTRQRRGRGRPPAGLGSRGQQAPIRVPAAGGNVSRMRWTSFINANVMRAYYGSTEGGTNLTAYRVRMLSLFQDLEPTINVSAQRLSDQVRVIQRNHLLDDAALDRLRSEVLSNRVILTTPQTAVQASAIDVTQPRSNPAVVEEDDRVATVSSQCNDRLRSALEDALRDYRSTPAELRPRLPRLPMHKKNRALVCALDSQLKNLFESSEDLVDTHSILYCGAVAVCRLANVKLPNCDVATRPKPSVPAWQCRIERRIDEARALIGKLYCFREGNTRPRVMRFVRRAFSGTGISPQEYMSRTTERIDFLKQKVYAWANRIQRYRRRVDRYSQNRMFRSDERWVYRAWERPEQSVTDVCRPDDVATSSFWHSIWSVRVCHTEAGWMRDVERVCETIPEMEPILITSLDIASAVRPLPNWKSPGPDGLHNFWLKWLSSSHTRLASQFQSCLESGSLPQFLTTGVTHLLYKSGSPAEPKNYRPITCLSTVYKLLTSILRAKINSHIVKNSIISASQNGCRNGSRGTKELLLIDMAISQQVRRSRKDLSTCWIDYKKAYDSVPHTWLKRVLELYKIDTTLRTFLESCMGQWRTVLRYPGCRQIQGNDEPVWIKRGIFQGDSLSPLWFCLALNPLSTLLEDSGLGYRLRRGGQVISHLFYMDDLKLFAPNKLRLMELLKVTETFSNAIRMEFGVDKCAVMYVKRGEIMESEGIHLSDSIHLRSLSSSESYKYLGMSEALGINVADMKQLLRERFFGRLKKVLKSLLSGGNKVRAFNSWVMPVLMYSFGILKWTQTELDALDRRVRTLLTANRMHHPRSSVMRLYIPRKCGGRGFLNAKTLHNREVCSLREYFLKTDVGMHRDVVAVDKGLTPLSMAKENWRKPVVLTTDYRKEVWQGKELHGRFYKALHGPDVDFLASVSWLRFGDLFGETEGFVCAIMDEVMLTNNYRKYIMKDGTVDVCRACHRPGESIRHIISGCSRLANGEYLHRHNQVARIIHQQLALKYNLVESEVPYYKYVPDPVLEKDHVTLYWDRSIITDRTIVANKPDIVVIDRSARRVMIIDVTIPHDENLVKAEKEKQLKYLDLAHEVVDMWNVNSAIIVPIVITANGLIAKSLDEHLSKLSLGGWIKGLIQKAVLLNTARIVRRFLSLEP

SEQ ID NO: 29459 - protein, 1104 aa, Hecatera dysodea
MRTSCAHTTGLQRGGINLTAYRVRMLSLFQDLEPTVNVSAQRLSDQVRVIQRSHRLDEAALDRLRSEVLNNLIISTPTQTAVQAPGSGAIIPRPIHVCDEVVDRVVTVSSQCNDRLRSALEDALREYRSTPTELRPRLPRLPMHKKNRALVCALDSLLKSIFESSENLVDTHSILYCGAVAACRVANVKFTNSDGATRPKNAVPAWQCRIERRIDEARVLIGKLYCFREGNTRPRVMRFVRRAFLGTEISPQEYMSRVTERIDFLKQKVCAWANRIRRYKRRVDRYSQNRMFQSDERWVYRAWERPEQSVTDVCRPDDVTTNTFWRSIWSVPVCHAEAGWMRDVERVCEAIPQMEKITITTVDIATAVRPLPNWKSPGPDGLHNFWLKWYSSSHALLASQFQSSLDSGSLPQFLTTGVTHLLHKTGSPAEPKNYRPITCLSTVYKLLTSILRVKINEHIESNSIMSYSQNGCRKGSRGTKELLLIDMAISQQVRRSRKDLSTCWIDYKKAYDSVPHTWLLKVLELYKVDATLRTFLESCMRQWKTVLRYPGCRPIQGSEEPVWIKRGIFQGDSLSPLWFCLALNPLSTLLEDSGLGYRLRRGGQTISHLLYMDDLKLFAPNNLRLMELLKVTETFSSAIRMEFGVDKCAVMHVKKGEIMESEGIQLSDSIQIRSLSSTETYKYLGMSEALGINGADMKQSLKERFFGRLKKVLNSLLSGGNKVRAFNGWVMPVLMYSFGILKWTQTELDALDRRVRTLLTANRMHHPRSSVMRLYIPRKCGGRGFLNAKTLHNREMCSLREYFLKADVGMHRDVVAVDKGLTPLSMAKENWRKPVIPTIDDRREVWRGKELHGRFYRALYGSDVDFSASVAWLRFGDLFGETEGFVCAIMDEVILTNNYRRHIMKDGTVDVCRACHRPGESIRHIISGCSRLANGEYLHRHNQVARIIHQQLALKYKLVDSEVPYYKYVPDPVLENDHVTLYWDRSIITDRTIIANKPDIVVIDRLARRTMIIDVTIPHDENLVKAEKEKQIKYLDLAHEVVDMWNVDSAVIVPIVVTANGLMAKSFDEHLSKLALHGWLKGLIQKAVLLDTARIVRRFLSLEP

SEQ ID NO: 29460 - protein, 1199 aa, Hecatera dysodea
MLTRAATLRARHPPPGSPLSSASPPPDIESQVSPAAAVASSSSDEYFSPPTSPPPVRRQGRGRPPRGLEPRGQPAPSRVPATGGCVQRMRWTQSMNENVMRAYYGSTEGGINLTAYRVRMLSLFQDLEPTVNVSAQRLSDQVRVIQRSHRLDEAALDRLRSEVLNNLIISTPTQTAVQAPGSGAIIPRPIHVCDEVVDRVVTVSSQCNDRLRSALEDALREYRSTPTELRPRLPRLPMHKKNRALVCALDSLLKNIFESSENLVDTHSILYCGAVAACRVANVKFTNSDGATRPKNAAPAWQCRIERRIDEARVLIGKLYCFREGNTRPRVMRFVRRAFVGTEISPQEYMSRVTERIDFLKQKVCAWANRIRRYKRRVDRYSQNRMFQSDERWVYRAWERPEQSVTDVCRPDDVTTNTFWRSIWSVPVCHAEAGWMRDVERVCEAIPQMEKITITTVDIATAVRPLPNWKSPGPDGLHNFWLKWYSSSHALLASQFQSSLDSGSLPQFLTTGVTHLLHKTGSPAEPKNYRPITCLSTVYKLLTSILRVKINEHIESNSIMSYSQNGCRKGSRGTKELLLIDMAISQQVRRSRKDLSTCWIDYKKAYDSVPHTWLLKVLELYKVDATLRTFLESCMRQWKTVLRYPGCRPIQGSEEPVWIKRGIFQGDSLSPLWFCLALNPLSTLLEDSGLGYRLRRGGQTISHLLYMDDLKLFAPNNLRLMELLKVTETFSSAIRMEFGVDKCAVMHVKKGEIMESEGIQLSDSIQVRSLSSTVTYKYLGMSEALGINSADMKQSLKERFFGRLKKVLNSLLSGGNKVRAFNGWVMPVLMYSFGKLKWTQTELDALDRRVRTLLTANRMHHPRSSVMRLYIPRNCGGRGFLNAKTLHNREMCSLREYFLKADVGMHRDVVALDKGLTPLSMAKENWRKPVIPTTDDRREVWRGKELHGRFYRALYGSDVDFSASVAWLRFGDLFGETEGFVCAIMDEVILTNNYRRHIMKDGTVDVCRACHRPGESIRHIISGCSRLANGEYLHRHNQVARIIHQQLALKYKLVDSEVPYYKYVPDPVLENDHVTLYWDRSIITDRTIIANKPDIVVIDRLARRTMIIDVTIPHDENLVKAEKEKQIKYLDLAHEVVDMWNVDSAVIVPIVVTANGLMAKSIDEHLSKLALHGWLKGLIQKAVLLDTARIVRRFLSLEP

SEQ ID NO: 29461 - protein, 868 aa, Hecatera dysodea
MRFVRRAFSGTEISPQEYMSRVTERIDFLKQKVCAWANRIRRYKRRVDRYSQNRMFQSDERWVYRAWERPEQSVTDVCRPDDIVTSTFWRSIWSVPVRHTEGDWMRGVGRVCEAIPQMEKISITPTDVATAVRPLPNWKSPGPDGLHNFWLKWYSSAHAVLASQFQSSLESGSLPQFLTTGITHLLHKTGSPAEPKNYRPITCLSTVYKLLTSILRVKINEHIETNSIMSSSQNGCRKGSRGAKELLLIDMAISQQVRRTRKDLSTCWIDYKKAYDSVPHTWLMKVLELYKIDATLRTFLESCMRQWKTVLCYPRCRPIQGNDEPVWIKRGIFQGDSLSPLWFCLALNPLSTLLEDSGLGYRLRRGGQAISHLLYMDDLKLFAHNKLRLMELLKVTETFSSAIRMEFGVDKCAVMHVKKGEIMESEGVQLSDSIQVRSLSSTETYKYLGMSEALGINVADMKQSLKERFFGRLKKVLNSLLSGGNKVRAFNGWVMPVLMYSFGVLKWTQTELDALDRRVRTLLTANRMHHPRSSVMRLYIPRKCGGRGFLNAKTLHNREMCSLREYFLKVDVGMHRDVVAVDKGLTPLSMANENWRKPVIHTTDDRKEVWKGKELHGRFYRALYGSDVDFSASVAWLRFGDLFGETEGFVCAIMDEVILTNNYRRHIMKDGTVDVCRACHRPGESIRHIISGCSRLANGEYLHRHNQVARIIHQQLALKYKLVDSEVPYYKYVPDPVLENGHVTLYWDRSIITDRTIVANKPDIVVIDRLARRTMIIDVTIPHDENLVKAEKEKQIKYLDLAHEVVDMWNVDSAIIVPIVVTANGLMAKSFDDHLSKLALHGWLKGLIQKAVLLDTARIVRRFLSLEP

SEQ ID NO: 29462 - protein, 1199 aa, Hecatera dysodea
MLTRAAKRRARPPSPDPSLSFASPPPDNGSPVSPAAAVASSSSDEYFSPPTSPTPVRRQGRGRPPRSLGPRGQPAPSRVPAAGGCVQRMRWTQSINENVMRAYYGSTEGGTNLTAYRLRMLSLFQDLEPTVNVSAQRLSDQVRVIQRSHRLDDAALDRLRSEVLNNLIIPTPTQTMEQVPASSTLTPRSINVCDEVDDRVDMVSSQCNDRLRSALEDALREYRSTPTELRPRLPRLPMHKKNRALVCALDSLLKNIFESSENLIDTHSILYCGAVAACRIANVKFINSDGAIRPKSVAPAWQCRIERRIDEARVLIGKLYCFREGNTRPRVMRFVRRAFLGTQISPQEYMSRVTERIDFLKQKVCAWANRIRRYKRRVDRYSQNRMFQSDERWVYRAWERPEQSVTDACRPDDVATNTFWRSIWSVPVCHAEGGWMRDVERVCEAIPQMEKINITSLDVAKAVRPLPNWKSPGPDGLHNFWLKWYSSSHALLASQFQSSLESGSLPQFLTTGVTHLLHKTGSPAEPKNYRPITCLSTVYKLLTSILRVKINEHIETNSIMSYSQNGCRKGSRGTKELLLIDMAISQQVRRSRKDLSTCWIDYKKAYDSVPHTWLLKVLELYKIDATLRTFLESCMRQWKTVLRYPGCRPIQGSDEPVWIKRGIFQGDSLSPLWFCLALNPLSTLLEDSDLGYRLRRGGQAISHLLYMDDLKLFAPNKLRLMELLKVTETFSSDIRMEFGVDKCAVMHVKKGKIMESEGIQLSDSIQVRSLSSTETYKYLGMSEALGINVADMKQSLKERFFGRLKKVLNSLLSGGNKVRAFNGWVMPVLMYSFGILKWTQTELDALDRRVRTLLTANRMHHPRSSVMRLYIPRKCGGRGFLNAKTLHNREMCSLREYFLKVDVGMHRDVVAVDKGLTPMSMANENWRKPVIQTTDDRKEVWKGKELHGRFYRALYGSDVDFSASVAWLRFGDLFGETEGFVCAIMDEVILTNNYRRHIMKDGTVDVCRACHRPGESIRHIISGCSRLANGEYLHRHNQVARIIHQQLALKYKLVDSEVPYYKYVPDPVLENGHVTLYWDRSIITDRTIVANKPDIVVIDRLARRTMIIDVTIPHDENLVKAEKEKQIKYLDLAHEVVEMWNVDSAVIVPIVITANGLMAKSFDDHLSKLALHGWLKGLIQKAVLLDTARIVRRFLSLEP

SEQ ID NO: 29463 - protein, 1199 aa, Phlogophora meticulosa
MITRAATRRARPPSPDSPLSSASPPPDLGSPVTPAVAAASSSSDEYFSPPTSPTPVRRQGRGRPPKSLGSRGQPAPSQVPATGGCVQRMRWTQSMNENVMRAYYGSTEGGTNLTAYRVRMLSLFQGFEPTVNVSAQRLSDQVRVIQRNHRLDDAALDRLRSEMLSNHIVLTSTQTAVQAPAFNPILPRSNHVSNEADDRVDTVCSQYNDRLRSALEDALREYRSTPTELRPRLPRLPMHRKNRALVCALDSLLKNFFESSEDLVDTHSILYCAAVAACRLANVKFPKNDLAIRPKPAVPAWQSRIERRIDGARVLIGKLYCFREGNTRPRVMRFVRRAFSGTGISPREYMSRIVERIDFLKQKVCAWANRIRRYKRRVDRYSQNRMFQSDERWVYRAWERPEQDVAGEHRPDDVATNAFWRSIWSVPAHHVEAHWMSDYESVCETIPEMEKIIITPEDVATAVRPVPNWKSPGPDGLHNFWLKWLSSSHTRLASQFQSCLESGSLPQFLTTGITHLLYKSGSTTEPKNYRPITCLSTVYKLLTSILRAKITEHIVGNSIMSASQNGCRNGSRGTKELLLIDMAISQQVRRSRKDLSTCWIDYKKAYDSVPHAWLTRVLELYKIDATLRTFLASCMGQWKTVLRYPGCRQIQGNDEPIWIKRGIFQGDSLSPLWFCLALNPLSTLLEDSGLGYRLKRGGQVISHLLYMDDLKLFAPNNLRLMELLKITESFSSAIRMEFGVDKCAVMHVKRGEIVESEGIQLSDSIHLRSLSSSENYKYLGMSEALGINATDMKQSLKERFFGRLKKVLNCLLSGGNKVRAFNGWVMPVLMYSFGILKWTQTELDALDRRVRTLLTANRMHHPRSSVMRLYIPRKCGGRGFLNAKTLHNREVCNLRDYFLKTEVGMHRDVVAVDKGLTPLSMAKENWRKPVVLTTDDRKQVWQSKELHGRFYRALHGPDVDFLASVSWLRFGDLFGETEGFVCAIMDEVILTNNYRKHIMKDGTVDMCRACHRPGESIRHIISGCSRLANSEYLHRHNQVARIIHQQLALRYKLVESEVPYYKYVPDPVLEDDHITLYWDRSIITDRTIVANKPDIVVIDRLARRAMIVDVTIPHDENLVKAEKEKQIKYLDLAHEVVDMWNVDSAVIVPIVVTANGLLAKSLDDHLSRLSLHGWIKGLIQKAVLLDTARIVRRFLSLQP

SEQ ID NO: 29464 - protein, 1201 aa, Xestia xanthographa
MMLTRAAAARRAHLPTPDSSLSSASPPPDPRSPVSPVAAVASSSSDEYFSPPTSPPPVRRAGRGRPPTSLGLRGRQAPSRVPATGGCVQRMKWTQSMNENVMRAYYGSTEGGTNLTAYRVRMLSLFQDLEPTVIVSAQRLSDQVRVIQRSHRLDDAALDRLRSEVLSNLIVLTPTQTAVQVSAIDATPPRLNPAVVEEDDGVATVSSQCNDRLRSALENALHEYRSTPTELRPRLPRLPMHKKNRALVCALDSQLKNIFESSENLVDTHSILFCGAVAACRIANVKFPNCDVATRPKPAVPAWQRRIERRIDGARVLIVKLYCFREGNTRPRVMRFVRRAFSGTEISPQEYMSRATERIDFLKQKVYAWANRIRRYKRRVDRYSQNRMFQSDERWVYRAWERPEQNMTDVCRPDDAATSSFWRSIWSVPVCHTEADWMRDVERVCEPIPEMEPIFITPVDVARAVRPLPNWKSPGPDGLHNFWLKWFSSSHTCLASQFQSSLESGSLPQFLTTGVTHLLHKSGSPAEPKNYRPITCLSTIYKLLTSILRVKINTHIDKNSIMSASQNGCRNGSRGTKELLLIDMAISQQVRRSRKDLSTCWIDYKKAYDSVPHTWLMRVLELYKVDTTLRTFLESCMGQWKTVLRYPGCRQIQGSDEPVWIKRGIFQGDSLSPLWFCLALNPLSTLLENSGLGCRLRKDGQVISHLLYMDDLKLFAPNKLRLMELLKVTETFSSAIRMEFGVDKCAVMYVKRGEIMESEGLQLSDSIHLKSLSSSETYKYLGMSEALGINVTDMKQSLRERFFGRLRKVLNSLLSGGNKVRAFNGWVMPVLMYSFGILKWTQTELDALDRRVRTLLTESRMHHPRSSVMRLYIPRKCGGRGFLNAKTLHNREVCSLREYFLKAEVGMHRDVVAVDKGLTPLSMAKENWHRPEVLTTDDRKEVWQGKVLHGRFYRALHGPDVDFIASVSWLRFGDLFGETEGFVCAIMDEVMLTNNYRKYIMKDGTVDVCRACHLPGESIRHIISGCSRLANGEYLHRHNQVARIIHQQLALKYKLVESEVPYYKYVPDPVLENDHVTLYWDRSIITDRTIVANKPDIVMMDRSARRVMIIDVTIPHDENLVKAEKEKQIKYLDLAHEVRGMWNMNSVIIVPIVVSANGLIAKSFDDHLSKLSLGGWIKGLIQKAVLLDTARIVRRFLSLQP

SEQ ID NO: 29465 - protein, 1199 aa, Xestia xanthographa
MITRAAARRAHLPTPDSSLSSASPPPDPGSPVSPVAAVASSSSDEYFSPPTSPPPVRRAGRGRPPKSLGLRGQQTPSRVPATGGCVQRMKWTQSMNENVMRAYYGSTEGGTNLTAYRVRMLSLFQGLEPTVNVSAQRLSDQVRVIQRSHRLDDAALDRLRSEVLSNLIVLTPTQTAVQVSAIDATPPWLNPVVVEEDDGVATVSSQCNDRLRSALENALHEYRSTPTELRPRLPRLPMHKKNRALVCALDSQLKNIFESSENLVDTHSILFCGAVAACRLANVKFPNCDVANRPKPAVPAWQRRIERRIDGARVLIGKLYCFREGNTRPRVMRFVRRAFSGTEISPQEYMSRVTERIDFLKQKVYAWANRIRRYKRRVDRYSQNRMFQSDERWVYRAWERPEQNMTDVCRPDDAATSSFWRSIWSVPVCHTEADWMRDVERVCEPIPEMEPTFITPLDVARAVRPLPNWKSPGPDGLHNFWLKWFISSHTCLASQFQSSLESGSLPQFLTTGVTHLLHKSGSPAEPKNYRPITCLSTIYKLLTSILRVKINTHIDKNSIMSASQNGCRNGSRGTKELLLIDMAISQQVRRSRKDLSTCWIDYKKAYDSVPHTWLMRVLELYKIDTTLRTFLESCMGQWRTVLRYPGCRQIQGSDAPVWIKRGIFQGDSLSPLWFCLALNPLSTLLENSGLGCRLRKDGQVISHLLYMDDLKLFASNKLRLMELLKVTETFSNAIRMEFGVDKCAVMYVKRGEIMESEGLQLSDSIQLRSLSSSETYKYLGMSEALGINITDMKQSLKERFFSRLRKVLNSLLSGGNKVRAFNGWVMPVLMYSFGILKWTQTELDALDRRVRTLLTESRMHHPRSSVMRLYIPRKCGGRGFLNAKTLHNREVCSLREYFLKAEVGMHRDVVAVDKGLTPLSMAKENWHKSEVRTTDDRKEVWQGKELHGRFYRALHGPDVDFLASVSWLRFGDLFGETEGFVCAIMDEVMLTNNYRKYIMKDGTVDMCRACHLPGESIRHIISGCSRLANGEYLHRHNQVARIIHQQLALKYKLVESEVPYYKYVPDPVLESDHVTLYWDRSIITDRTIVANKPDIVMIDRSARRVMIIDVTIPHDENLVKAEKEKQIKYLDLAHEVRDMWNMNSVIIVPIVVTANGLIAKSFDDHLSKLSLGGWIKGLIQKAVLLDTARIVRRFLSLQP

SEQ ID NO: 29466 - protein, 868 aa, Xestia xanthographa
MRFVRRAFSGTEISPQEYMSRVTERIDFLKQKVYAWANRIRRYKRRVDRYSQNRMFQSDERWVYRAWERPEQNMTDLCRPDDAATSSFWRSIWSVPVCHTEADWMRDVERACEPIPEMEPIFITPLDVARAVRPLPNWKSPGPDGLHNFWLKWFSSSHTCLASQFQSSLESGSLPQFLTTGVTHLLHKSGSLAEPKNYRPITCLSTIYKLLTSILRVKINTHIDKNSIMSASQNGCRNGSRGTKELLLIDMAISQQVRRSRKDLSTCWIDYKKAYDSVPHTWLMRVLELYKIDATLRAFLESCMGQWKTVLRYPGCRQIQGSDEPVWIKRGIFQGDSLSPLWFCLALNPLSTLLENSGLGCRLRKDGQVISHLLYMDDLKLFAPNKLRLMELLKITESFSSAIRMEFGVDKCAVMYVKRGEIMESEGTQLSDSMHLRSLSSTETYKYLGMSEALGINVTDMKQSLRERFFGRLRKVLNSLLSGGNKVRAFNGWVMPVLMYSFGILKWTQTELDALDRRVRTLLTESRMHHPRSSVMRLYIPRKCGGRGFLNAKTLHNREVCSLREYFLKAAVGMHRDVVAVDKGLTPLSMAKENWRKPLVLTTNDRKEVWQGKELHGRFYRALHGPDVDFLASVSWLRFGDLFGETEGFVCAIMDEVMLTNNYRKYIMKDGTVDVCRACHLPGESIRHIISGCSRLANGEYLHRHNQVARIIHQQLALKYKLVESEVPYYKYVPDPVLEKDHVTLYWDRSIITDRTIVANKPDIVMIDRSARRVMIIDVTIPHDENLVKAEKEKQIKYLDLAHEVRDMWNMNSVIIMPIVVTANGLIAKSFDDHLSKLSLGGWIKGLIQKAVLLDTARIVRRFLSLQP

SEQ ID NO: 29467 - protein, 1202 aa, Cosmia trapezina
MLTRSAARARPPPPDSSLSSASPPPVSSPTVSAVTTPAAVVASSSSDEYFSPPTSPIPVRRQGRGRPPKSLGLGGQPAPSRVPAAGGCVQRMRWTQSMNENVMRAYYGSTEGGTNLTAYRVRMLSLFQELEPTVNVSAQRLSDQVRVIQRNHRLDDAALDRLRSEILSDRIVSTQAQTAVQDSIIDALPPRSNHVVEEEDDRVATVSSQSNDRLRSALEDAFREYRSTPTELRPRLPRLPMHKKNRALVCALDSHLKDFFESSEDLVDTHSILYCAAVAACRLANVKFPNCDGANRSKPAVPAWQCRIERRIDGARVLIGKLYCFREGNTRPRVMRFVRRAFSGTGISPPEYMSRVTERIDFLKQKVCAWASRIRRYKRRVDRYTQNRMFQSDERWVYRAWERLEQNVADVCRPDDAATSAFWRSIWSVPVCHAEAGWMQDVERVCETIPEMETVLITPLDVARAVRPFPNWKSPGPDGLHNFWLKWLISSHTCLASQFQSSLESGSLPQFLTTGVTHLLHKSGSPVEPKNYRPITCLSTVYKLLTSILRAKINTHIASNSIISASQNGCRTGSRGTKELLLIDMAISQQVRRSRKDLSTCWIDYKKAYDSVPHTWLLKVLELYKIDATLRTFLESCMGQWRTVLRYPGCQQIRGSDEPVWIKRGIFQGDSLSPLWFCLALNPLSTLLEDSGLGYRLRRGGQVISHLLYMDDLKLFAPNELRLMELLKVTETFSDAIRMEFGVDKCAVMHVKRGEIMESEGIQLTDSIYLRSLSSSETYKYLGMSEALGINVADVKQSLKERFFGRLKKVLISLLSGGNKVRAFNGWVMPVLMYSFGILKWTQTELDALDRRVRTLLTANRMHHPRSSVMRLYIPRKCGGRGFLNAKTLHNREVCSLREYFLKADVGMHRDVVAVDKGLTPLSMAKENWRKPVLLTTDDRRKVWQSKELHGRFYRALHEPGVDFLASVSWLRFSDLFGETEGFVCAIMDEVILTNNYRRYIMKDGTVDVCRACHRPGESIRHIISGCSRLANGEYLHRHNQVARIIHQQLALKYKLVDSEVPYYKYVPDPVLENDHVTLYWDRSIITDRTIVANKPDIVVIDRLARRAMIVDVTIPHDGNLVKAEKEKQIKYLDLAHEVVDMWNVDSAVIVPIVVTANGLIADSLDQHLSRLSLGGWIKGQIQKAVLLDTARIVRRFLSLQP

SEQ ID NO: 29468 - protein, 1202 aa, Cosmia trapezina
MLTRSAARARPPPPDSSLSSASPPPVSSPTVSAVTTPAAVVASSSSDEYFSPPTSPIPVRRQGRGRPPKSLGLGGQPAPSRVPAAGGCVQRMRWTQSMNENVMRAYYGSTEGGTNLTAYRVRMLSLFQELEPTVNVSAQRLSDQVRVIQRNHRLDDAALDRLRSEILSDRIVSTQAQTAVQDSIIDALPPRSNHVVEEEDDRVATVSSQSNDRLRSALEDAFREYRSTPTELRPRLPRLPMHKKNRALVCALDSHLKDFFESSEDLVDTHSILYCAAVAACRLANVKFPNCDGANRSKPAVPAWQCRIERRIDGARVLIGKLYCFREGNTRPRVMRFVRRAFSGTGISPPEYMSRVTERIDFLKQKVCAWASRIRRYKRRVDRYTQNRMFQSDERWVYRAWERPEQNVTDVCRPDDAATNAFWRSIWSVPVCHAEAGWMQDVERVCETIPEMETVLITPLDVARAVRPFPNWKSPGPDGLHNFWLKWLISSHTCLASQFQSSLESGSLPQFLTTGVTHLLHKSGSPVEPKNYRPITCLSTVYKLLTSILRAKINTHIASNSIISAYQNGCRTGSRGTKELLLIDMAISQQVRRSRKDLSTCWIDYKKAYDSVPHTWLLKVLELYKIDATLRTFLESCMGQWRTVLRYPGCRQIRGNDEPVWIKRGIFQGDSLSPLWFCLALNPLSTLLEDSGLGYRLRRGGQVISHLLYMDDLKLFAPNELRLMELLKVTETFSGAIRMEFGVDKCAVMHVKRGEIMESEGIQLTDSIYLRSLSSSETYKYLGMSEALGINVAGVKQSLKERFFGRLKKVLISLLSGGNKVRAFNGWVMPVLMYSFGILKWTQTELDALDRRVRTLLTANRMHHPRSSVMRLYIPRKCGGRGFLNAKTLHNREVCSLREYFLKADVGMHRDVVAVDKGLTPLSMAKENWRKPVLLTTDDRRKVWQSKELHGRFYRALHEPGVDFLASVSWLRFSDLFGETEGFVCAIMDEVILTNNYRRYIMKDGTVDVCRACHRPGESIRHIISGCSRLANGEYLHRHNQVARIIHQQLALKYKLVDSEVPYYKYVPDPVLENDHVTLYWDRSIITDRTIVANKPDIVVIDRLARRAMIVDVTIPHDGNLVKAEKEKEIKYLDLAHEVVDMWNVDSAVIVPIVVTANGLIADSLDQHLSRLSLGGWIKGQIQKAVLLDTARIVRRFLSLQP

SEQ ID NO: 29469 - protein, 1202 aa, Cosmia trapezina
MLTRSAARARPPPPDSSLSSASPPPVSSPIVGAVITPAAAVASSSSDEYFSPPTSPTPVRRQGRGRPPRSLGLRGQPAPSRVPAAGGCVQRMRWTQSMNENVMRAYYGSTEGGTNLTAYRVRMLSLFQELEPTVNVSAQRISDQVRVIQRNHRLDDAALDRLRSEVLSNHIISNPTQTAVQPSIIDALPPRSNHVVEEEDDRVATVSSQCNDRLRDALEDAFCEYRSTPTELRPRLPRLPMHKKNRALMCALDSLLKDFFESSENLVDTHSILYCAAVAACRLANVKFPNCDGATRPKPAVPAWQCRIERRIDGARVLIGKLYCFRQGNTRPRVMRFVRRAFSGTGISPPEYMSRVTERIDFLKQKVCAWASRIRRYKRRVDRYTQNRMFQSDERWVYRAWERPEQNVTDVCRPDDAATSAFWRSIWSVPVCHAEAGWMKDVEGMCEAIPEMEPVLITPLDVARAVRPLPNWKSPGPDGLHNFWLKWLISSHTRLASQFQSSLESGSLPQFLTTGVTHLLHKSGSPAEPKNYRPITCLSTIYKLLTSILRAKINMHIDSNSIMSTSQNGCRNWSRGTKELLLIDMAISQQVRRSRKDLSTCWIDYKKAYDSVSHAWLMRVLELYKIDATLRTFLESCMGQWRTVLRYPGCRRIRGNDEPVRIKRGIFQGDSLSPLWFCLALNPLSTLLEDSGLGYRLRRGGQVISHLLYMDDLKLFAPNKLRLMELLKVTESFSSAIRMEFGVDKCAVMHVKRGEIMESEGIQLSDSIHLRSFSSSETYKYLGMSEALGINVADMKQSLRERFFGRLKKVLISLLSGGNKVRAFNGWVMPVLMYSFGILKWTQTELDALDRRVRTLLTANRMHHPRSSVMRLYIPRKCGGRGFLNAKTLHNREVCSLREYFLKSDVGMHRDVVAVDKGLTPLSMAKENWRKPVVLTTDDRKKVWQSKELHGRFYRALHEPSVDFLASVSWLRFGDLFGETEGFVCAIMDEVILTNNYRRYIMKDGTVDVCRACHRPGESIRHIISGCSRLANGEYLHRHNQVARIIHQQLALKYKLVDSEVPYYKYVPDPVLENDHVTLYWDRSIITDRTIVANKPDIVVIDRLARRAMIVDVTIPHDGNLVKAEKEKQIKYLDLAHEVVDMWNVDSAVIVPIVVTANGLIADSLDQHLSRLSLGGWIKGQIQKAVLLDTARIVRRFLSLQP

SEQ ID NO: 29470 - protein, 1202 aa, Cosmia trapezina
MLTRSAARARPPPPDSSLSSASPPPVSSPIVGAVITPAAAVASSSSDEYFSPPTSPTPVRRQGRGRPPRSLGLRGQPAPSRVPAAGGCVQRMRWTQSMNENVMRAYYGSTEGGTNLTAYRVRMLSLFQELEPTVNVSAQRISDQVRVIQRNHRLDDAALDRLRSEVLSNHIISNPTQTAVQPSIIDALPPRSNHVVEEEDDRVATVSSQCNDRLRDALEDAFCEYRSTPTELRPRLPRLPMHKKNRALMCALDSLLKDFFESSENLVDTHSILYCAAVAACRLANVKFPNCDGATRPKPAVPAWQCRIERRIDGARVLIGKLYCFRQGNTRPRVMRFVRRAFSGTGISPPEYMSRVTERIDFLKQKVCAWASRIRRYKRRVDRYTQNRMFQSDERWVYRAWERPEQNVTDVCRPDDAATSAFWRSIWSVPVCHAEAGWMKDVEGVCEAIPEMEPVLITPLDVARAVRPLPNWKSPGPDGLHNFWLKWLISSHTRLASQFQSSLESGSLPQFLTTGVTHLLHKSGSPAEPKNYRPITCLSTIYKLLTSILRAKINMHIDSNSIMSTSQNGCRNGSRGTKELLLIDMAISQQVRRSRKDLSTCWIDYKKAYDSVSHAWLMRVLELYKIDATLRTFLESCMGQWRTVLRYPGCRRIRGNDEPVRIKRGIFQGDSLSPLWFCLALNPLSTLLEDSGLGYRLRRGGQVISHLLYMDDLKLFAPNKLRLMELLKVTESFSSAIRMEFGVDKCAVMHVKRGEIMESEGIQLSDSIHLRSLSSSETYKYLGMSEALGINVADMKQSLRERFFGRLKKVLISLLSGGNKVRAFNGWVMPVLMYSFGILKWTQTELDALDRRVRTLLTANRMHHPRSSVMRLYIPRKCGGRGFLNAKTLHNREVCSLREYFLKSDVGMHRDVVAVDKGLTPLSMAKENWRKPVVLTTDDRKKVWQSKELHGRFYRALHEPSVDFLASVSWLRFGDLFGETEGFVCAIMDEVILTNNYRRYIMKDGTVDVCRACHRPGESIRHIISGCSRLANGEYLHRHNQVARIIHQQLALKYKLVDSEVPYYKYVPDPVLENDHVTLYWDRSIITDRTIVANKPDIVVIDRLARRAMIVDVTIPHDGNLVKAEKEKQIKYLDLAHEVVDMWNVDSAVIVPIVVTANGLIADSLDQHLSRLSLGGWIKGQIQKAVLLDTARIVRRFLSLQP

SEQ ID NO: 29471 - protein, 1199 aa, Mamestra brassicae
MITRAAARRAHPPPPGSSLSSASPTPDIGSQVSPVVAVASSSSDEYFSPPTSPTPVRRQGRGRPPRSLGSRGQPAPSRVPAAGGCVQRMRWTQSMNENVMRAYYGSTEGGTNLTAYRVRMLSLFQDLEPTVNVSAQRLSDQVRVIQHNCRLDDAALERLRSEVLSNLIISTPTQTVVQAPASGAITPRPNNGSDEVDDRVVTVSSQCNDRLRSALEDALREYRLTPTELRPRLPRLPMHKKNRALVCALDSLLQNIFESSESLVDTHSILFCGAVAACRIANVKFPSCDEAIRPKPAAPAWQCRIERRIDEARALIGKLYCFREGNTRPRVMRFVRRAFSGTGISPREYTFRVTERIDFLKQKVCAWANRIRRYKRRVDRYSQNRMFQSDERWVYRAWERPEQSVTDVYRPDDVATSTFWRSIWSVPICHAEGGWMRDVERVCEAIPQMEKITITTLDIAKAVRPLPNWKSPGPDGLHNFWLKWYSSSHALLASQFQSSLESGSLPQFLTTGITQLLHKTGSPAEPKNYRPITCLSTVYKLLTSILRAKINEHIESNSIMSASQNGCRKGSRGTKELLLIDMAISQQVRRSRKDLSTCWIDYKKAYDSVPHTWLMKVLELYKIDATLRTFLESCMRQWKTVLRYPGCQPIQGSDEPVWIKRGIFQGDSLSPLWFCLALNPLSTLLEDSGLGYRLRRGGQAISHLLYMDDLKLFAPNNLRLMELLKVTETFSSAIRMEFGVDKCAVMHVKKGEIMESEGIQLSDSIQVRSLSSTESYKYLGMSEALGINGTDMKQSLRERFFGRLKKVLNSLLSGGNKVRAFNGWVMPVLMYTFGILKWTQTELDALDRRVRTLLTANRMHHPRSSVMRLYIPRKCGGRGFLNAKTLHNREMCSLREYFLKADVGMHRDVVAVDKGLTPLSMAKENWRKPVILTTDDRKEVWKGKELHGRFYRALYGSDVDFSASVAWLRFGDLFGETEGFVCAIMDEVILTNNYRKHIMKDGTVDVCRACHRPGESIRHIISGCSRLANGEYLHRHNQVARIIHQQLALKYKLVDSEVPYYKYVPDPVLENDHVTLYWDRSIITDRTIVANKPDIVVIDRLARRTMIIDVTIPHDENLVKAEKEKQIKYLDLAHEVVDMWNVDSAVIVPIVITANGLMAKSFDDHLSKLALRGWIKGLIQKAVLLDTARIVRRFLSLEP

SEQ ID NO: 29472 - protein, 1204 aa, Mamestra brassicae
MLIITMLTRAALQRARPPPPDPSLSSASPPPDIGSPLSPAVAVASSSSDEYFSPPTSPTPVRRQGRGRPPRGLGPRGQPAPSRVPATGGCVQRMRWTQSMNENVMRAYYGSTEGGTNLTAYRVRMLSLFQDLEPTVNVSAQRLSDQVRVIQRNHRLDDAALDRLRSEVLNNLIISTPTQTAVQAPVNGRITPRPNNVSDEVDDRVVTVSSQCNDRLRSALEDALREYRSTPTELRPRLPRLPMHKKNRALVCALDSLLQNIFESSESLVDTHSILYCGAVAACRIANVKFPGCDEAIRPKPAAPAWQRRIERRIDETRALIGKLYCFREGNTRPRVMRFVRRAFSGTEISPRDFTSRVTERIDFLKQKVCAWASRIRRYKRRVDRYSQNRMFQSDERWVYRAWERPEQSVTDVCRPDDVATSIFWRSIWSVPICHAEGGWMRDVERVCEAIPQMEKITITTLDVAKAVRPLPNWKSPGPDGLHNFWLKWYSSSHALLASQFQSSLDSGSLPQFLTTGVTHLLHKTGSPAEPKNYRPITCLSTVYKLLTSILRVKINEHIESNSIMSASQNGCRKGSRGTKELLLIDMAISQQVRRSRKDLSTCWIDYKKAYDSVPHTWLMKVLELYKIDATLRTFLESCMRQWKTVLRYPGCRPIQGSDEPVWIKRGIFQGDSLSPLWFCLALNPLSTLLEDSGLGYRLRRGGQAISHLLYMDDLKLFAPNNLRLMELLKVTETFSSAIRMEFGVDKCAVMHVKKGEIMESEGIHLSDSIQDRSLSSTETYKYLGMLEALGINGTDMKQSLRERFFGRLKKVLNSLLSGGNKVRAFNGWVMPVLMYTFGILKWTQTELDALDRRVRTLLTANRMHHPRSSVMRLYIPRKCGGRGFLNAKTLHNREMCSLREYFIKADVGMHRDVVAVDKGLTPLSMAKENWRTPVILTTDDRKEVWKGKELHGRFYRALHGSDVDFSASVAWLRFGDLFGETEGFVCAIMDEVILTNNYRRHIMKDGTVDMCRACHRPGESIRHIISGCSRLANGEYLHRHNQVARIIHQQLALKYNLVDSEVPYYKYVPDPVLENDHVTLYWDRSIITDRTIVANKPDIVVIDRLARRTMIIDVTIPHDENLVKAEKEKQIKYLDLAHEVVDMWNVESAVIVPIVVTANGLMAKSFDDHLSKLALCSWVKGLIQKAVLLDTARIVRRFLSLEP

SEQ ID NO: 29473 - protein, 868 aa, Mamestra brassicae
MRFVRRAFSGTGISPREYTFRVTERIDFLKQKVCAWANRIRRYKRRVDRYSQNRMFQSDERWVYRAWERPEQSVTDVYRPDDVATSTFWRSIWSVPICHAEGGWMRDVERVCEAIPQMEKITITTLDIAKAVRPLPNWKSPGPDGLHNFWLKWYSSSHALLASQFQSSLESGSLPQFLTTGITHLLHKTGSPAEPKNYRPITCLSTVYKLLTSILRAKINEHIESNSIMSASQNGCRKGSRGTKELLLIDMAISQQVRRSRKDLSTCWIDYKKAYDSVPHTWLMKVLELYKIDATLRTFLESCMRQWKTVLRYPGCQPIQGSDEPVWIKRGIFQGDSLSPLWFCLALNPLSTLLEDSGLGYRLRRGGQAISHLLYMDDLKLFAPNNLRLMELLKVTETFSSAIRMEFGVDKCAVMHVKKGEIMESEGIQLSDSIQVRSLSSTESYKYLGMSEALGINGTDMKQSLRERFFGRLKKVLNSLLSGGNKVRAFNGWVMPVLMYTFGILKWTQTELDALDRRVRTLLTANRMHHPRSSVMRLYIPRKCGGRGFLNAKTLHNREMCSLREYFLKADVGMHRDVVAVDKGLTPLSMAKENWRKPVILTTDDRKEVWKGKELHGRFYRALYGSDVDFSASVAWLRFGDLFGETEGFVCAIMDEVILTNNYRKHIMKDGTVDVCRACHRPGESIRHIISGCSRLANGEYLHRHNQVARIIHQQLALKYKLVDSEVPYYKYVPDPVLENDHVTLYWDRSIITDRTIVANKPDIVVIDRLARRTMIIDVTIPHDENLVKAEKEKQIKYLDLAHEVVDMWNVDSAVIVPIVITANGLMAKSFDDHLSKLALRGWIKGLIQKAVLLDTARIVRRFLSLEP

SEQ ID NO: 29474 - protein, 1206 aa, Mamestra brassicae
MWNETWSMITRAAARRAHPPPPGSSLSSASPTPDIGSQVSPVVAVASSSSDEYFSPPTSPTPVRRQGRGRPPRSLGSRGQPAPSRVPAAGGCVQRMRWTQSMNENVMRAYYGSTEGGTNLTAYRVRMLSLFQDLEPTVNVSAQRLSDQVRVIQHNCRLDDAALERLRSEVLSNLIISTPTQTVVQAPASGAITPRPNNGSDEVDDGVVTVSSQCNDRLRSALEDALREYRLTPTELRPRLPRLPMHKKNRALVCALDSLLQNIFESSESLVDTHSILFCGAVAACRIANVKFPSCDEAIRPKPAAPAWQCRIERRIDEARALIGKLYCFREGNTRPRVMRFVRRAFSGTGISPREYTFRVTERIDFLKQKVCAWANRIRRYKRRVDRYSQNRMFQSDERWVYRAWERPEQSVTDVYRPDDVATSTFWRSIWSVPICHAEGGWMRDVERVCEAIPQMEKITITTLDVAKAVRPLPNWKSPGPDGLHNFWLKWYSSSHALLASQFQSSLESGSLPQFLTTGITHLLHKTGSPAEPKNYRPITCLSTVYKLLTSILRAKINEHIESNSIMSASQNGCRKGSRGTKELLLIDMAISQQVRRSRKDLSTCWIDYKNAYDSVPHTWLMKVLELYKIDATLRTFLESCMRQWKTVLRYPGCQPIQGSDEPVWIKRGIFQGDSLSPLWFCLALNPLSTLLEDSGLGYRLRRGGQAISHLLYMDDLKLFAPNNLRLMELLKVTETFSSAIRMEFGVDKCAVMHVKKGEIMESEGIQLSDSIQVRSLSSTESYKYLGMSQALGINGTDMKQSLRERFFGRLKKVLNSLLSGGNKVRAFNGWVMPVLMYTFGILKWTQTELDALDRRVRTLLTANRMHHPRSSVMRLYIPRKCGGRGFLNAKTLHNREMCSLREYFLKADVGMHQDVVAVDKGLTPLSMAKENWRKPVILTTDDRKEVWKGKELHGRFYRALYGSDVDFSASVAWLRFGDLFGETEGFVCAIMDEVILTNNYRKHIMKDGTVDVCRACHRPGESIRHIISGCSRLANGEYLHRHNQVARIIHQQLALKYKLVDSEVPYYKYVPDPVLENDHVTLYWDRSIITDRTIVANKPDIVVIDRLARRTMIIDVTIPHDENLVKAEKEKQIKYLDLAHEVVDMWNVDSAVIVPIVVTANGLMAKSFDDHLSKLALRGWIKGLIQKAVLLDTARIVRRFLSLEP

SEQ ID NO: 29475 - protein, 1199 aa, Mamestra brassicae
MITRAAARRAHPPPPGSSLSSASPTPDIGSQVSPVVAVASSSSDEYFSPPTSPTPVRRQGRGRPPRSLGSRGQPALSRVPAAGGCVQRMRWTQSMNENVMRAYYGSTEGGTNLTAYRVRMLSLFQDLEPTVNVSAQRLSDQVRVIQHNCRLDDAALERLRSEVLSNLIISTPTQTVVQAPASGAITPRPNNGSDEVDDRVVTVSSQCNDRLRSALEDALREYRLTPTELRPRLPRLPMHKKNRALVCALDSLLQNIFESSESLVDTHSILFCGAVAACRIANVKFPSCDEAIRPKPAAPAWQCRIERRIDEARALIGKLYCFREGNTRPRVMRFVRRAFSGTGISPREYTFRVTERIDFLKQKVCAWANRIRRYKRRVDRYSQNRMFQSDERWVYRAWERPEQSVTDVYRPDDVATSTFWRSIWSVPICHAEGGWMRDVERVCEAIPQMEKITITTLDIAKAVRPLPNWKSPGPDGLHNFWLKWYSSSHALRASQFQSSLESGSLPQFLTTGITHLLHKTGSPAEPKNYRPITCLSTVYKLLTSILRAKINEHIESNSIMSASQNGCRKGSRGTKELLLIDMAISQQVRRSRKDLSTCWIDYKKAYDSVPHTWLMKVLELYKIDATLRTFLESCMRQWKTVLRYPGCQPIQGSDEPVWIKRGIFQGDSLSPLWFCLALNPLSTLLEDSGLGYRLRRGGQAISHLLYMDDLKLFAPNNLRLMELLKVTETFSSAIRMEFGVDKCAVMHVKKGEIMESEGIQLSDSIQVRSLSSTESYKYLGMSEALGINGTDMKQLLRERFFGRLKKVLNSLLSGGNKVRAFNGWVMPVLMYTFGILKWTQTELDALDRRVRTLLTANRMHHPRSSVMRLYIPRKCGGRGFLNAKTLHNREMCSLREYFLKADVGMHRDVVAVDKGLTPLSMAKENWRKPVILTTDDRKEVWKGKELHGRFYRALYGSDVDFSASVAWLRFGDLFGETEGFVCAIMDEVILTNNYRKHIMKDGTVDVCRACHRPGESIRHIISGCSRLANGEYLHRHNQVARIIHQQLALKYKLVDSEVPYYKYVPDPVLENDQVTLYWDRSIITDRTIVANKPDIVVIDRLARRTMIIDVTIPHDENLVKAEKEKQIKYLDLAHEVVDMWNVDSAVIVPIVITANGLMAKSFDDHLSKLALRGWIKGLIQKAVLLDTARIVRRFLSLEP

SEQ ID NO: 29476 - protein, 868 aa, Noctua fimbriata
MRFVRRAFSGTGISPQEYMSRVTERIDFLKQKVYAWANRIRRYKRRVDRYSQNRMFQSDERWVYRAWERPDQNMTDMCRPDDAATSSFWRSIWSVPVCHTEADWMRDVEQVCEPIPEMEPILITPLDVARAVRPLPNWKSPGPDGLHNFWLKWLSSSHTCLASQFQSSLESGSLPQFLTTGVTHLLHKSGSPAEPKNYRPITCLSTVYKLLTSILRAKINTHIDKNSIMSASQNGCRNGSRGTKELLLIDMAISQQVRRSRKDLSTCWIDYKKAYDSVPHTWLMRVLELYKIDATLRAFLESCMGQWRTVLRYPGCRQIQGNDEPVWIKRGIFQGDSLSPLWFCLALNPLSTLLEDSGLGYRLRRGGQVISHLLYMDDLKLFAPNKLQLMELLKVTETFSSAIRMEFGMDKCAVMYVKQGEIMESEGIQLSDSIHLRTLSSTESYKYLGMSEALGINVTDMKQSLKERFFGRLNKVLHSLLSGGNKVRAFNGWVMPVLMYSFGVLKWTQTELDALDRRVRTLLTANRMHHPRSSVMRLYIPRKCGGRGFLNAKSLHNREMCSLREYFLKVEVGMHRDVVAVDKGLTPLSMAKENWRKPEVLTTDDRKEVWQGKELHGRFYRALHGPDVDFLASVSWLRFGDLFGETEGFVCAIMDEVMLTNNYRKYIMKDGTVDVCRACHRPGESIRHIISGCSRLANGEYLHRHNQVARIIHQQLALKYKLVESEVPYYKYVPDPVLEKDHVTLYWDQSIITDRTIVANKPDIVVIDRSARRVMIVDVTIPHDENLVKAEKEKQIKYLDLAHEVVDMWNVNSAIIVPIVVTANGLIAKSLDDHLSKLSLGGWIKGLIQKAVLLDTARIVRRFLSLEP

SEQ ID NO: 29477 - protein, 1111 aa, Noctua fimbriata
MRWTQSINEQVMRAYYGATEGGTNLTAYRVGMLSLFQVLEPTVNVSAQRLSDQVRVIQRNHMLDDAVLDRLRSEVLSNRIVLTPAQTAVQASVIDATPPRFNPAVVEEDDRVAVVSSQCNDRLRSALEDALREYRSTPTELRPRLPRLPMHNKNRALVCALDSQLENIFESSENLVDTHSILYCGAVAACRLANVKFPNCDVATRPKPAVPAWQRRIERRIDGARVLIGKLHCFREGNTRPRVMRFVRRAFSGTGISPQEYMSRVTERIDFLKQKVYAWANRIRRYKRRVDRYSQNRMFQSDERWVYRAWERPELNMTDVCRPDDAATSSFWRSIWSVPVCHTEADWMRDVERVCEPIPEMEPILITPLDIARAVRPLPNWKSPGPDGLHNFWLKWLSSSHTCLASQFQSSLESGSLPQFLTTGVTHLLHKSGSPAEPKNYRPITCLSTVYKLLTSILRAKINTHIDKNSIMSASQNGCRNGSRGAKELLLIDMAISQQVRRSRKDLSTCWIDYKKAYDSVPHTWLMRVLELYKIDATLRAFLESCMGQWRTVLRYPGCRQIQGNDEPVWIKRGIFQGDSLSPLWFCLALNPLSTLLEDSGLGYRLRRGGQVISHLLYMDDLKLFAPNKLRLMELLKVTETFSSAIRMEFGVDKCAVMYVKQGEIMESEGIQLSDSIHLRTLSSTESYKYLGMSEALGINVTDMKQSLKERFFGRLNKVLHSLLSGGNKVRAFNGWVMPVLMYSFGVLKWTQTELDALDRRVRTLLTANRMHHPRSSVMRLYIPRKCGGRGFLNAKSLHNREMCSLREYFLKVEVGMHRDVVAVDKGLTPLSMAKENWRKPEVLTTDDRKEVWQGKELHGRFYRALHGPDVDFLASVSWLRFGDLFGETEGFVCAIMDEVMLTNNYRKYIMKDGTVDVCRACHRPGESIRHIISGCSRLANGEYLHRHNQVARIIHQQLALKYKLVESEVPYYKYVPDPVLEKDHVTLYWDQSIITDRTIVANKPDIVVIDRSARRVMIVDVTIPHDENLVKAEKEKQIKYLDLAHEVVDMWNVNSAIIVPIVVTANGLIAKSLDDHLSRLSLGGWIKGLIQKAVLLDTARIVRRFLSLEP

SEQ ID NO: 29478 - protein, 1202 aa, Noctua fimbriata
MITRAAYRRARLPPPDPSLSSASPPPESSPIVSAVTPAVAVASSSSDEYFSPPTSPTSVRRQGRGRPPRSLGLRGHPAPSRVPAAGGCVQRMRWTHSINENVMRAYYGSTEGGTNLTAYRVGMLSLFQVLEPTVNVSAQRLSDQVRVIQRNHMLDDAVLDRLRSEVLSNRIVLTPAQTAVQASVIDATPPRFNPAVVEEDDRVAVVSSQCNDRLRSALEDALREYRSTPTELRPRLPRLPMHNKNRALVCALDSQLENIFESSENLVDTHSILYCGAVAACRLANVKFPNFDVATRPKPAVPAWQRRIERRIDEARVLIGKLHCFREGNTRPRVMRFVRRAFSGTGISPQEYMSRVTERIDFLKQKVYAWANRIRRYKRRVDRYSQNRMFQSDERWVYRAWERPELNMTDVCRPDDAATSSFWRSIWSVPVCHTEADWMRDVERVCEPIPEMEPILITRLDIARAVRPLPNWKSPGPDGLHNFWLKWLSSSHTCLASQFQSSLESGSLPQFLTTGVTHLLHKSGSPAEPKNYRPITCLSTVYKLLTSILRAKINTHIDKNSIMSASQNGCRSGSRGTKELLLIDMAISQQVRRSRKDLSTCWIDYKKAYDSVPHTWLMRVLELYKIDATLRAFLESCMGQWRTVLRYPGCGQIQGNDEPVWIKRGIFQGDSLSPLWFCLALNPLSTLLEDSGLGYRLRRGGQVISHLLYMDDLKLFAPNKLQLMELLKVTETFSSAIRMEFGVDKCAVMYVKQGEIMESEGIQLSDSIHLRTLSSTESYKYLGMSEALGINVTDMKQSLKERFFGRLNKVLHSLLSGGNKVRAFNGWVMPVLMYSFGVLKWTQTELDALDRRVRTLLTANRMHHPRSSVMRLYIPRKCGGRGFLNAKSLHNREMCSLREYFLKVEVGMHRDVVAVDKGLTPLSMAKENWRKPEVLTTDDRKEVWQGKELHGRFYRALHGPDVDFLASVSWLRFGDLFGETEGFVCAIMDEVMLTNNYRKYIMKDGTVDVCRACHRPGESIRHIISGCSRLANGEYLHRHNQVARIIHQQLALKYKLVESEEPYYKYVPDPVLEKDHVTLYWDQSIITDRTIVANKPDIVVIDRSARRVMIVDVTIPHDENLVKAEKEKQIKYLDLAHEVVDMWNVNSAIIVPIVVTANGLIAKSLDDHLSKLSLGGWIKGLIQKAVLLDTARIVRRFLSLEP

SEQ ID NO: 29479 - protein, 1202 aa, Noctua fimbriata
MITRAAYRRARLPPPDPSLSSASPPPESSPIVSAVTPAVAVASSSSDEYFSPPTSPTPVRRQGRGRPPRSLGLRGHLAPSRVPAAGGCVQRMRWTHSINENVMRAYYGSTEGGTNLTAYRVGMLSLFQVLEPTVNVSAQRLSDQVRVIQRNHMLDDAVLDRLRSEVLSNRIVLTPAQTAVQASAIDATPPRFNPAVVEEDDRVAVVSSQCNDRLRSALEDALREYRSTPTELRPRLPRLPMHNKNRALVCALDSQLENIFESSENLVDTHSILYCGAVAACRLANVKFPNCDVATRPKPAVPAWQRRIERRIDGARVLIGKLHCFREGNTRPRVMRFVRRAFSGTGISPQEYMSRVTERIDFLKQKVYAWANRIRRYKRRVDRYSQNRMFQSDERWVYRAWERPELNMTDVCRPDDAATSSFWRSIWSVPVCHTEADWMRDVERVCEPIPEMEPILITRLDIARAVRPLPNWKSPGPDGLHNFWLKWLSSSHTCLASQFQSSLESGSLPQFLTTGVTHLLHKSGSPAEPKNYRPITCLSTVYKLLTSILRAKINTHIDKNSIMSASQNGCRSGSRGTKELLLIDMAISQQVRRSRKDLSTCWIDYKKAYDSVPHTWLMRVLELYKIDATLRAFLESCMGQWRTVLRYPGCGQIQGNDEPVWIKRGIFQGDSLSPLWFCLALNPLSTLLEDSGLGYRLRRGGQVISHLLYMDDLKLFAPNKLQLMELLKVTETFSSAIRMEFGVDKCAVMYVKQGEIMESEGIQLSDSIHLRTLSSTESYKYLGMSEALGINVTDMKQSLKERFFGRLNKVLHSLLSGGNKVRAFNGWVMPVLMYSFGVLKWTQTELDALDRRVRTLLTANRMHHPRSSVMRLYIPRKCGGRGFLNAKSLHNREMCSLREYFLKVEVGMHRDVVAVDKGLTPLSMAKENWRKPEVLTTDDRKEVWQGKELHGRFYRALHGPDVDFLASVSWLRFGDLFGETEGFVCAIMDEVMLTNNYRKYIIKDGTVDVCRACHRPGESIRHIISGCSRLANGEYLHRHNQVARIIHQQLALKYKLVESEVPYYKYVPDPVLEKDHVTLYWDQSIITDRTIVANKPDIVVIDRSARRVMIVDVTIPHDENLVKAEKEKQIKYLDLAHEVVDMWNVNSAIIVPIVVTANGLIAKSLDDHLSKLSLGGWIKGLIQKAVLLDTARIVRRFLSLEP

SEQ ID NO: 29480 - protein, 1202 aa, Noctua fimbriata
MLTRAAARRARLPPPDPSLSSASPPPESSHIVSAVTPAVAVASSSSDEYFSPPTSPTPVRRQGRGRPPRSLGLRGHPAPSRVPAAGGCVQRMRWTHSINENVMRAYYGSTEGGTNLTAYRVGMLSLFQVLEPTVNVSAQRLSDQVRVIQRNHMLDDAVLDRLRSEVLSNRIVLTPAQTAVQASVIDATPPRFNPAVVEEDDRVAVVSSQCNDRLRSALEDALREYRSTPTELRPRLPRLPMHNKNRALVCALDSQLENIFENSENLVDTHSILYCGAVAACRLANVKFPNCDVATRPKPAVPAWQRRIERRIDGARVLIGKLHCFREGNTRPRVMRFVRRAFSGTGISPQEYMSRATERIDFLKQKVYAWANRIRRYKRRVDRYSQNRMFQSDERWVYRAWERPELNMTDVCRPDDAATSSFWRSIWSVPVCHTEADWMCDVERVCEPIPEMEPILITPLDIARAVRPLPNWKSPGPDGLHNFWLKWLSSSHTCLASQFQSSLESGSLPQFLTTGVTHLLHKSGSPAEPKNYRPITCLSTVYKLLTSILRAKINTHIDKNSIMSASQNGCRNGSRGTKELLLIDMAISQQVRRSRKDLSTCWIDYKKAYDSVPHTWLMRVLELYKIDATLRAFLESCMGQWRTVLRYPGCRQIQGNDEPVWIKRGIFQGDSLSPLWFCLALNPLSTLLEDSGLGYRLRRGGQVISHLLYMDDLKLFAPNELRLMELLKVTETFSSAIRMEFGVDKCAVMYVKQGEIMESEGIQLSDSIHLRTLSSTESYKYLGMSEALGINVTDMKQSLKERFFGRLNKVLHSLLSGGNKVRAFNGWVMPVLMYSFGVLKWTQTELDALDRRVRTLLTANRMHHPRSSVMRLYIPRKCGGRGFLNAKSLHNREMCSLREYFLKVEVGMHRDVVAVDKGLTPLSMAKENWRKPEVLTTDDRKEVWQGKELHGRFYRALHGPDVDFLASVSWLRFGDLFGETEGFVCAIMDEVMLTNNYRKYIMKDGTVDVCRACHRPGESIRHIISGCSRLANGEYLHRHNQVARIIHQQLALKYKLVESEVPYYKYVPDPVLEKDHVTLYWDQSIITDRTIVANKPDIVVIDRSARRVMIVDVTIPHDENLVKAEKEKQIKYLDLAHEVVDMWNVNSAIIVPIVVTANGLIAKSLDDHLSRLSLGGWIKGLIQKAVLLDTARIVRRFLSLEP

SEQ ID NO: 29481 - protein, 1206 aa, Noctua fimbriata
MITRSRAKQLQEAHTSSPGSSLSSASQPPRRATSVSTVSPVAAVASSSSDEFFSPPSTPPPSPRRRGRGRPPAGLGPRGQPAPNRVPAAGGNVSRMRWTQSINEQVMRAYYGATEGGTNLTAYRVGMLSLFQVLEPTVNVSAQRLSDQVRVIQRNHMLDDAVLDRLRSEVLSNRIVLTPAQTAVQASVIDATPPRFNPAVVEEDDRVAVVSSQCNDRLRSALEDALREYRSTPTELRPRLPRLPMHNKNRALVCALDSQLENMFESSENLVDTHSILYCGAVAACRLANVKFPNCDVATRPKPAVPAWQRRIERRIDGARVLIGKLHCFREGNTRPRVMRFVRRAFSGTGISPQEYVSRVTERIDFLKQKVYAWANRIRRYKRRVDRYSQNRMFQSDERWVYRAWERPELNMTDVCRPDDAATSSFWRSIWSVPVCHTEADWMRDVERVCEPIPEMEPILITPLDIARAVRPLPNWKSPGPDGLHNFWLKWLSSSHTCLASQFQSSLESGSLPQFLTTGVTHLLHKSGSPAEPKNYRPITCLSTVYKLLTSILRAKINTHIDKNSIMSASQNGCRNGSRGTKELLLIDMAISQQVRRSRKDLSTCWIDYKKAYDSVPHTWLMRVLELYKIDATLRAFLESCMGQWRTVLRYPGCRQIQGNDEPVWIKRGIFQGDSLSPLWFCLALNPLSTLLEDSGLGYRLRRGGQVISHLLYMDDLKLFAPNKLRLMELLKVTETFSSAIRMEFGVDKCAVMYVKQGEIMESEGIQLSDSIHLRTLSSTESYKYLGMSEALGINVTDMKQSLKERFFGRLNKVLHSLLSGGNKVRAFNGWVMPVLMYSFGVLKWTQTELDALDRRVRTLLTANRMHHPRSSVMRLYIPRKCGGRGFLNAKSLHNREMCSLREYFLKVEVGMHRDVVAVDKGLTPLSMAKENWRKPEVLTTDDRKEVWQGKELHGRFYRALHGPDVDFLASVSWLRFGDLFGETEGFVCAIMDEVMLTNNYRKYIMKDGTVDVCRACHRPGESIRHIISGCSRLANGEYLHRHNQVARIIHQQLALKYKLVESEVPYYKYVPDPVLEKDHVTLYWDQSIITDRTIVANKPDIVVIDRSARRVMIVDVTIPHDENLVKAEKEKQIKYLDLAHEVVDMWNVNSAIIVPIVVTANGLIAKSLDDHLSRLSLGGWIKGLIQKAVLLDTARIVRRFLSLEP

SEQ ID NO: 29482 - protein, 1085 aa, Noctua fimbriata
MRWTHSINENVMRAYYGSTEGGTNLTAYRVGMLSLFQVLEPTINVSAQRLSDQVRVIQRNHMLDDAVLDRLRSEVLINRIVLTPAQTAVQALVIDVTPPRFNPAVVEEDDRVAVVSSQCNDRLRSALEDALREHRSTPTELRPRLPRLPMHNKNRALVCALDSQLKNLFESSKNLVDTHSILYCGAVAACRLANVKFPNCDVATRPKPAVPAWQRRIECRINGARVLIGKLHCFREGNTRPRVMRFVRRAFSGTGISPQEYMSRVTERIDFLKQKVYAWANRIRRYKRRVDRYSQNRMFQSDERWVYRAWERPDQNMTDVCRPDDAATSSFWRSIWSVPVCHTEADWMRDVEQVCEPIPEMEPILITPLDVARAVRPLPNWKSTGPDGLHNFWLKWLSSSHTCLASQFQSSLESGSLPQFLTTGVTHLLHKSGSPAEPKNYRPITCLSTVYKLLTSILRAKINTHIDKNSIMSASQNGCRNGSHGTKELLLIDMAISQQVRRSRKDLSTCWIDYKKAYDSVPHTWLMRVLELYKIDATLRAFLESCMGQWRTVLRYPGCRQIQGNDEPVWIKRGIFQGDTLSPLWFCLALNPLSTLLEDSGLGYRLRRGGQVISHLLYMDDLKLFAPNKLRLMELLKVTETFSSAIRMEFGVDKCAVMYVKQGEIMESEGIQLSDSIHLRTLSSTESYKYLGMSEALGINVTDMKQSLKERFFGRLNKVLHSLLSGGNKVRAFNGWVMPVLMYSFGVLKWTQTELDALDRRVRTLLTANRMHHPRSSVMRLYIPRKCGGRGFLNAKSLHNREMRSLRQYFLKVEVGMHRDVVAVDKGLTPLSMAKENWRKPEELTTDDRKEVWQGKELHGRFYRALHGPDVDFLASVSWLRFGDLFGETEGFVCAIMDEVMLTNNYRKYIMKDGTVDVCRVCHRPGESIRHIISGCSRLANGEYLHRHNQVARIIHQQLALKYKLVESEVPYYKYVPDPVLEKDHITLYWDQSIITDRTIVANKPDIVVIDRSARRVMIVDVTIPHDENLVKAEKEKQIKYLDLAHEVVDMWNVNSAIIVPIVVTANGLIAKSLDDHLSKLSLGG

SEQ ID NO: 29483 - protein, 868 aa, Noctua fimbriata
MRFVRRAFSGTGISPQEYMSRVTERIDFLKQKVYAWANRIRRYKWRVDRYSQNRMFQSDERWVYRAWERPELNMTDVCRPDDAATSSFWRSIWSVPVCHTEADWMRDVERVCESIPEMEPILITPLDIARAVRPLPNWKSPGPDGLHNFWLKWLSSSHTCLASQFQSSLESGSLPQFLTTGVTHLLHKSGSPAEPKNYRPITCLSTVYKLLTSILRAKINTHIDKNSIMSASQNGCRNGSRGTKELLLIDMAISQQVRRSRKDLSTCWIDYKKAYDSVPHTWLMRVLELYKIDATLRAFLESCMGQWRTVLRYPGCRQIQGNDEPVWIKRGIFQGDSLSPLWFCLALNPLSTLLEDSGLGYRLRRGGQVISHLLYMDDLKLFAPNKLQLMELLKVTETFSSAIRMKFGVDKCAVMYVKRGEIMESEGIQLSDSIHLRSLSSSESYKYLGMSEALGINVTDMKQSLKERFFGRLNKVLHCLLSGGNKVRAFNGWVMPVLMYSFGVLKWTQTELDALDRRVRTLLTANRMHHPRSSVMRLYIPRKCGGRGFLNAKSLHNREMCSLREYFLKVEVGMHRDVVAVDKGLTPLSMAKENWRKPEVLTTDDRKEVWQGKELHGRFYRALHGPDVDFLASVSWLRFGDLFGETEGFVCAIMDEVMLTNNYRKYIMKDGTVDVCRACHRPGESIRHIISGCSRLANGEYLHRHNQVARIIHQQLALKYKLVESEVPYYKYVPDPVLEKDHVTLYWDQSIITDRTIVANKPDIVVIDRSARRVMIVDVTIPHDENLVKAEKEKQIKYLDLAHEVVDMWNVNSAIIVPIVVTANGLIAKSLDDHLSKLSLGGWIKGLIQKAVLLDTARIVRRFLSLEP

SEQ ID NO: 29484 - protein, 975 aa, Noctua fimbriata
MRFVNIDPLLPNLGPDYHGYPCMLVCALDSQLKNIFESSENLVETHSILYCGAVAACRLANVKFPNCDVATRPKPAVPAWQYRIERRIDGARVLIGKLHCFREGNTRPRVMRFVRRAFSGTGISPQEYMSLVTERIDFLKQKVYAWANRIRRYKRRVDRYSQNRMFQSDERWVYRAWERPELNMTDVCRPDDTATSSFWRSIWSVPVCHTEADWMRDVERVCEPIPEMEPILITPLDIARAVRPLPNWKSPGPDGLHNFWLKWLSSSHTCLASQFQSSLESGSLPQFLTTGVTHLLHKSGSPAEPKNYRPITCLSTVYKLLTSILRAKINTHIDKNSIMSASQNGCRNGSRGTKELLLIDMAISQQVRRSRKDLSTCWIDYKKAYDSVPHTWLMRVLELYKIDATLRAFLESFMGQWRTVLRYPGCRQIQGNDEPVWIKRGIFQGDSLSPLWFCLALNPLGTLLEDSGLGYRLRRGGQVISHLLYMDDLKLFAPNKLQLMELLKVTENFSSAIRMEFGVDKCAVMYVKQGEIMESEGIQLSDSIQLRTLSSTESYKYLGMSEALGINVTDMKQSLKERFFGRLNKVLHSLLSGGNKVRAFNGWVMPVLMYSFGVLKWTQTELDALDRRVRTLLTANRMHHPRSSVMRLYIPRKCGGRGFLNAKSLHNREMCSLREYFLKVEVGMHRDVVAVDKGLTPLSMAKENWRKPEVLTTDDRKEVWQGKELHGRFFRALHGPDVDFLASVSWLRFGDLFGETEGFVCAIMDEVMLTNNYRKYIMKDGTVDVCRACHRPGESIRHIISGCSRLANGEYLHRHNQVARIIHQQLALKYKLVESEVPYYKYVPDPVLEKDHVTLYWDQSIITDRTIVANKPDIVVIDRSARRVMIVDVTIPHDENLVKAEKEKQIKYLDLAHEVVDMWNVNSVPIVVTANGLIAKSLDDHLSKLSLGGWIKGLIQKAVLLDTARIVRRFLSLEP

SEQ ID NO: 29485 - protein, 962 aa, Atethmia centrago
MHKKNRALMCALDSQLKVFFESSEDLVDTHSILYCAAVAACRLANVKFPNSDGATRPKPAVPAWQCRIERRIDKARVLIGKLYCFREGNTRPRVMRFVRRAFSGTGISPREYMSHITERIDFLKQKVCAWASRIRRYKRRVDRYTQNRMFQSDERWVYRAWERPKQNVTDVCRPDDATTTAFWRSIWSVPVCHVEADWMRDVERVCETIPEMEVVIITPSDIARAVRPLPNWKSPGPDGLHNFWLKWLTSSHTCLASQFQSSLESGSLPQFMTTGITHLLHKSGSPAEPKNYRPITCLSTVYKLLTSILRAKINTHIDSNSIMSASQNGCRNGSRGTKELLLIDMAISQQVRRSRKDLSTCWIDYKKAYDSVPHTWLMRVLELYKIDTTLRTFLESCMGQWRTVLRYPGCRQIQGNDEPVWIKRGIFQGDSLSPLWFCLALNPLSMQLEDSGLGYRLRRGGQIISHLLYMDDLKIFAPNKLQLMKLLKVTETFSSAIRMEFGVDKCAVMHVKRGEIMESEGIQLSDSIHLRSLSSPESYKYLGMSEALGINVTDMKQSLKERFFGRLKKVLISLLSGGNKVRAFNSWVMPVLTYSFGILKWTQTELDALDRRVRTLLTANRMHHPRSSVMRLYIPRKCGGRGFLNAKTLHNREICSLREYFLKTEVGMHRDVVAVDKGLTPLSMAKENWCKPVVLTTDDRKEIWQSKELHGRFYRALHEPDVDLLASVSWLRFGDLFGETEGFVCAIMDEVILTNNYRRHIMKDGTVDVCRACHRPGESIRHIISGCSRLANGEYLHRHNQVARIIHQQLALKYKLVNSEVPYYKYVPDPVLENDHVTLYWDRSIITDRTIVANKPDIVVIDRLARRAMIVDVTIPHDDNLVKAEKEKQIKYLDLAHEVVDMWNVNSAVIVPIVVTANGLMARSLNHHLSRLALDGWIKGLIQKAVLLDTARIVRRFLSLEP

SEQ ID NO: 29486 - protein, 1202 aa, Atethmia centrago
MLTRSAARARPPPPDSSLSSASPPPVPSPTVSAVTTPAAVVASSSSDEYFSPPTSPTPVRRQGRGRPPKSLGLRGQLAPSRVPAAGGCVQRMRWTQSMNENVMRAYYGSTEGGTNLTAYRVRMLSLFQKLEPTVNVSAQRLSDQVRVIQRNHRLDDAALDRLRSEVLSNHIVSTPAQTATHAPIINAIPPRSNHDVEEEDDRVATVSSQCNVRLRSALEDAFREYRSTPTELRPRLPRLPMHKKNRALVCTLDPLLKDFFESSEDLVDTHSILYCAAVAACRLANVKFPNCDGATRPKPAVPAWQCRIERRIDGARVLIGKLYCFREGNTRPRVMRFVRRAFSGTGISPREYMSRVTERIDFLKQKVCAWASRIRRYKRRVDRYTQNRMFQSDERWVYRAWERPEQNETDVCRPDDATTTAFWRSIWSVPVCHAEADWMRDVERVCETIPEMDVVIITPSDIARAVRPLPNWKSPGPDGLHNFWLKWLTSSHTCLASQFQSSLESGSLPQFLTTGITHLLHKSGSPAEPKNYRPITCLSTVYKLLTSILRAKINTHIDSNSIMSASQNGCRNGSRGTKELLLIDMAISQQVRRFRKDLSTCWIDYKKAYDSVPHTWLMRVLEFYKIDTTLRTFLESCMGQWRTVLRYPGCRQIQGNDEPVWIKRGIFQGDSLSPLWFCLALNPLSTLLEDSGLGYRLRRGGQVISHLLYMDDLKIFAPNKLQLMELLKVTETFSSAIRMEFGVDKCAVMHVKRGEIMESEGIQLSDSIHLRSLSSPESYKYLGMSEALGINVTDMKQSLKERFFGRLKKVLISPLSGGNKVRAFNGWVMPVLMYSFGILKWTQTELDALDRRVRTLLTANRMHHPRSSVMRLYIPRKCGGRGFLNAKTLHNREICSLREYFLKTEVGMHRDVVAVDKGLTPLSMAKENWCKPVILTTDDRKEIWQNKELHGRFYRALHEPDVDFLASVSWLRFGDLFGETEGFVCAIMDEVILTNNYRRHIMKDGTVDVCRACHRPGESIRHIISGCSRLANGEYLHRHNQVARIIHQQLALKYKLVNSEVPYYKYAPDPVLENDHVTLYWDRSIITDRTIVANKPDIVVIDRLARRAMIVDVTIPHDENLVKAEKEKQIKYLDLAHEVVDMWNVDSAVIVPIVVTANGLMAESLNHHLSRLSLGGWIKGLIQKAVLLDTARIVRRFLSLES

SEQ ID NO: 29487 - protein, 1202 aa, Atethmia centrago
MLTRSAARARPPPPDSSLSSASPPPVPSSTVSAVTTPAAVVASSSSDEYFSPPTSPTPVRRQGRGRPPKSLGLRGQLAPSRVPAAGGCVQRMRWTQSMNENVMRAYYGSTEGGTNLTAYRVRMLSLFQKLEPTVNVSAQRLSDQVRIIQRNHRLDDAALDRLRSEVLSNHIVSTPAQTATHAPIINAIPPRSNHDVEEEDDKVATVSSQCNVRLRSVLEDAFREYRSTPTELRPRLPRLPMHKKNRALVCALDSLLKDFFESSEDLVDTHSILYCAAVAACRLANVKFPNCDGATRPKPAVPAWQCRIERRIDGARVLIGKLYCFREGNTRPRVMRFVRRAFSGTGISPREYMSRVTERIDFLKQKVCAWASRIRRYKRRVDRCTQNRMFQSDERWVYRSWERPEQNETDVCRPDDATTTAFWRSIWSVPVCHAEADWMRDVERVCETIPEMEVVIITPSDIARAVRPLPNWKSPGPDGLHNFWLKWLTSSHTCLASQFQSSLESGSLPQFLTTGITHLLHKSGSPAEPKNYRPITCLSTVYKLLTSILRAKINTHIDSNSIMSASQNGCRNGSRGTKELLLIDMAISQQVRRFRKDLSTCWIDYKKAYDSVPHTWLMRVLELYKIDTTLRTFLESCMGQWRTVLRYPGCRQIQGNDEPVWIKRGIFQGDSLSPLWFCLALNPLSTLLEDSGLGYRLRRGGQVISHLLYMDDLKIFAPNKLQLMELLKVTETFSSAIRMEFGVDKCAVMHLKRGEIMESEGIQLSDSIHLRSLSSPESYKYLGMSEALGINVTDMKQSLKERFFGRLKKVLISPLSGGNKVRAFNGWVMPVLMYSFGILKWTQTELDALDRRVRTLLTANRMHHPRSSVMRLYIPRKCGGRGFLNAKTLHNREICSLREYFLKTEVGMHRDVVAVDKGLTPLSMAKENWCKPVILTTDDRKEIWQNKELHGRFYRALHEPDVDFLASVSWLRFGDLFGETEGFVCAIMDEVILTNNYRRHIMKDGTVDVCRACHRPGESIRHIISGCSRLANGEYLHRHNQVARIIHQQLALKYKLVNSEVPYYKYAPDPVLENDHVTLYWDRSIITDRTIVANKPDIVVIDRLARRAMLVDVTIPHDENLVKAEKEKQIKYLDLAHEVVDMWNVDSAVIVPIVITANGLMAENLNYHLSRLSLGGWIKGLIQKAVLLDTARIVRRFLSLES

SEQ ID NO: 29488 - protein, 962 aa, Atethmia centrago
MHKKNRALMCALDSQLKVFFESSEDLVDTHSILYCAAVAACRLANVKFPNSDGATRPKPAVPAWQCRIERRIDKARVLIGKLYCFREGNTRPRVMRFVRRAFSGTGISPREYMSHITERIDFLKQKVCAWASRIRRYKRRVDRYTQNRMFQSDERWVYRAWERPKQNVTDVCRPDDATTTAFWRSIWSVPVCHVEADWMRDVERVCETIPEMEVVIITPSDIARAVRPLPNWKSPGPDGLHNFWLKWLTSSHTCLASQFQSSLESGSLPQFMTTGITHLLHKSGSPAEPKNYRPITCLSTVYKLLTSILRAKINTHIDSNSIMSASQNGCRNGSRGTKELLLIDMAISQQVRRSRKDLSTCWIDYKKAYDSVPHTWLMRVLELYKIDTTLRTFLESCMGQWRTVLRYPGCRQIQGNDEPVWIKRGIFQGDSLSPLWFCLALNPLSMQLEDSGLGYRLRRGGQIISHLLYMDDLKIFAPNKLQLMKLLKVTETFSSAIRMEFGVDKCALMHVKRGEIMESEGIQLSDSIHLRSLSSPESYKYLGMSEALGINVTDMKQSLKERFFGRLKKVLISLLSGGNKVRAFNSWVMPVLTYSFGILKWTQTELDALDRRVRTLLTANRMHHPRSSVMRLYIPRKCGGRGFLNAKTLHNREICSLREYFLKTEVGMHRDVVAVDKGLTPLSMAKENWCKPVVLTTDDRKEIWQSKELHGRFYRALHEPDADFLASVSWLRFGDLFGETEGFVCAIMDEVILTNNYQRHIMKDGTVDVCRACHRPGESIRHIISGCSRLANGEYLHRHNQVARIIHQQLALKYKLVKSEVPYYKYVPDPVLENDHVTLYWDRSIITDRTIVANKPDIVVIDRLARRAMIVDVTIPHDDNLVKAEKEKQIKYLDLAHEVVDMWNVNLAVIVPIVVTANGLMARSLNHHLSRLALDGWIKGLIQKAVLLDTARIVRRFLSLEP

SEQ ID NO: 29489 - protein, 1202 aa, Atethmia centrago
MLTRSAARARPPPPDSSLSSASPPPVPSPTVSAVTTPAAVVASSSSDEYFSPPTSPTPVRRQGRGRPPKSLGLRGQLAPSRVPAAGGCVQRMRWTQSMNENVMRAYYGSTEGGTNLTAYRVRMLSLFQKLEPTVNVSAQRLSDQVRVIQRNHRLDDAALDRLRSEVLSNHIVSTPAQTATHAPIINAIPPRSNHDVEEEDDRVATVSSQCNVRLRSALEDAFREYRSTPTELRPRLPRLPMHKKNRALVCTLDSLLKDFFESSEDLVDTHSILYCAAVAACRLANVKFPNCDGATRPKPAVPAWQCRIERRIDGARVLIGKLYCFREGNIRPRVMRFVRRAFSGTGISPREYMSRVTERIDFLKQKVWAWASRIRRYKRRVDRYTQNRMFQSDERWVYRAWERPEQNETDVCRPDDATTTAFWGSIWSVPVCHAEADWMRDVERVCETIPEMDVVIITPSDIARAVRPLPNWKSPGPDGLHNFWLKWLTSSHTCLASQFQSSLESGSLPQFLTTGITHLLHKSGSPAEPKNYRPITCLSTVYKLLTSILRAKINTHIDSNSIMSASQNGCRNGSRGTKELLLIDMAISQQVRRFRKDLSTCWIDYKKAYDSVPHTWLMRVLEFYKIDTTLRTFLESCMGQWRTVLRYPGCRQIQGNDEPVWIKRGIFQGDSLSPLWFCLALNPLSTLLEDSGLGYRLRRGGQVISHLLYMDDLKIFAPNKLQLMELLKVTETFSSAIRMEFGVDKCAVMHVKRGEIMESEGIQLSDSIQLRSLSSPESYKYLGMSEALGINVTDMKQSLKERFFGRLKKVLISPLSGGNKVRAFNGWVMPVLMYSFGILKWTQTELDALDRRVRTLLTANRMHHPRSSVMRLYIPRKCGGRGFLNAKTLHNREICSLREYFLKTEVGMHRDVVAVDKGLTPLSMAKENWCKPVILTTDDRKEIWQNKELHGRFYRALHEPDVDFLASVSWLRFGDLFGETEGFVCAIMDEVILTNNYRRHIMKDGTVDVCRACHRPGESIRHIISGCSRLANGEYLHRHNQVARIIHQQLALKYKHVNSEVPYYKYAPDPVLENDHVTLYWDRSIITDRTIVANKPDIVVIDRLARRAMIVDVTIPHDENLVKAEKEKQIKYLDLAHEVVDMWNVDSAVIVPIVVTANGLMAESLNHHLSRLSLGGWIKGLIQKAVLLDTARIVRRFLSLES

SEQ ID NO: 29490 - protein, 1110 aa, Mesoligia furuncula
MRWTQSMNENVMRAYYGSTEGGINLTAYRDRMLSLFQELEPTVNVSAQRLSDQVRVIQRNHRLDDIALDRLRSEVLSNHIVSTSAQTAAQVSTVDAIPPRFNRVEEESDRVDTVSSQCNVRLRSALEDALREYRSTPTELRPRLPRLPMHKKNRALMCALDSQLKNFFESSEDLVDTHSILYCAAVAACRLANVKFSSCDGATRPKPAVPAWQRRIERRIDGARVLIGKLYCFREGNTRPRVMRFVRRAFSGTGISPREYMSRVTERIDFLKQKVCAWASRIRRYKRRVDRYTQNRMFQSDERWVYRAWERPEQNVTDVCRPDDAATSAFWCSIWSVPVCHTEAGWMQDVERVCESVPEMEKVLITPSDVARAVRPLSNWKSPGPDGLHNFWLKWLISSHTCLASQFQSSLESGSLPQFLTTGVTHLLHKSGSPAEPKNYRPITCLSTVYKLLTSILRAKINKHIESNSIMSASQNGCRNGSRGTKELLLIDMAISQQVRRSRKDLSTCWIDYKKAYDSVPHTWLMRVLELYKIDATLRTFLESCMGQWKTVLRYPGCRQIQGNDEPVWIKRGIFQGDSLSPLWFCLALNPLSTLLEDSGLGYRLRRGGQVISHLLYMDDLKLFAPNKLRLMELLKVTKTFSSAIKMEFGVDKCAVMHVKRGEIMESEGIQLSDSISLRSLSSSESYKYLGMSEALGINDADMKQSLKERFFCRLKKVLISLLSGGNKVRAFNGWVMPVLMYSFGILKWTQTELDALDRRVRTLLTANRMHHPRSSVMRLYIPRKCGGRGFLNAKTLHNREVCSLREYFLKAEVGMHRDVVAVDKGLTPLSMAKENWRKPVVLSTDDRKRVWQSKELHGRFYRALHEPGVDFIASVSWLRFGDLFGETEGFVCAIMDEVILTNNYRRHIMKDGTVDVCRACHRPGESIRHIISGCSRLANGEYLHRHNQVTRIIHQQLALKYKLVDSEVPYYKYVPDPVLENDHVTLYWDRSIITDRTIVANKPDIVVIDRLARRTMIVDVTIPHDGNLVKAEKEKQIKYLDLAHEVVDMWNVSSAIIVPIVVSANGLMAESLDQHLSRLSLGGWIKGLIQKAVLLDTARIVRRFLSLEP

SEQ ID NO: 29491 - protein, 1111 aa, Xestia c-nigrum
MKWTQLMNENVMRAYYGSTEGGTNLTAYRVRMLSLFQDLEPTVNASAQRLSDQVRVIQRNHLLDGAALDRLRSEVLSNRIILTPAQTAVQASSIDANPPRSNSAVVEEDDRVATVSSQCNDRLRSALEDALHEYRSTSAELRPRLPRLPMHKKNRALVCALDSQLKNVFESSEDLVDTHSILFCGAVAACRLANVKFPNYDLATRPKPAVPAWQRRIERRIDGARVLIGKLHCFREGNTRPRVMRFVRRAFSGTEISPQEYMSRVTERIDFLKQKVYAWASRIRRYKRRVDRYSQNRMFQSDERWVYRAWERPQQNMTDVCRPDDAATSSFWRSIWSVPVCHSEADWMRDVERVCEPIPTMEPILITPLDIARAVRPLPNWKSPGPDGLHNFWLKWFSSSHTCLASQFQSSLESGSLPQFLTTGITHLLHKSGSPAEPKNYRPITCLSTVYKLLTSILRTKINTHVDSNSIMSASQNGCRNGSRGTKELLLIDMAISQQVRRARKDLSTCWIDYKKAYDSVPHSWLRRVLELYKIDATLRTFLESCMGQWRTVLRYQGCRQIQGNDEPVWIKRGIFQGDSLSPLWFCLALNPVSTLLENSGLGYRLRKDGQVISHLLYMDDLKLFAPNKLQLMELLKVTETFSSAIGMEFGVDKCAVMYVKRGKIMGSEGLQLSDSIHLRSLSSFESYKYLGMSEALGINVTDMKQSLKERFFGRLKKVLNSLLSGGNKVRAFNGWVMPVLMYSFGILKWTQTELDALDRRVRTLLTENRMHHPRSSVMRLYIPRKCGGRGFLNAKTLHNREVCSLREYFLKADVGMHRDVVAVDKGLTPLSLAKENWRKPLVLTTDDRKKEWQGKELHGRFYRALHGPDVDFLASVSWLRFGDLFGETEGFVCAIMDEVMLTNNYRKYIMKDGTVDVCRACYCPGESIRHIISGCSRLANGEYLHRHNQVARIIHQQLALKFKLVESEVPYYKYVPDPVLVKDHVTLYWDQSIITDRTIVANKPDIVVIDRSARRVMIIDVTIPHDENLVKAEKEKQMKYLDLAHEVRDMWNMNSVIIVPIVVTANGLIAKSLDEHLSKLSLGGWTKDLIQKAVLLDTARIVRRFLSLQP

SEQ ID NO: 29492 - protein, 1200 aa, Xestia c-nigrum
MITRAASRRRARLPSPDSSLSSASPPPDPGSPVSTVAAVASSSSDEYFSPPTSPTPVRRAGRGRPPRSLGLRGQQAASRVPATGGCVQRMRWTQSMNENAMRAYYGSTEGGTNLTAYRVRMLSLFQDLEPAVNVSAQRLSDQVRVIQRNHMLDDAALDRLRSEVLSNLIILTPAQTAVQASAIDATPPRSNPAVVEEDGRVATVSSQCNDRLRSALEDALREYRSTPTELRPRLPRLPMHKKNRALVCALDSQLKNVFESSEDLVDTHSILFCGAVAACRLANVKFPNCDLATRPKPAVPVWQRRIERRIDGARVLIGKLYCFREGNTRPRVMRFVRRAFSGTEISPQEYMSRVTERIDFLKQKVYAWASRIRRYKRRVDRYSQNRMFQCDERWVYRAWERPDQNVTDVCHPGDAATSSFWRSIWSVPVCHSEADWMRDVERVCEPIPEMAPVVITSLDIARAVRPLPNWKSPGPDGLHNFWLKWLSSSHTCLASQFQSSLESGSLPQFLTTGVTHLLHKSGSPTEPQNYRPITCLSTVYKLLTSILRTKINTHIDNNSIMSASQNGCRNGSRGTKELLLIDMAISQQVRRSRKDLSTCWIDYKKAYDSVPHSWLMRVLELYKIDATLCTFLKSCMGQWRTVLRYPGCRQIQGNDESVWIKRGIFQGDSLSPLWFCLALNPLSTLLENSGLGYQLRKDGQVISHLLYMDDLKLFAPNKLRLMELLKVTETFSNAIRMEFGVDKCAVMYVKRGEIMESEGLQLSDSIHLRSLSSSESYKYLGMSEALGINVTDMKQSLRERFFGRLKKVLNSLLSGGNKVRAFNGWVMPVLMYSFGILKWTQTELDALDRRVRTLLTENRMHHPRSSVMRLYIPRKCGGRGFLNVKTLHNREVCSLREYFLKAEVGMHRDVVAVDKGLTPLSMAKENWRKPVILTTDDRKKEWQGKVLHGRFYRALHGPDVDFLASVSWLRFGDLFGETEGFVCAIMDEVMLTNNYRKYIMKDGTVDVCRACHCPGESIRHIISGCSRLANGEYLHRHNQVARIIHQQLALKFKLVESEVPYYKYVPDPVLVKDHITLYWDQSIITDRTIVANKPDIVVIDRSARRVMIIDVTIPHDENLVKAEKEKQIKYLDLAHEVRDMWNMNSVIIVPIVVTANGLIAKSLDEHLSKLSLGGWIKGLIQKAVLLDTARIVRRFLSLQP

SEQ ID NO: 29493 - protein, 1198 aa, Xestia c-nigrum
MITRAASRRALIPSPDSSLSSASPPPDPGSPVSPVAAVASSSSDEYFSPPTSPTPVRRAGRGRPLKGLGLRGQQAPSRVPATGGCVQRMKWTQLMNENVMRAYYGSKEGGTNLTAYRVRMLSLFQDLEPTVNASAQRLSDQVRVIQRNHLLDSAALDRLRSEVLSNRIILTPAQTAVQASSIDANPPRSNPVVEEDDRVATVSSQCNDRLRSALEDALHEYRSTSAELRPRLPRLPMHKKNRALVCALDSQLKNVFESSEDLVDTHSILFCGAVAACRLANVKFPNCDLATRPKPAVPAWQRRIERRIDGARVLIGKLHCFREGNTRPRVMRFVRRAFSGTEISPQEYMSRVTERIDFLKQKVYAWASRIRRYKRRVDRYSQNRMFQSDERWVYRAWERPQQNMTDVCRPDDAATSSIWRSIWSVPVSHSEADWMRDVERVCEPIPTMEPILITPLDIARAVRPLPNWKSPGPDGLHNFWLKWFSSSHTCLASQFQSSLKSGSLPQFLTTGITHLLHKSGSPAEPKNYRPITCLSTVYKLLTSILRTKINTHVDSNSIMSASQNGCRNGSRGTKELLFIDMAISQQVRRARKDLSTCWIDYKKAYDSVPHSWLKRVLELYKIDATLRTFLESCMGQWRTVLRYPGCRQIQGNDEPVWIKRGIFQGDSLSPLWFCLALNPVSTLLENSGLGYRLRKDGQVISHLLYMDDLKLFAPNKLQLMELLKVTETFSSAIGMEFGVDKCAVMYVKRGKIMGSEGLQLSDSIHLRSLSSSESYKYLGMSEALGINVTDMKQSLKERFFGRLKKVLNSLLSGGNKVRAFNGWVMPVLMYSFGILKWTQTELDALDRRVRTLLTENRMHHPRSSVMRLYIPRKCGGRGFLNAKTLHNREVCSLREYFLKADVGMHRDVVAVDKGLTPLSMAKENWRKPVVLTTDDRKKEWQGKELHGRFYRALHGPDVDFLASVSWLRFGDLFGETEGFVCAIMDEVMLTNNYRKYIMKDGTVDMCRACHCPGESIRHIISGCSRLANGEYLHRHNQVARIIHQQLALKFKLVESEVPYYKYVPDSVLVKDHVTLYWDQSIITDRTIVANKPDIVVIDRSARRVMIIDVTIPHDENLVKAEKEKQMKYLDLAHEVRDMWNMNSVIIVPIVVTANGLIAKSLDEHLSKLSLGGWIKGLIQKAVLLDTARIVRRFLSLQP

SEQ ID NO: 29494 - protein, 1111 aa, Xestia c-nigrum
MRWTQSMNENAMRAYYGSTEGGTNLTAYRVRMLSLFQDLEPAVNVSAQRLSDQVRVIQRNHMLDDAALDRLRSEVLSNRIILTPAQTVVQASAIDATPPRSNPAVVEEDGRVATVSSQCNDRLRSALEDALREYRSTPTELRPRLPRLPMHKKNRALVCALDSQLKNVFESSEDLVDTHSILFCGAVAACRLANVKFPNCDLATRPKPAVPVWQRRIERRIDGARVLIGKLYCFREGNTRPRVMRFVRRAFSGTEISPQEYMSRVTERIDFLKQKVYAWASRIRRYKRRVDRYSQNRMFQCDERWVYRAWERPDQNVTDVCHPGDAATSSFWRSIWSVPVCHSEADWMRDVERVCEPIPEMAPVVITSLDIARAVRPLPNWKSPGPDGLHNFWLKWLSSSHTCLASQFQSSLESGSLPQFLTTGVTHLLHKSGSPTEPQNYRPITCLSTVYKLLTSILRTKINTHIDNNSIMSASQNGCRNGSRGTKELLLIDMAISQQVRRSRKDLSTCWIDYKKAYDSVPHSWLMRVLELYKIDATLCTFLKSCMGQWRTVLRYPGCRQIQGNDESVWIKRGIFQGDSLSPLWFCLALNPLSTLLENSGLGYQLRKDGQVISHLLYMDDLKLFAPNKLRLMELLKVTETFSNAIRMEFGVDKCAVMYVKRGEIMESEGLQLSDSIYLRSLSSSESYKYLGMSEALGINVTDMKQSLRERFFGHLKKVLNSLLSGGNKVRAFNGWVMPVLMYSFGILKWTQTELDALDRRVRTLLTENRMHHPRSSVMRLYIPRKCGGRGFLNAKTLHNREVCSLREYFLKAEVGMHRDVVAVDKGLTPLSMAKENWRKPVILTTDDRKKEWQGKVLHGRFYRALHGPDVDFLASVSWLRFGDLFGETEGFVCAIMDEVMLTNNYRKYIMKDGTVDVCRACHCPGESIRHIISGCSRLANGEYLHRHNQVARIIHQQLALKFKVVESEVPYYKYVPDPVLVKDHVTLYWDQSIITDRTIVANKPDIVVIDRSARRVMIIDVTIPHDENLVKAEKEKQIKYLDLAHEVRDMWNMNSVIIVPIVVTANGLIAKSLDEHLSKLSLGGWIKGLIQKAVLLDTARIVRRFLSLQP

SEQ ID NO: 29495 - protein, 1203 aa, Omphaloscelis lunosa
MLTRSAARSARLPPPDSPLSSASPPPVPSPIVNAVSTQAAVVASSSSDEYFSPPTSPTPLRRQGRGRPPKSLGLRGQPAPSRVPAAGGCVQRMRWTQSMNENVMRAYYGSTEGGTNLTTYRVRMLSLFQELEPTVNVSAQRLSDQVRVIQRNHRLDDTALDRLRSEVLSNHIVSAREQTAAEASNIDPTPPRFNHGVEEEDDRVATVSSQCNNRLRSALEDAFREYRYTPTELRPRLPRLPMHKKNRALMCALDSQLTNFFESSEDLIDTHSILYCAAVAACRLTNVKFPNCDGATRPKPAVPAWQCRIERRIDGARVLIGKLYCFREGNTRPRVMRFVRRAFSGTEISPQDYMSRVTERIDFLKQKVCAWASRIRRYKRRVDRYTQNRMFQSDERWVYRAWERPEQNVTDVCRPDDAATSAFWRSIWSVPVCHTEAGWMQDVERVCETIPEMDAVFITPLDVARAVRPLPNWKSPGPDGLHNFWLKWLSSSHTCLASQFQSSLESGSLPQFLTTGVTHLLHKSGNPAEPKNYRPITCLSTVYKLLTSILRTKINTHIDSNSIMSVSQNGCRNGSRGTKELLLIDMAISQQVRRSRKDLSTCWIDYKKAYDSVPHTWLMRVLELYKVDTTLRTFLMSCMGQWRTVLRYPGCRRTQGNDEPVWIKRGIFQGDSLSPLWFCLALNPLSTLLEDSGLGFRLRRGGQVISHLLYMDDLKLFAPNKLRLMELLKVTETFSGAIRMEFGVDKCAVMHVKRGEIMESEGIQLSDSIHLRPLSSAENYRYLGMSESLGINVADMKQSLKERFFGRLKKVLISFLSGGNKVRAFNGWVMPVLMYSFGILKWTQTELDALDRRVRTLLTANRMHHPRSSVMRLYIPRKCGGRGFLNAKTLHNREVCSLREYFFKADVGMHRDVVAVDNGLTPLSMAKENWRKPVVLTTDDRKEIWQSKALHGRFYRALHEPSVDFLASVSWLRFGDLFGETEGFICAIMNEVILTNNYRRHIMKDGTVDVCRACHRPGESIRHIISGCSRLANGEYLHRHNQVARIIHQQLALKYKLVDSEVPYYKYVPDPVLENDHATLYWDRSIITDRTIVANKPDIVVIDRLARHAMIVDVTIPHDENLVKAEKEKQIKYLDLAHEVVGMWNVSSAIIVPIVVTANGLMAKSLDHHLSRLSLGGWIKRLIQKAVLLDTARIVRRFLSLQP

SEQ ID NO: 29496 - protein, 1202 aa, Omphaloscelis lunosa
MLTRSAARSARLPPPDSPLSSASPPPVPSPIVNAVSTPAAVVASSSSDEYFSPPTSPTPVRRQGRGRPPRSLGLRGQPAPSRVPAAGGCVQRMRWTQLMNENVMRAYYGSTEGGTNLTAYRVRMLSLFQELEPTVNVSAQRLSDQVRVIQRNHRLDDIALDRLRSEVLSNHIVSTRAQTAAQESNIDPTPPRFNYGVEEDDRVATVSSQCNDRLRSALEDAFREYRYSPTELRPRLPRLPMHKKNRALVCALDSQLTNFFESSEDLIDTHSILYCAAVAACRLANVKFPNYDGATRPKPVVPAWQCRIERRIDGARVLIGKLYCFREGNTRPRVMRFVRRAFLGTGISPQEYMSRVTERIDFLKQKVCAWASRIRRYKRRVDRYTQNRMFQSDERWVYRAWERPEQNVTDVCRPDDAATSAFWRSIWSVPVCHTEAGWMQDVERVCETIPEMDAVFITPLDVARAVRPLPNWKSPGPDGLHNFWLKWLSSSHTRLASQFQSSLESGLLPQFLTTGVTHLLHKSGNPAEPKNYRPITCLPTVYKLLTSILRTKINTHIDSNSIMSASQNGCRNGSRGTKELLLIDMAISQQVRRSRKDLSTCWIDYKKAYDSVPHTWLMRVLELYKVHTTLRTFLMSCMGQWRTVLRYPGCQQTQGNDEPVWIKRGIFQGDSLSPLWFCLALNPLSTLLEGSGLGYRLRRGGQVISHLLYMDDLKLFAPNKLRLMELLKVTETFSGAIRMEFGVDKCAVMHVKRGEIMESEGTQLSDSIHLRSLSSAENYRYLGMSESLGINVADMKQSLKERFFGRLKKVLISFLSGGNKVRAFNGWVMPVLMYSFGILKWTQTELDALDRRVSTLLTTNRMHHPRSSVMRLYIPRKCGGRGFLNAKTLHNREVCSLREYFFKADVGMHRDVVAVDNGLTPLSMAKENWRKPVVLTTDDRKEVWQSKALHGRFYRALHEPGVDFLASVSWLRFGDLFGETEGFICAIMDEVILTNNYRRHIMKDGTVDVCRACHRPGESIRHIISGCSRLANGEYLHRHNQVARIIHQQLALKYKLVDSEVPYYKYVPDPVLENDHVTLYWDRSIITDRTIIANKPDIVVIDRLARRAMIVDVTIPHDENLVKAEKEKQIKYLDLAHEVVDMWNVSSAIIVPIVVTANGLMAESLDQHLSRLSLGGWIKRLIQKAVLLDTARIVRRFLSLQP

SEQ ID NO: 29497 - protein, 1203 aa, Sesamia nonagrioides
MLTRSAARQRARPPSPDSLLSSASPPPVSSATVNAVTTPAAAVALSSSDEYFSPPTSPTPVRRQGRGRPPKSLGLRGHPAPSRVPAAGGCVQRMRWSQTMNENVMRAYYGATEGGTNLTAYRERMLSLFQALEPTVNVSAQRLSDQVRVIQRNHRLDDTALDRLRSEVLSNQIAPTLTQTAALASIIDAVPPRSNHVEEEDDRVETVSSQYNDRLRSTLEDAFREYRSTPTDLRPRLPRLPMHKKNRALVSALDSQLKNVFESSEDLIDTHSILFCAAVAACRLANIKFPNCDEANRPKPAVPAWQHRIERRIDGARVLSGKLYCFREGNTRPRVMRFVRQAFSGTGISPREYLTHVTERIDFLKQKVCAWANRIRRYKRRVDRYTQNRMFQSDERWVYRAWERSELNEADVCRPDVAATSAFWRSIWSVPVCHAEGDWIQNVEQVCEMIPEMDTILITPIDVATAVRSLPNWRSPGPDGLHNFWLKWLSSSHTCLASQFQSSLESGSLPQFLTTGITHLLHKSGSTAEPNNYRPITCLPTVYKVLTSILKAKINKHLDSNSIMSVSQNGCKSGSRGTKELLLIDMAISQQVRRSRKDLSTCWIDYKKAYDSVPHTWLMRVLELYKINTTLRTFLRSCMGQWKTVLRYPGSRRIQGNDEPVWIKRGIFQGDSLSPLWFCLALNPLSTLLEDSGLGYRLKRGGQVISHLLYMDDLKLFAPNKLHLMKLLNVTETFSSGIKMEFGVDKCAVMHVERGQIMESEGITLPDSIHLRSLSSFESYKYLGMSEALGINDADMKQSLKERFFGRLKKVLKSLLSGGNKVRAFNGWVMPVLMYSFGILKWTQTELDALDRRVRTLLTANRMHHPRSSVMRLYIPRKCGGRGFLNAKTLHNREVCSLREHFLKTVVGMHHDVVTVDKGLTPLSMAKENWHKPIILTTDDRKMIWQSKELHGRFYRALHGPDVDFLASVSWLRFGDLFGETEGFVCAIMDEVILTNNYRRYIMKDGTIDVCRACHHPGESIRHIISGCSRLANSEYLHRHNQVARIIHQQLALKYKLVDSEVPYYKYVPDPVLENDHVTLYWDRSIITDRTIVANKPDIVVIDRLARLAMIVDVTIPHDGNLVKAEKEKQIKYLDLAHEVVDMWNVNSAVIVPIVVSANGLIAKSLDQHLLRLSLGSWIKGLIQKAVLLDTARIVRRFLSLEP

SEQ ID NO: 29498 - protein, 868 aa, Sesamia nonagrioides
MRFVRQAFSGTGISPREYINNVTERIDFLKQKVCAWASRIRRYKKRVDRYTQNRMFQSDERWVYRAWERPEQNEADECRPDDATTSAFWRGIWSVSVCHTEGDWTQDVEQVCEAIPEMDNILITPLDVATAVRSLPNWKSPGPDGLHNFWLKWLSSSHTCLASQFQSSLESGSLPQFLTTGITHLLHKSGSTAEPKNYRPITCLPTVYKVLTSILKAKINNHLDSNSIMSVSQNGCRSGSRGTKELLLIDMAISQQVRRSRKDLSTCWIDYKKAYDSVPHTWLMRVLELYKINATLRTFLRSCMGQWKTVLRYPGSRQIQGNDEPVWIKRGIFQGDSLSPLWFCLALNPLSTLLEDSGLGYRLKRGGQVISHLLYMDDLKLFAPNKLHLMKLLNVTETFSSGIKMEFGVDKCAVMHVKRGQIMESEGITLPDSIHLRSLSSIESYKYLGMSEALGINDADMKQSLKERFFGRLKKVLNSLLSGGNKVRAFNGWVMPVLMYSFGILKWTQTELDALDRRVRTLLTANRMHHPRSSVMRLYIPRKCGGRGFLNAKTLHNREVFSLREYFLKTVVGMHHDVVTVDKGLTPLSMAKENWHKPIILTTDDRKMVWQSKELHGRFYRALHGPDVDFLASVSWLRFGDLFGETEGFVCAIMDEVILTNNYRRYIMKDGTIDVCRACHHPGESIRHIISGCSRLANSEYLHRHNQVARIIHQQLALKYKLVDSEVPYYKYVPDPVLENDHVTLYWDRSIITDRTIVANKPDIVVIDRLARLAMIVDVTIPHDGNLVKAEKEKQMKYLDLAHEVVDMWNVNSAVIVPIVVSANGLIAKSLDQHLLRLSLGSWIKGLIQKAVLLDTARIVRRFLSLEP

SEQ ID NO: 29499 - protein, 1202 aa, Sesamia nonagrioides
MLTRAATRRARPPPPDSSLSTASPPPVSSATVNAVRTPAVVVASSSSDEYFSPPTSPTPVRRQGRGRPPKSLGLRGHPAPSRVPAAGGCVQRMRWTQTMNENVMRAYYGATEGGTNLTAYRERMLSLFQALEPAVNVSAQRLSDQVRVIQRNHRLDDIALDRLRSEVLSNQIAPTLTQTAAQASIIDAVPPRSNRVEEEDDRVETVSSQYNDRLRSALEDAFRDYRSTPTNLRPRLPRLPMHKKNRALVCALDSQLKNFFESSEDLIDTHSILYCAAVAACRLANVKFPNCDEATRPKLAVPAWQRRIERRIDGTRVLIGKLYCFREGNTRPRVMRFVRQAFSGTGISPREYINNVTERIDFLKQKVCAWASRIRRYKKRVDRYTQNRMFQSDERWVYRAWERPEQNEADECRPDDATTSAFWRGIWSVSVCHTEGDWTQDVEQVCEAIPEMDNILITPLDVATAVRSLPNWKSPGPDGLHNFWLKWLSSSHTCLASQFQSSLESGSLPQFLTTGITHLLHKSGSTAEPKNYRPITCLPTVYKVLTSILKAKINNHLDSNSIMSVSQNGCRSGSRGTKELLLIDMAISQQVRRSRKDLSTCWIDYKKAYDSVPHTWLMRVLELYKINATLRTFLRSCMGQWKTVLRYPGSRQIQGNDEPVWIKRGIFQGDSLSPLWFCLALNPLSTLLEDSGLGYRLKRGGQVISHLLYMDDLKLFAPNKLHLMKLLNVTETFSSGIKMEFGVDKCAVMHVKRGQIMESEGITLPDSIHLRSLSSFESYEYLGMSEALGINDADMKQSLKERFFGRLKKVLNSLLSGGNKVRAFNGWVMPVLMYSFGILKWTQTELDALDRRVHTLLTANRMHHPRSSVMRLYIPRKCGGRGFLNAKTLHNREVCSLREYFLKTVVGMHHDVVTVDKGLTPLSMAKENWHKPIILTTDDRKMVWQSKELHGRFYRALHGPDVDFLASVSWLRFGDLFGETEGFVCAIMDEVILTNNYRRYIMKDGTIDVCRACHHPGESIRHIISGCSRLANSEYLHRHNQVARIIHQQLALKYKLVDSEVPYYKYVPDPVLENDHVTLYWDRSIITDRTIVANKPDIVVIDRLARLAMIVDVTIPHDGNLVKAEKEKQMKYLDLAHEVVDMWNVNSAVIVPIVVSANGLIAKSLDQHLLRLSLGSWIKGLIQKAVLLDTARIVRRFLSLEP

SEQ ID NO: 29500 - protein, 1198 aa, Spodoptera frugiperda
MITRRAAAIQRTRPPSPTSSPSSAPPSSAPPPDAVVSPTVVGASSSSDEYFSPPTSPPPTRRRGRRRPPSGLGPRGPLASGGVPAPGGNVSRMKWTRSINENVMRAYFRATEGGRNLTAYRVRMLALFQELEPTINVSAQRLSDQVRVIQRNCMLDDIVLDRLQSEELRSRVIIPLQQNIEEPTQIEPVVAPNDDRTTEVSTHKCSEELRRALEDAIREYRFISPSLRPRLPRLPMHKKNRALVCALDSELSNYFDSSEDLIDSHSILYCGAIAACRVANVKLLERENNSTRQKPAVPAWQCRIERRIDEARTLIAKLICFREGNTRPRVMRFVRRAFLGMDINPQDYVSHITERLDFLKQRIYAWANRIRRYKRRVDRYTQNRTFQRDQRWVYRNWELKEQTRTDTCLPDADVTTSFWRSIWSAPVCHTEGDWIEKVRRKCELVPEMEQISITTEDVSNAAYPLANWKAPGPDGLHNFWLRWFTSSHSRLASQFQSALESGSLPQFFTTGLTHLLHKSGSTAEPKNYRPITCLPTIYKLLTSILREKLNKHIEDNNIMSTSQNGCRNRSRGTKELLLIDMSICQQVRRSHKNLSTCWIDYKKAYDSVPHTWLTRVLELYKVDTALRAFLMSCMRQWRTVLRYPGCRQICENDEPIRIERGIFQGDSLSPLWFCLALNPLSTLLEDSGLGYRLRRGGEIISHLLYMDDLKLFAPNNSHLMKLLNVTETFSNAIRMEFGVDKCAIMHVKRGEIVESDETRNSDTTNFRLLSSTETYKYLGMSEALGIDVAVMKQSLRERFFGRLKKVLNSLLSGGNKVRAYNGWVMPVLMYSFGILKWTQTELDALDRKVRSLLTEHRMHHPRSSVMRLYIPRKCGGRGFLNAKTLHNSEVCSLRKYFFKMEVGMHRDVVSVDKGLTPLSLANKDWREPIILSTKDRKNVWQSKELHGRYYRALHGPDTDFLASVSWLRFGNLFGETEGFVCAIMDEVMLTNNYRKYIIKDGTADICRACHRPGESIRHIISGCSHLANGEYLHRHNLVARIIHQQLALKYKLVESEVPYYKYLPDPVLENGDVTLYWDRTIITDRTIVANKPDIVVIDRPSRRTMIIDITIPHDENLVKAEKDKASKYLDLAHEVVDMWDVDSAIIVPIVVSANGLIAKSLDQHLSRLTLDGWIKSLMQKAVLLDTARIVRKFLSLEP

SEQ ID NO: 29501 - protein, 911 aa, Noctua janthe
MRFANIDPLLPNLDPDYHGYPYIIKIGRWCVPWTRNSRIYSRVARTSLLRRAVAACRLTNFKFPNYDVAIRPKPAVPTWQRRIECRIDEARVLIGKLHYFREGNTRPRVMRFVRRAFSGTGISPHEYMSRVTERIDFLKQKVYAWANRIRRYKRRVDRYSQNRIFQSDERWVYRAWERPEQNMTDVYRPDDAATSSFWRSIWSVPVCHTEADWMRDVERACEPIPEMEPILITPIDIARAVRPLPNWKSPGPDGLHNFWLKWLSSSHTFLASQFQSSLESGSLPQFLTTGITHLLHKSSSPAEPKNYRPITCLSTVYKLLTSILRVKMNTHIDKNFVMSASQNGCRNRSRGTKELLLIDKAISQQVRRSRKDLSTCWIDYKKADDSVPHTWLMRVLELYKIDATLRAFLESCMGQRRTVLRYLGCRQIQGNDEPVWIKRGIFQGDSVSPLWFCLALNPLSTLLEDSGLGYRLRRGGQVISHLLYMDDLKLFTLNKLRLMELLKVTETFSNAIRMEFGVDKCAVMYVKRGEIMESEGIQLSDSIHLRSLSSSESYKYLGMSESLGINVTDMKQSLRERFFGRLNKVLNSLLSGGNKVRAFNGWVMPVLMYSFGVLKWTHTELDALDRRVRTLLTANRMHHPRSSVMRLYIPRKCGGRGFLNAKTLHNREICSLREYFLKAEVGMHRDVVAVDKGLTPLSMAKENWRKPVVLTTDDRKEVWQGKELHGRFYRALHGPDVDFLASVSWLRFGDVFGETEGFVCAIMDEVMLTNNYRKYIMKDGTVDVCRACHRPGESIRHIISSCSRLANGEYLHRHNQVARIIHQQLALKYKLVESEVPYYKYVPDLVLEKDHVTLYWDRSIITDRTIVANKPDIVVIDRLARHVMIVEVTIPHDENLVKAEKEKQIKYLDNR

SEQ ID NO: 29502 - protein, 998 aa, Noctua janthe
MVSSQCNDRLRSALEDALREYRSTPTKLRPRLPRLPMHNKNRALVCALDSQLKNIFESSENLVDTHSILYCGAVAACRLANVKFPNYDVAIRPKPAVPTWQRRIECRIDEARVLIGKLHCFREGNTRPRVMRFVRRAFSGTGISPQEYMSRVTERIDFLKQKDYAWANRIRRYKRRVDRYSQNRIFQNDERWVYRAWERTEQNMTDVCRPDDAATSSFWRSIWSVPVCHTEADWMRDVERACEPIPEMEPILITPIDIARAVRPLPNWKSPGPDGLHNFWLKWLSSSHTCLASQFQSSLESGSLPQFLTTGVTHLLHKSGSPAEPKNYRPITCLSTVYKLLTSILRVKINTHIDKNFIMSASQNGCRNGSRGTKELLLIDMAISQQVRRSRKDLSTCWIDYKKAYDSVSHTWLMRVLELYKINATLRAFLESCMGQWKTVLRYPGCRQIQGNDELVWIKRGIFQGDSLSPLWFCLALNPLSTLLEDSGLGYRLRRGGQVISHLLYMDDLKLFAPNKLRLMELLKVTETFSNAIRMEFGVDKCAVMYVKRGEIMESEGIQLSDSIHLRSLSSSESYKYLGMLESLGINVTDMKQSLRERFFGRLNKVLNSLLSGGNKVRAFNGWVMPVLMYSFGVLKWTQTELDALDRRVRTLLTANRMHHPRSSVMRLYIPRKCGGRGFLNAKTLHNREICSLREYFLKTEVGMHRDVVAVDKGLTPLSMAKENWRKPVVLTTDDRKEVWQGKELHGRFYRALHGPDVDFLASVSWLRFGDLFGETEGFVCAIMDEVMLTNNYRKYIMKDGTVDVCRACHRPGESIRHIISGCSRLANGEYLHRHNQVARIIHQQLALKYKLVESEVPYYKYVPDPVLEKDHVTLYWDRSIITDRTIVANKPDIVVIDRLARRVMIVDVTIPHDENLVKAEKEKQIKYLDLAHEVVDMWNVNSAIIVPIVVTANGLIAKSLDDHLSRLSLGGWIKGLIQKPVLLDTARIVRRFLSLEP

SEQ ID NO: 29503 - protein, 983 aa, Mythimna ferrago
MRYVSTCRLRLSLGPVCHGYPCTKKNRALVCALDSLLKNIFESSENLIDTHSILYCGAVAACRLANIKFPNIDGTIRPKSAVPAWQCRIERRIDEARVLIGKLHCFREGNTRPRVMRFVRRAFLGTGISPQGYMSRVTERIDFLKQKVCAWASRIRRYKRRVDRYSQNRMFQSDERWVYRAWERPEHSVIDGCRPDDFATITFWRNIWSVPVSHAEGGWMRDVERVCEAIPEMEKVTITPEDVAKAVRPLPNWKSPGPDGLQNFWLKWYSSSHALLASQFQSILESGSLPEYLTTGITHLLHKTGNPVDPKNYRPITCLSTVYKLLTSILRAKINIHIENHQIISPSQNGCRNGSRGTKELLLIDMAISQQTRRSRKDLSTCWIDYKKAYDSVPHTWLMRVLELYKIDITLRTFLESCMRQWKTVLRYPGCRPIQGNDEPIWIKRGIFQGDSLSPLWFCLALNPLSTLLEDSGLGYRLRRGGQVISHLLYMDDLKLFAPSTLQLMELLKVTETFSSAIRMEFGVDKCAGMHVKRGEIMESEGIQLPDSIHLRSLSSTETYKYLGMSEALGINNADMKQSLKERFFGRLKKVLNSLLSGGNKVRAFNGWVMPVLMYSFGILKWTQTELDALDRRVRTLLTANRMHHPRSSVMRLYIPRKCGGRGFLNAKTLHNREVCSLREYFLKTDVGMHRDVVAVDKGLTPLSMAKEDWHKPVIMTTDNRKEIWKGKELHGRFFRALHEPDVDFLASVAWLRFSDLFGETEGFVCAIMDEVILTNNYRRYIMKDGTVDVCRACHRPGESIRHIISGCSRLANGEYLHRHNQVARIIHQQLALKYNLVDLEVPYYKYVPDPVLENDHVTLYWDRSIITDRTIVANKPDIVVIDRSARRAMIVDITIPHDENLVKAEKEKQMKYLDLAHEVVDMWSVDSAVIVPIVVTANGLFAKSFDDHLSKLSLRGWIKGQIQKAVLLDTARIVRKFLSLEP

SEQ ID NO: 29504 - protein, 1200 aa, Mythimna ferrago
MLTRTAARRARHPPPGSSLSSASPSPDPGSPVSPAAAVASSSSDEYFSPPTSPTPVRRPGRGRPPNGLGPRGQRAPSRVPAAGGCVQRMKWTQSINENVMRAYYGATEGGTNLTAYRVRMLSLFQELEPSVNVTTQRLSDQVRVIQRNHRLDDTALDRLRSEVLSNHIISTPTQTQTAAPQATDAIMPRSNHGDDEADDRVVTVSSQCNDRLRSALEDALREYRSTPIALRPRLPRLPMHKKNRALVCALDSLLENVFESSVNLVDTHSILYCGAIAACRLANVKLSSCDEATRPKPAVPAWQYRIERRIDGARALIGKLYCFREGNTRPRVMRFVRRAFSGTGISPREYSSHVTERIDFLKQKVCAWASRIRRYKRRVDRYSQNRMFQSDERWVYRAWERPEQNVTDVLRPDDAATNAFWRSIWSEPVCHTEGGWMRDVERACEAIPEMEKIIITSTDVARAVRPLPNWKSPGPNGLQNFWLKWYSSSHALLASQFQSSLESGSLPQFLTTGVTHLLHKTGSTAEPKNYRPITCLSTVYKLLTSILRTKINKHIENNLIMSASQNGCRNGSRGTKELLLIDMAISQQVRRSRKDLSTCWIDYKKAYDSVPHTWLMRVLELYKIDATLRTFLESCMREWNTVLRYPGCRSIRGDDEPIWIKRGIFQGDSLSPLWFCLALNPLSTLLEDSGLGYRLRRGGQVLSHLLYMDDLKLIAPNKLRLMELLKVTETFSSAIRMEFGVDKCAVMHVKRGEILESEGVQLSDSIHLRSLSSTETYKYLGMSEALGINVTDMKQSLKERFFGRLKKVLNSLLSGGNKVRAFNGWVMPVLMYSFGILKWTQTELDALDRRVRTLLTANRMHHPRSSVMRLYIPRKCGGRGFLNAKTLHNREVCNLREYFLKTDVGMHRDVVAVDKGLTPLSMAKENWRKPVVLTTDDRKEVWKGKELHGRFFRALHEPDVDFSASVAWLRFSNLFGETEGFVCAIMDEVILTNNYRRHIMKDGTIDVCRACHRPGESIRHIVSGCSRLANGEYLHRHNQVARILHQQLALKYNLVDSEVPYYRYVPDPVLENGHVTMYWDRSIITDRTIVANKPDIVVIDRLARRAMIVDVTIPHDENLVKAEKEKQIKYLDLAHEVVAMWNVDSAVIVPIVVSVNGLIAKSFDDHLSKLSLRGWIKGLIQKAVLLDTARIVRRFLSLES

SEQ ID NO: 29505 - protein, 868 aa, Mythimna ferrago
MRFVRRAFLGTGISPQGYMSRVTERIDFLKQRVCAWASRIRRYKRRVDRYSQNRMFQSDERWVYRAWERPEHSVIDGCRPDDFATITFWRNIWSVPVSHAEGGWMRDVERVCEAIPEMEKVTITPEDVAKAVRPLPNWKSPGPDGLQNFWLKWYSSSHALLASQFQSILESGSLPEYLTTGITHLLHKTSNPVDPKNYRPITCLSTVYKLLTSILRAKINIHIENHQIISPSQNGCRNGSRGTKELLLIDMAISQQTRRSRKDLSTCWIDYKKAYDSVPHTWLMRVLELYKIDITLRTFLESCMRQWKTVLRYPGCRPIQGSDEPIWIKRGIFQGDSLSPLWFCLALNPLSTLLEDSGLGYRLRRGGQVISHLLYMDDLKLFAPSTLQLMELLKVTETFSSAIRMEFGVDKCAGMHVKRGEIMESEGIQLPDSIHLRSLSSTETYKYLGMSEALSINNADMKQSLKERFFGRLKKVLNSLLSGGNRVRAFNGWVMQVLMYSFGILKWTQTELDALDRRVRTLLTANRMHHPRSSVMRLYIPRKCGGRGFLNAKTLHNREVCSLREYFLKTDVGMHRDVVAVDKGLTPLSMAKEDWHKPVIMTTDNRKEIWKGKELHGRFFRALHEPDVDFLASVAWLRFSDLFGETEGFVCAIMDEVILTNNYRRYIMKDGTVDVCRACHRPGESIRHIISGCSRLANGEYLHRHNQVARIIHQQLALKYNLVDLEVPYYKYVPDPVLESDHVTLYWDRSIITDRTIVANKPDIVVIDRSARRAMIVDITIPHDENLVKAEKKKQMKYLDLAHEVVDMWSVDSAVIVPIVVTANGLIAKSFDDHLSKLSLRGWIKGQIQKAVLLDTARIVRKFLSLEP

SEQ ID NO: 29506 - protein, 1201 aa, Hydraecia micacea
MLTRLAAKRARLTPPDSSLSSAPPPPESSPIESAVTPTVAVASSSSDEYFSPPTSPTPVRRQGRGRPPRSLGLRGQPAPSRVPATGGCVQRMRWTQFMNENVMRAYYGSTEGGTNLTAYRDRMLSLFQELEPTVNVSAQRLSDQVRVIQRNHRLDDIALDRLRSEVLSNHIVSTPAQTAAQTSTVDAIPPRSNHVEEEDDRVDTVSSQCNVRLRSALEDAFHEYRLTPTELRPRLPRLPMHKKNRALVCALNSQLKNFFESSEDLVDTHSILYCAAVAACRLANVKFPICDGATRPKPAVPAWQHRIERRIDGARVLIGKLYCFREGNTRPRVMRFVKRAFSGTGISPREYISHVTERIDFLKQKVCAWASRIRRYKRRIDRYTQNRMFQSDERWVYRAWERPEQNMTDVCRPDDATTSAFWRSIWSVPVCHTEAGWIQDLERVCETVPEMETILITPLDVARAVRPLPNWKSPGPDGLHNFWLKWLNSSHTCLASQFQSSLESGSLPQFLTTGVTHLLHKSGSPAEPKNYRPITCLSTVYKLLTSILRAKINTHIENNSIMSASQNGCRNGSRGTKELLLIDMAISQQVRRSRKDLSTCWIDYKKAYDSVPHTWLMRVLELYKIDATLRTFLESCMGQWKTVLRYPGCRQIQGNDEPVWIKRGIFQGDSLSPLWFCLALNPLSTLLEDSSLGYRLRRGGQVISHLLYMDDLKLFAPTGLHLMELLKVTETFSSAIRMEFGVDKCAVMHVKRGEIMESEGIQLSDSINLRSLSSSESYKYLGMSEALGINVTDMKQSLKERFFCRLRKVLISLLSGGNKVRAFNGWVMPVLMYSFGILKWTQTELDALDRRVRTLLTANRMHHPRSSVMRLYIPRKCGGRGFLNAKTLHNREVCSLREYFLKAEVGMHRDVVAVDKGLTPLSMAKENWRKPVVLTTDDRKKVWQSKELHGRFYRALHEPGVDFLASVSWLRFGDLFGETEGFVCAIMDEVILTNNYRRHIMKDGTVDVCRACHRPGESIRHIISGCSRLANGEYLHRHNQVARIIHQQLALKYKLVDSEVPYYKYVPDPVLENDHVTLYWDRSIITDRTIVANKPDIVVIDRLARRTMIVDVTIPHDGNLVKAEKEKQMKYLDLAHEVVDMWNVSSAVIVPIVVSANGLMAEGLDEHLSRLSLGGWIKSLIQKAVLLDTARIVRRFLSLEP

SEQ ID NO: 29507 - protein, 868 aa, Noctua pronuba
MRFVRRAFSGTGISPQEYMSRVTERIDFLKQKVYAWANRIRRYKRRVDRYSQNRMFQSDERWVYRAWERPEQNMTDVCRPDDATTSSFWSSIWSVPVCHTEGDWMRAVERVCEPIPEMEPILITSLDVARSVRPLPNWKSPGPDGLHNFWLKWLSSSHTCLASQFQSSLESGALPQFLTTGVTHLLHKSGNPAEPKNYRPITCLSTVYKLLTSILRAKINTHIDKNSIMSASQNGCRNGSRGTKELLLIDMAISQQVRRSRKDLSTCWIDYKKAYDSVPHTWLMRVLELYKIDATLRTFLESCMGQWRTVLRYPGCRQIQGNDEPVWIKRGIFQGDSLSPLWFCLALNPLSTSLEDSGLGYRLRRGGQVISHLLYMDDLKLFAPNKLRLMELLKVTETFSSAIRMEFGVDKCAVMYVKRGEIMESEGIQLSDSIHLRSLSSSESYKYLGMSEALGINVTDMKQSLRERFFGRLKKVLNSLLSGGNKVRAFNGWVMPVLMYSFGILKWTQTELDALDRRVRTLLTANRMHHPRSSVMRLYIPRKCGGRGFLNAKTLHNRELCSLREYFLKAEVGMHRDVVAVDKGLTPLSMAKENWRKPVVLTTDDRKEVWQGKELHGRFYRALHGPDVDFLSSVSWLRFGDLFGETEGFVCAIMDEVILTNNYRKYIMKDGTVDVCRACHRPGESIRHIISGCSRLANGEYLHRHNQVARIIHQQLALKYKLVESEVPYYKYVPDPVLEKDHVTLYWDRSIITDRTIVANKPDIVVIDRSARRVMIVDVTIPHDENLVKAEKEKQIKYLDLAHEVVDMWNVNSAIIVPIVVTANGLMAKSLDDHLSRLSLGGWIKSLIQKAVLLDTARIVRRFLSLEP

SEQ ID NO: 29508 - protein, 1206 aa, Ochropleura plecta
MLTRRRAQEQQTLPPSPGSSLSSASQPPGRATRVSAVSPVAAVASSSSDEFFSPPSSPPPPTRQRRGRGRPPAGLGSRGQQVPIRVPAAGGNVSRMRWTSFINENVMRAYYGSTEGGTNLTAYRVRMLSLFQDLEPTINVSAQRLSDQVRVIQRNHLLDDAALDRLRSEVLGNRAILTTPQTAVQASAIDVTQPRSNPAVVEEDDRVATVSSQCNERLRSALEDALRDYRSTPTELRPRLPRLPMHKKNRALVCALDSQLKNLFESSENLVDTHSILYCGAVAVCRVANVKFQNSDVATRPKPSVPVWQCRIERRIDEARVLIGKLYCFREGNTRPRVMRFVRRAFSGTGISPQEYLSCTTERIDFLKQKVYAWTNRIRRYKRRVDRYSQNRMFRSDERWVYRAWERPEQSVTDVCRPDDVATSSFWHSIWSVPVCHTEADWMRDVERVCETIPEMEPILITSIDIASAVRPLPNWKSPGPDGLHNFWLKWLSSSHTHLASQFQSCLESGSLPQFLTTGITHLLYKSGSPAEPKNYRPITCLSTVYKLLTSILRAKINSHIDKNSIMSASQNGCRNGSRGTKELLLIDMAISQQVRRSRKDLSTCWIDYKKAYDSVPHTWLKRVLELYKIDATLRAFLESCMGQWRTVLRYPGCRQIQGNDEPVWIKRGIFQGDSLSPLWFCLALNPLSTLLEDSGLGYRLRRGGQVISHLLYMDDLKLFAPNKLRLMELLKVTETFSNAIRMEFGVDKCAVMYVKRGEIMESEGIQLSDSIHLRSLSSSESYKYLGMSEALGINVADMKQLLRERFFGRLKKVLKSLLSGGNKVRAFNSWVMPVLMYSFGILKWTQTELDALDRRVRTLLTGNRMHHPRSSVMRLYIPRKCGGRGFLNAKTLHNREVCSLREYFLKTDVGMHRDVVAVDKGLTPLSMAKENWRKPVVLTTDDRKVVWQGKELHGRFYKALHGPDVDFLASVSWLRFGDLFGETEGFVCAIMDEVMLTNNYRKYIMKDGTVDVCRACHRPGESIRHIISGCSRLANSEYLHRHNQVARVIHQQLALKYNLVESEVPYYKYVPDPVLEKDHVTLYWDRSIITDRTIVANKPDIVVIDRSARRVMIIDVTIPHDENLVKAEKEKQLKYLDLAHEVVDMWNVNSAIIVPIVVTANGLIAKSLDEHLSKLSLGGWIKGLIQKAVLLDTARIVRRFLSLEP

SEQ ID NO: 29509 - protein, 1200 aa, Hecatera dysodea
MMLTRAATLRARHPPPGSPLSSASPPPDIESQMSPTAAVASSSSDEYFSPPTSPTPVRRQGRGRPPRSLGSRGQPAPSRVPAAGGCVQRMRWTQSMNENVMRAYYGSTEGGTNLTAYRVRMLSLFQDLEPAVNVSAQRLSDQVRVIQRSHRLDDAALERLRSEVLNNLIISTQTQTAVQAPVSSANTPRANNDSDEVDDRVVTVSSQYNNRLRSALEDALREYRSTPTELRPRLPRLPMHKKNRALVCALDSLLQNTFVSSENLVDTHSILYCGAVAACRLANVKFPSGDEAIRPKPAAPAWQCRIERRIDEARALIGKLYCFREGNTRPRVMRFVRRAFAGTGISPHEYTSRITERIDFLKQKVCAWANRIRRYKRRADRYSQNRMFQSDERWVYRAWERPEQSVTDVCRPDDIATTTFWRSIWSVPVRHTEGDWMRDVERVCEAIPQMEKITITPTDIATAVRPLPNWKSPGPDGLHNFWLKWYSSSHAVLASQFQSSLESGSLPQFLTTGITHLLHKTGSPAEPKNYRPITCLSTVYKLLTSILRVKINEHIESNSIMSSSQNGCRKGSRGTKELLLIDMAISQQVRRSRKDLSTCWIDYKKAYDSVPHTWLMKVLELYKIDATLRTFLESCMRQWKTVLRYPGCRPIQGNDEPIWIKRGIFQGDSLSPLWFCLALNPLSTLLEDSGLGYRLRRGGQAISHLLYMDDLKLFAPNNLRLMELLKVTETFSSAIRMEFGVDKCAVMHVKKGEIMESEGIQLSDSIQVRSLSSTETYKYLGMSEALGINGADMKQSLKERFFGRLKKVLNSLLSGGNKVRAFNGWVMPVLMYSFGILKWTQTELDALDRRVRTLLTANRMHHPRSSVMRLYIPRKCGGRGFLNAKTLHNREMCSLREYFLETDVGMHRDVVAVDKGLTPLSMAKENWRKPVIHTTDDRKEVWKGKELHGRFYRALYGSDVDFSASVAWLRFGDLFGETEGFVCAIMDEVILTNNYRRHIMKDGTVDVCRACHRPGESIRHIISGCSRLANSEYLHRHNQVARIIHQQLALKYKLVNSEVPYYKYVPDPVLENDHVTLYWDRSIITDRTIVANKPDIVVIDRLARRTMIIDVSIPHDENLVKAEKEKQIKYLDLAHEVVDMWDVDSAVIVPIIVTANGLMAKSFDDHLSKLALRSWVKGLIQKAVLLDTARIVRRFLSLEP

SEQ ID NO: 29510 - protein, 1202 aa, Mythimna impura
MIMLTRAATRRARPSPLGSSLSSASPPPDLGSPVSPTAAVASSSSDEYFSPPTSPTPVRRPGRGRPPKSLGPRGQPAPSRVPATGGCVQRMKWTQSMNENVMRAYYGSTEGGTNLTAYRVRMLSLFQELEPTVNVTAQRLSDQVRVIQRNHRLDGAALDRLRSEVLSNRIISTPSQTQTEAPQATDAILPRSNHIDDEADDRVVTVSSQCNDRLRSALEDALREYRSTPIALRPRLPRLPMHKKNRALVCALDSLLENVFESSVNLADTHSILYCGAIAACRLANVKLPSCDGATRPKPAAPAWQCRIERRIDEARALIGKLYCFREGNTRPRVMRYVRRAFSGTEISPREYLSRVTERIDFLKQKVCAWANRIRRYKRRVDRYSQNRMFQSDERWVYRAWERPEQNVTDVTRPDAVATNTFWRNIWSVPVCHTEDGWMREVERVCEAIPEMEKIVISPIDVARAVRPLPNWKSPGPDGLLNFWLKWYSSSHALLASQFQSSLESGSLPQFLTTGVTHLLHKTGSTAEPKNYRPITCLSTVYKLLTSILRTKINKHIDSNSIMSASQNGCRNGSRGTKELLLIDMAISQQVRRSRKDLSTCWIDYKKAYDSVPHTWLMRVLELYKIDATLRTFLESCMGQWNTVLRYPGCRSIRRDDEPIWIKRGIFQGDSLSPLWFCLALNPLSTLLEESGLGYRLRRGGQVLSHLLYMDDLKLIAPNKLRLMELLKVTETFSSAIRMEFGVDKCAVMHVKRGEIMESEGIQLSDSIHFRSLSSTETYKYLGMSEALGINVADMKQSLKERFFGRLKKVLNSLLSGGNKVRAFNSWVMPVLMYSFGILKWTQTELDAVDRRVRTLLTANRMHHPRSSVMRLYIPRKCGGRGFLNAKTLHNREVCSLREYFHKTDVGMHRDVVAVDNGLTPLSMAKENWRKPVVLTTDDRKEVWKSKELHGRFYRALHESDIDFAASVAWLRFSNLFGETEGFICAIMDEVILTNNYRRYIMKDGTVDVCRACHRPGESIRHIISGCSRLANGEYLHRHNQVARIIHQQLALKYNLVDCEVPYYRYVPDPVLENDHVTLYWDRSIITDRTIVANKPDIVVIDRLARRVMIVDVTIPHDENLVKAEKEKQIKYLDLAHEVVDMWNVDSAVIVPIVVTANGLIAKSFDDHLSKLSLRGWIKSLIQKAVLLDTARIVRRFLSLEP

SEQ ID NO: 29511 - protein, 868 aa, Mythimna impura
MRYVRRAFSGTEIIPREYLSRVTERIDFLKQKVCAWANRIRRYKRRVDRYSQNRMFQSDERWVYRAWERPEQNVTDVTRPDAVATNTFWRNIWSVPVCHTEDGWMREVERVCEAIPEMEKIVISPIDVARAVRPLPNWKSPGPDGLQNFWLKWYSSSHALLASQFQSSLESASLPQFLTTGVTHLLHKTGSTAEPKNYRPITCLSTVYKLLTYILRTKINKHIDSNSIMSASQNGCRNGSRGTKELLLIDMAISQQVRRSRKDLSTCWIDYKKAYDSVPHTWLMRVLELYKIDATLRTFLESCMGQWNTVLRYPGCRSILRDDEPIWIKRGIFQGDSLSPLWFCLALNPLSTLLEESGLGYRLRRGGQVLSHLLYMDDLKLIAPNKLRLMELLKVTETFSSAIRMEFGVDKCAVMHVKRGEIMESEGIQLSDSIHFRSLSSTETYKYLVMSEALGINVADMKQSLKERFFGRLKKVLNSLLSGGNKVRAFNGWVMPVLMYSFGILKWTQTELDAVDRRVRTLLTANRMHHPRSSVMRLYIPRKCGGRGFLNAKTLHNREVCSLREYFHKTDVGMHRDVVAVDKGLTPLSMAKENWRKPVVLTTDDRKEVWKSKELHGSFYRDLHESDIDFAASVAWLRFSDLFGETEGFICAIMDEVILTNNYRRYIMKDGTVDVCRACHRPGESIRHIISGCSRLANGEYLHRHNQVARIIHQQLALKYNLVDYEVPYYRYVPDPVLENDHVTLYWDRSIITDRTIVANKPDIVVIDRLARRVMIVDVTIPHDENLVKAEKEKQIKYLDLAHEVVDMWNVDSAVIVPIVVTANGLIAKSFDDHLSKLSLRVWIKGLIQKAVLLDTARIVRRFLSLEP

SEQ ID NO: 29512 - protein, 868 aa, Phlogophora meticulosa
MRFVRRAFAGTGISPREYMSRIVERIDFLKQKVYAWANRIRRYKRRVDRYSQNRMFQSDERWVYRAWERPEQNVADVHRPDDTTTNTFWRNIWSVPVCHTEAHWIRDVERVCETITEMEKIIITPLDVATAVRPLPNWKAPGPDGLHNFWLKWLGSSHTRLASQFQSCLESGSLPQFLTTGITHLLYKSGSTTEPKNYRPITCLSTVYKLLTSILRAKIAEHIVGNSIMSASQNGCRNGSRGTKELLLIDMAISQQVRRSHKDLSTCWIDYKKAYDSVPHAWLMRVLELYKIDATLRTFLESCMGQWRTVLRYPGCRQIQGNDEPIWIKRGIFQGDSLSPLWFCLALNPLSTLLEDSGLGYRLRRGGQVISHLLYMDDLKLFASNNLQLMELLKITESFSSTIRMEFGVDKCAVMHVKRGEIVESEGIQLPDSIQLRSLSSSDNYKYLGMSEALGINVTDMKQSLKERFFGRLKKVLNSLLSGGNKVRAFNGWVMPVLMYSFGILKWTQTELDALDRRVRTLLTANRMHHPRSSVMRLYIPRKCGGRGFLNAKTLYNREVCSLRDYFLKTEVGMHRDVVAVDKGLTPLSMAKENWRKPVVLTTDDRKQVWQSKELHGRFYRALHGPDVDFIASVSWLRFGDLFGVTEGFVCAIMDEVILTNNYRKHIMKDGTVDMCRACHRPGESIRHIISGCSRLANGEYLHRHNQVARIIHQQLALRYKLVESEVPYYKYVPDPVLEDDHVTLYWDRSIITDRTIVANKPDIVVIDRLARRAMIVDVTIPHDENLVKAEKEKQIKYLDLAHEVVDMWNVDSAVIVPIVVTANGLLAKSLDDHLSRLSLHGWIKGLIQKAVLLDTARIVRRFLSLQP

SEQ ID NO: 29513 - protein, 1199 aa, Phlogophora meticulosa
MITRAATRRARPPSPDSPLSSASPPPDLGSPVTPAVAAASSSSDEYFSPPTSPTPVRRQGRGRPPKSLGSRGQPAPSQVPATGGCVQRMRWTQSMNENVMRAYYGSTEGGTNLTAYRVRMLSLFQGFEPTVNVSAQRLSDQVRVIQRNHRLDDAALDRLRSEMLSNHIVLTSTQTAVQAPAFNAILPRSNHVSNEADDRVDTVCSQYNDRLRSALEDALREYRSTPTELRPRLPRLPMHRKNRALVCALDSLLKNFFESSGDLVDTHSILYCAAVAACRLANVKFPKNDLAIRPQPAVPAWQSRIERRIDGARVLIGKLYCFREGNTRPRVMRFVRRAFSGTGISPREYMSRIVERIDFLKQKVCAWANRIRRYKRRVDRYSQNRMFQSDERWVYRAWERPEQDVAGEHRPDDVATNAFWRSIWSVPAHHVEAHWMSDYESVCETIPEMEKIIITPEDVATAVRPVPNWKSPGPDGLHNFWLKWLSSSHTRLASQFQSCLESGSLPQFLTTGITHLLYKSGSTTEPKNYRPITCLSTVYKLLTSILRAKITEHIVGNSIMSASQNGCRNGSRGTKELLLIDMAISQQVRRSRKDLSTCWIDYKKAYDSVPHAWLTRVLELYKIDATLRTFLASCMGQWKTVLRYPGCRQIQGNDEPIWIKRGIFQGDSLSPLWFCLALNPLSTLLEDSGLGYRLKRGGQVISHLLYMDDLKLFAPNNLRLMELLKITESFSSAIRMEFGVDKCAVMHVKRGEIVESEGIQLSDSIHLRSLSSSENYKYLGMSEALGINATDMKQSLKERFFGRLKKVLNCLLSGGNKVRAFNGWVMPVLMYSFGILKWTQTELDALDRRVRTLLTANRMHHPRSSVMRLYIPRKCGGRGFLNAKTLHNREVCNLRDYFLKTEVGMHRDVVAVDKGLTPLSMAKENWRKPVVLTTDDRKQVWQSKELHGRFYRALHGPDVDFLASVSWLRFSDLFGETEGFVCAIMDEVILTNNYRKHIMKDGTVDMCRACHRPGESIRHIISGCSRLANGEYLHRHNQVARIIHQQLALRYKLVESEVPYYKYVPDPVLEDDHVTLYWDRSIITDRTIVANKPDIVVIDRLARRAMIVDVTIPHDENLVKAEKEKQIKYLDLAHEVVDMWNVDSAVIVPIVVTANGLLAKSLDDHLSKLSLHGWIKGLIQKAVLLDTARIVRRFLSLQP

SEQ ID NO: 29514 - protein, 962 aa, Phlogophora meticulosa
MHKKNRALVCNLDSLLKDLFESSGDLVDTHSILYCAAVAACRLANVKFPNNDVAIRPKPAVPAWQSRIERRIDGARVLIGKLYCFREGNTRPRVMRFVGRAFAGTGISPREYMSRIVERIDFLKQKVCAWANRIRRYKRRVDRYSQNRMFQSDERWVYRAWERPEQDVADVHRPDDTTTNTFWRNIWSVPVCHTEAHWIRDVERVCETITEMEKNIITPLDVATAVRPLPNWKAPGPDGLHNFWLKWLGSSHTRLASQFQSYLESGSLPQFLTTGITHLLYKSGSTTEPKNYRPITCLSTVYKLLTSILRAKIAEHIVGNSIMSASQNGCRNGSRGTKELLLIDMAISQQVRRSHKDLSTCWIDYKKAYDSVPHAWLMRVLELYKIDATLRTFLESCMGQWRTVLRYPGCRQIQGNDEPIWIKRGIFQGDSLSPLWFCLALNPLSTSLEDSGLGYRLRRGGQVISHLLYMDDLKLFASNNLQLMELLKITESFSSTIRMEFGVDKCAVMHVKRGEVVESEGIQLPDSIQLRSLSSSDNYKYLGMSEALGINVTDMKQSLKERFFGRLKKVLNSLLSGGNKVRAFNGWVMPVLMYSFGILKWTQTELDALDRRVRTLLTANRMHHPRSSVMRLYIPRKCGGRGFLNAKTLYNREVCNLRDYFLKTEVGMHRDVVAVDKGLTPLSMAKENWRKPVVLTTDDRKQVWQSKELHGRFYRALHGPDVDFIASVSWLRFGDLFGETEGFVCAIMDEVILTNNYRKHIMKDGTVDMCRVCHRPGESIRHIISGCSRLANGEYLHRHNQVARIIHQQLALRYKLVESEVPYYKYVPDPVLEDDHVTLYWDRSIITDRTIVANKPDIVVIDRLARRAMIVDVTIPHDENLVKAEKEKQIKYLDLAHEVVDMWNVDSAVIVPIVVTANGLLAKSLDDHLSRLSLHGWIKGLIQKAVLLDTARIVRRFLSLQP

SEQ ID NO: 29515 - protein, 1136 aa, Xestia xanthographa
MNENVMRAYYGSTEGGTNLTAYRVRMLSLFQDLEPTVNVSAQRLSDQVRVIQRNHRLDDAALDRLRSEVLSNLIILTPTQTAVQVSNINVTLPRSISAVVEEDDRVATVSSQCNDRLRNALEDALREYRSTTSELRPRLPRLPMHKKNRALVCALDSQLKNIFESSENLVDTHSILFCGAVAACRLANVKFPNCDVATRPKPAGPAWQRRIERRIDGARVLIGKLYCFREGNTRPRVMRFVRRAFSGTEISPQEYMSRATERINFLKQKVYAWANRIRRYKRRVDRYSQNRMFQSDERWVYRAWERPEQNMTDVCRPDDAATSSFWRSIWSVPVCHTEADWMRDVERVCEPIPEMEPILITPLDVARAVRPLPNWKSPGPDGLHNFWLKWFSSSHTCLASQFQSSLESGSLPQFLTTGVTHLLHKSGSPAEPKNYRPITCLSTIYKLLTSILRMKINTHIDKNSIMSASQNGCRNGSRGTKELLLIDMAISQQVRRSREDLLTCWIDYKKAYDSVPHTWLMRVLELYKVDTTLRTFLESCMGQWKTVLRYPGCRQIQGSDDPVWIKRGIFQGDSLSPLWFCLALNPLSTLLENSGLGCRSRKDGQVISHLLYMDDLKLFAPNKLRLMELLKVTETFSSAIRMEFGVDKCAVMYVKRGEIMESEGLQLSDSIRLKSLSSSETFKYLGMSEALGINVTDMKQSLRERFFGRLRKVLNSLLSGGNKVRAFNGWVMPVFMYSFGILKWTQTELDALDRRVRTLLTESRMHHPRSSVMRLYIPRKCGGRGFLNAKTLHNREVCSLREYFLKAEVGMHRDVVAVDKGLTPLSMAKENWHKPEVLTTDDRKEVWQGKELHGRFYRALHGPDVDFLASVSWLRFGDLFGETEGFVCAIMDEVMLTNNYRKYIMKDGTIDMCRACHLPGESIRHIISGCSRLANGEYLHRHNQVARIIHQQLALKYKLVESEVPYYKYVPDPVLENDHVTLYWDRSIITDRTIVANKPDIVMMDRSARRVMLIDVTIPHDENLVKAEKEKQIKYLDLAHEVRGMWNMNSVIIVPIVVTANGLIAKSFDDHLSKLSLGGWIKGLIQKAVLLDTARIKSLDQYLRRLSLGSWIKGLIQRAVLLDTARIVKRFLSLEP

SEQ ID NO: 29516 - protein, 847 aa, Xestia xanthographa
MRFVRRAFSGTEISPQEYMSRVTERIDFLKQKVYAWANRIRRYKRRVDRYSQNRMFQSDERWVYRAWERPEQNMTDVCRPDDATTSSFWRSIWSVPVCHTESDWMRDVERVCEPIPEMEPILITPLEIAKAVRPLPNWKSPGPDGLHNFWLKWFSSSHTCLASQFQSSLESGSLPQFLTTGVTHLLHKSGSPAEPKNYRPITCLSTIYKLLTSILRVKINTHIDKNSIMSASQNGCRNGSRGTKELLLIDMAISQQVRRSRKDLSTCWINYKKAYDSVPHTWLMRVLELYKIDTTLRAFLESCMGQWKTVLRYPGCRQIQGSDEPVWIKRGIFQGDSLSPLWFCLALNPLSTLLENSGLGCRLRKDGQVISHLLYMDDLKVFAPNKLRLMELLKVTETFSSAIRMEFGVDKCSVMYVKRGEIMESEGLQLSDSIHLRSLSSSETYKYLGMSEALGINVTDMKQSLKERFFGRLRKVLNSLLSGGNKVRAFNGWVMPVLMYSFGILKWTQTELDALDRRVRTLLTETRMHHPRSSVMRLYIPRKCGGRGFLNAKTLHNREVCSLREYFLKAEVGMHRDVVAVDKGLTPLSMAKENWHKPEVLTTDDRKEVWQGKELHGRFYRALHGPDVDFLASVFWLRFGDLFGETEGVVCAIMDEVMLTNNYRKYIMKDGTVDVCRACHLPGESIRHIISGCSRLANGEYLHRHNQVARIIHQQLALKYKLVESEVPYYKYVPDPVLEKDHVTLYWDRSIITDRTIVANKPDIVMIDRSARRVMIIDVTIPHDENLVKAEKEKQIKYLDLAHEVRDMWNMDSVIIVPFFAGNCSKCQQLCRKQIAIKTGLRSHSYT

SEQ ID NO: 29517 - protein, 1199 aa, Xestia xanthographa
MITRAAARRARLPTPDSSLSSASPPPDPGSPVSPVAAVASSSSDEYFSPPTSPPPVRRAGRGRPPKGLGLRGQQAPSRVPATGGCVQRMKWTRSMNENVMRAYYGSTEGGTNLTAYRVRMLSLFQDLEPTVNVSAQRLSDQVRVIQRTHRLDDAALDRLRSEVLSNLIILTPTQTAVQVSDINVTLPRSIPAVVEEDDRVATVSSQCNDRLRNALEDALREYRSTPTELRPRSPRLPMHKKNRALVCALDSQLKHIFESSENLVDTQSILFCGAVAACRLANVKFPNCDVATRPKPAVPAWQRRIERRIDGARVLIGKLYCFREGNTRPRVMRFVRRAFSGTEISPQEYMSRVTERIDFLKQKVYAWANRIRRYKQRVDRYSQNRMFQSDERWVYRAWERPEQNMTDVCRPDDATTSSFWRSIWSVPVCHTEADWMRDVERVCEPIPEMEPIFITPLDVARAVRPLPNWKSPGPDGLHNFWLKWFSSSHTCLASQFQSSLESRSLPQFLTTGVTHLLHKSGSPAEPKNYRPITCLSTIYKLLTSILRMKINTHIDKNSIMSASQNGCRNGSRGTKELLLIDMAISQQVRRSRKDLSTCWIDYKKAYDSVPHTWLMRVLELYKVDTTLRTFLESCMGQWKTVLRYPGCRRIQGSDEPVWIKRGIFQGDSLSPLWFCLALNPLSTLLENSGLGCRLRKDGQVISHLLYMDDLKLFAPNKLRLMELLKVTETFSSAIRMEFGVDKCAVMYVKRGEIMESEGLQLSDSIHLKSLSSSETYKYLGMSEALGINVTDMKQSLRERFFSRLRKVLKSLLSGGNKVRAFNGWVMPVLMYSFGILKWTQTELDALDRRVRILLTESRMHHPRSSVMRLYIPRKCGGRGFLNAKTLHNRELCSLREYFLKAEVGMHRDVVAVDKGLTPLSMAKENWHRPEVLTTDDRKEVWQGKELHGRFYRALHGPDVDFLASVSWLRFGDLFGETEGFVCAIMDEVMLTNNYRKYIMKDGTVDVCRACHLPGESIRHIISGCSRLANGEYLHRHNQVARIIHQQLALKYKLVESEVPYYKYVPDPVLENDHVTLYWDRSIITDRTIVANKPDIVMMDRSARRVMIIDVTIPHDENLVKAEKEKQIKYLDLAHEVRGMWNMNSVIIVPIVVTANGLIAKSFDDHLSKLSLGGWIKGLIQKAVLLDTARIVRRFLSLQP

SEQ ID NO: 29518 - protein, 1199 aa, Xestia xanthographa
MITRAAARRAHLPTPDSSLSSASPPPDPGSPVSPVAAVASSSSDEYFSPPTSPPPVRRAGRGRPPKSLGLRGQQTPNRVPATGGCVQRMKWTQSMNENVMRAYYGSTEGGTNLTAYRVRMLSLFQGLEPTVNVSAQRLSDQVRVIQRSHRLDDAALDRLRSEVLSNLIVLTPTQTAVQVSAIDATPPRLNPVVVEEDDGVATVSSQCNDRLRSALENALHEYRYTPTELRPRLPRLPMHKKNRALVCALDSQLKNIFESSENLVDTHSILFCGAVAACRLANVKFPNCDVANRPKPAVPAWQRRIERRIDGARVLIGKLYCFREGNTRPRVMRFVRRAFSGTEISPQEYMSRVTERIDFLKQKVYAWANRIRRYKRRVDRYSQNRMFQSDERWVYRAWERPEQNMTDVCRPDDAATSSFWRSIWSVPVCHTEADWMRDVERVCEPIPEMEPIFITPLDIARAVRPLPNWKSPGPDGLHNFWLKWFSSSHTCLASQFQSSLESGSLPQFLTTGVTHLLHKSGSPAEPKNYRPITCLSTIYKLLTSILRVKINTHIDKNSIMSASQNGCRNGSRGTKELLLIDMAISQQVRRSRKDLSTCWIDYKKAYDSVPHTWLMRVLELYKIDTTLRTFLESCMGQWRTVLRYPGCRQIQGSDDPVWIKRGIFQGDSLSPLWFCLALNPLSTLLENSGLGCRLRKDGQVISHLLYMDDQKLFASNKLRLMELLKVTETFSNAIRMEFGVDKCAVMYVKRGEIMESEGLQLSDSIQLRSLSSSKTYKYLGMSEALGINITDMKQSLKERFFSRPRKVLNSLLSGGNKVRAFNGWVMPVLMYSFGILKWTQTELDALDRRVRTLLTESRMHHPRSSVMRLYIPRKCGGRGFLNAKTLHNREVCSLREYFFKAEVGMHRDVVAVDKGLTPLSMAKENWHKPEVLTTDDRKEVWQGKELHGRFYRALHGPDVDFLASVSWLRFGDLFGETEGFVCAIMDEVMLTNNYRKYIMKDGTVDMCRACHLPGESIRHIISGCSRLANGEYLHRHNQVARIIHQQLALKYKLVESEVPYYKYVPDPVLESDHVTLYWDRSIITDRTIVANKPDIVMIDRSARRVMIIDVTIPHDENLVKAEKEKQIKYLDLAHEVRDMWKMNSVIIVPIVVTANGLIAKSFDDHLSKLSLGGWIKGLIQKAVLLDTARIVRRFLSLQP

SEQ ID NO: 29519 - protein, 1199 aa, Mamestra brassicae
MITRAAARRAHPPPPGSSLSSASPTPDIGSQVSPVVAVASSSSDEYFSPPTSPTPVRRQGRGRPPRSLGSRGQPAPSRVPAAGGCVQRMRWTQSMNENVMRAYYGSTEGGTNLTAYRVRMLSLFQDLEPTVNVSAQRLSDQVRVIQHNCRLDDAALERLRSEVLSNLIISTPTQTVVQAPASGAITPRPNNGSDEVDDRVVTVSSQCNDRLRSALEDALREYRLTPTELRPRLPRLPMHKKNRALVCALDSLLQNIFESSESLVDTHSILFCGAVAACRIANVKFPSCDEAIRPKPAAPAWQCRIERRIDEARALIGKLYCFREGNTRPRVMRFVRRAFSGTGISPREYTFRVTERIDFLKQKVCAWANRIRRYKRRVDRYSQNRMFQSDERWVYRAWERPEQSVTDVYRPDDVATSTFWRSIWSVPICHAEGGWMRDVERVCEAIPQMEKITITTLDIAKAVRPLPNWKSPGPDGLHNFWLKWYSSSHALLASQFQSSLESGSLPQFLTTGITHLLHKTGSPAEPKNYRPITCLSTVYKLLTSILRAKINEHIESNSIMSASQNGCRKGSRGTKELLLIDMAISQQVRRSRKDLSTCWIDYKKAYDSVPHTWLMKVLELYKIDATLRTFLESCMRQWKTVLRYPGCQPIQGSDEPVWIKRGIFQGDSLSPLWFCLALNPLSTLLEDSGLGYRLRRGGQAISHLLYMDDLKLFVPNNLRLMELLKVTETFSSAIRMEFGVDKCAVMHVKKGEIMESEGIQLSDSIQVRSLSSTESYKYLGMSEALGINGTDMKQSLRERFFGRLKKVLNSLLSGGNKVRAFNGWVMPVLMYTFGILKWTQTDLDALDRRVRTLLTANRMHHPRSSVMRLYIPRKCGGRGFLNAKTLHNREMCSLREYFLKADVGMHRDVVAVDKGLTPLSMAKENWRKPVILTTDDRKEVWKGKELHGRFYRALYGSDVDFSASVAWLRFGDLFGETEGFVCAIMDEVILTNNYRKHIMKDGTVDVCRACHRPGESIRHIISGCSRLANGEYLHRHNQVARIIHQQLALKYKLVDSEVPYYKYVPDPVLENDHVTLYWDRSIITDRTIVANKPDIVVIDRLARRTMIIDVTIPHDENLVKAEKEKQIKYLDLAHEVVDMWNVDSAVIVPIVITANGLMAKSFDDHLSKLALRGWIKGLIQKAVLLDTARIVRRFLSLEP

SEQ ID NO: 29520 - protein, 1199 aa, Mamestra brassicae
MITRAAARRAHPPPPGSSLSSASPTPDIGSQVSPVVAVASSSSDEYFSPPTSPTPVRRQGRGRPPRSLGSRGQPAPSRVPAAGGCVQRMRWTQSMNENVMRAYYGSTEGGTNLTAYRVRMLSLFQDLEPTVNVSAQRLSDQVRVIQHNCRLDDAALERLRSEVLSNLIISTPTQTVVQAPASGAITPRPNNGSDEVDDRVVTVSSQCNDRLRSALEDALREYRLTPTELRPRLPRLPMHKKNRALVCALDSLLQNIFESSESLVDTHSILFCGAVAACRIANVKFPSCDEAIRPKPAAPAWQCRIERRIDEARALIGKLYCFREGNTRPRVMRFVRRAFSGTGISPREYTFRVTERIDFLKQKVCAWANRIRRYKRRVDRYSQNRMFQSDERWVYRAWERPEQSVTDVYRPDDVATSTFWRSIWSVPICHAEGGWMRDVERVCEAIPQMEKITITTLDVAKAVRPLPNWKSPGPDGLHNFWLKWYSSSHALLASQFQSSLESGSLPQFLTTGITHLLHKTGSPAEPKNYRPITCLSTVYKLLTSILRAKINEHIESNSIMSASQNGCRKGSRGTKELLLIDMAISQQVRRSRKDLSTCWIDYKKAYDSVPHTWLMKVLELYKIDATLRTFLESCMRQWKTVLRHPGCQPIQGSDEPVWIKRGIFQGDSLSPLWFCLALNPLSTLLEDSGLGYRLRRGGQAISHLLYMDDLKLFAPNNLRLMELLKVTETFSSAIRMEFGVDKCAVMHVKKGEIMESEGIQLSDSIQVRSLSSTESYKYLGMSQALGINGTDMKQSLRERFFGRLKKVLNSLLSGGNKVRAFNGWVMPVLMYTFGILKWTQTELDALDRRVRTLLTANRMHHPRSSVMRLYIPRKCGGRGFLNAKTLHNREMCSLREYFLKADVGMHQDVVAVDKGLTPLSMAKENWRKPVILTTDDRKEVWKGKELHGRFYRALYGSDVDFSASVAWLRFGDLFGETEGFVCAIMDEVILTNNYRKHIMKDGTVDVCRACHRPGESIRHIISGCSRLANGEYLHRHNQVARIIHQQLALKYKFVDSEVPYYKYVPDPVLENDHVTLYWDRSIITDRTIVANKPDIVVIDRLARRTMIIDVTIPHDENLVKAEKEKQIKYLDLAHEVVDMWNVDSAVIVPIVVTANGLMAKSFDDHLSKLALRGWIKGLIQKAVLLDTARIVRRFLSLEP

SEQ ID NO: 29521 - protein, 1200 aa, Noctua fimbriata
MITRAAYRRAHLTTPDSPLSSASPPPDPGSPVLPAAAVASSSSDEYFSPPTSPTPVRRQGRGRPPRSLGLRGHPAPSRVPAAGGCVQRMRWTHSINENVMRAYYGSTEGGTNLTAYRVRMLSLFQVLEPTVNVSAQRLSDQVRVIQRNHMLDDAVLDRLRSEVLSNRVILTPAQTAVQASVIDATPPRFNTAVVEEDSRVAVVSSQCNDRLRSALEDALREYRSTPTEFRPRLPRLPMHNKNRALVCALDSQLKNIFESSENLVDTHSILYCGAVAACRLANVKFPNCDVATRPKPAVPAWQCRIERRIDGARVLIGKLHCFREGNTRPRVMRFVRRAFSGTGISPQEYMSRVTERIDFLKQKVYAWANRIRRYKRRVDRYSQNRMFQSDERWVYRAWERPEQNMTDHVCRPDDAATSSFWRSIWSVPVCHTEAVWMRDVEQVCEPIPEMEPILITPLDVARAVRPLPNWKSPGPDGLHNFWLKWFSSSHTCLASQFQSSIESGSLPQFLTTGVTHLLHKSGSPAEPKNYRPITCLSTVYKLLTSILRAKINTHIDKNSIMSASQNGCRNGSRGTKELLLIDMAISQQVRRSRKDLSTCWIDYKKAYDSVPHTWLMRVLELYKIDATLRAFLESCMGQWRTVLRYPGCRQIQGNDEPVWIKRGIFQGDSLSPLWFCLALNPLSTLLEDSGLGYRLRRGGQVISHLLYMDDLKLFAPNKLRLMELLKVTETFSSAIRMEFGVDKCAVMYVKQGEIMESEGIQLSDSIHLRTLSSTESYKYLGMSEALGINVTDMKQSLKERFFGRLNKVLHSLLSGGNKVRAFNGWVMPVLMYSFGVLKWTQTELDALDRRVRTLLTANRMHHPRSSVMRLYIPRKCGGRGFLNAKSLHNREMCSLREYFLKVEVGMHRDVVAVDKGLTPLSMAKENWRKPEVLTTDDRKEVWQGKELHGRFYRALHGPDVDFLPSVSWLRFGDLFGETEGFVCAIMDEVMLTNNYRKYIMKDGTVDVCRACHRPGESIRHIISGCSRLANGEYLHRHNQVARIIHQQLALKYKLVESEVPYYKYVPDPVLEKDHVTLYWDQSIITDRTIVANKPDIVVIDRSARRVMIVDVTIPHDENLVKAEKEKQIKYLDLAHEVVDMWNVNSAIIVPIVVTANGLIAKSLDDHLSKLSLGGWIKGLIQKAVLLDTARIVRRFLSLEP

SEQ ID NO: 29522 - protein, 1202 aa, Noctua fimbriata
MLTRAAARRARLPPPDPSLSSASPPPESSHIVSAVTPVVAVASSSSDEYFSPPTSPTPVRRQGRGRPPRSLGLRGHPAPSRVPAAGGCVQRMRWTHSINENVMRAYYGSTEGGTNLTAYRVGMLSLFQVLEPTVNVSAQRLSDQVRVIQRNHMLDDAVLDRLRSEVLSNRIVLTPAQTAVQASVIDATPPRFNPAVVEEDDRVAVVSSQCNDRLRSALEDALREYRSTPTELRPRLPRLPMHNKNRALVCALDSQLENIFESSENLVDTHSILYCGAVAACRLANVKFPNCDVATRPKPAVPAWQRRTERRIDGARVLIGKLHCFREGNTRPRVMRFVRRAFSGTGISPQEYMSRATERIDFLKQKVYAWANRIRRYKRRVDRYSQNRMFQSDERWVYRAWERPELNMTDVCRPDDAATSSFWRSIWSVPVCHTEADWMCDVERVCEPIPEMEPILITPLDIARAVRPLPNWKSPGPDGLHNFWLKWLSSSHTCLASQFQSSLESGSLPQFLTTGVTHLLHKSGSPAEPKNYRPITCLSTVYKLLTSILRAKINTHIDKNSIMSASQNGCRNGSRGTKELLLIDMAISQQVRRSRKDLSTCWIDYKKAYDSVPHTWLMRVLELYKIDATLRAFLESCMGQWRTVLRYPGCRQIQGNDEPVWIKRGIFQGDSLSPLWFCLALNPLSTLLEDSGLGYRLRRGGQVISHLLYMDDLKLFAPNELRLMELLKVTETFSSAIRMEFGVDKCAVMYVKQGEIMESEGIQLSDSIHLRTLSSTESYKYLGMSEALGINVTDMKQSLKERFFGRLNKVLHSLLSGGNKVRAFNGWVMPVLMYSFGVLKWTQTELDALDRRVRTLLTANRMHHPRSSVMRLYIPRKCGGRGFLNAKSLHNREMCSLREYFLKVEVGMHRDVVAVDKGLTPLSMAKENWRKPEVLTTDDRKEVWQGKELHGRFYRALHGPDVDFLASVSWLRFGDLFGETEGFVCAIMDEVMLTNNYRKYIMKDGTVDVCRACHRPGESIRHIISGCSRLANGEYLHRHNQVARIIHQQLALKYKLVESEVPYYKYVPDPVLEKDHVTLYWDQSIITDRTIVANKPDIVVIDRSARRVMIVDVTIPHDENLVKAEKEKQIKYLDLAHEVVDMWNVNSAIIVPIVVTANGLIAKSLDDHLSKLSLGGWIKGLIQKAVLLDTARIVRRFLSLEP

SEQ ID NO: 29523 - protein, 1202 aa, Noctua fimbriata
MLTRAAARRARLPPPDPSLSSASPPPESSPIVSAVTPAVAVASSSSDEYFSPPTSPTPVRRQGRGRPPRSLGLRGHPAPSRVPAAGGCVQRMRWTHSINENVMRAYYGSTEGGTNLTAYRVGMLSLFQVLEPTINVSAQRLSDQVRVIQRNHMLDDAVLDRLRSEVLSNRIVLTPAQTAVQASVIDATPPRFNPAVVEEDDRVAVVSSQCNDRLRSALEDVLREYRSTPTELRPRLPRLPMHNKNRALVCALDLQLENIFESSENLVNTHSILYCGAVAACRLANVKFPNCDVATRPKPAVPAWQRRIERRIDGARVLIGKLHCFREGNTRPRVMRFVRRAFSGTGISPQEYMSRVTERIDFLKQKVYAWANRIRRYKRRVDRYSQNRMFQSDERWVYRAWERPELNMTDVCRPDDAATSSFWRSIWSVPVCHTEADWMRDVERVCEPIPEMEPILITRLDIARAVRPLPNWKSPGPDGLHNFWLKWLSSSHTCLASQFQSSLESGSLPQFLTTGVTHLLHKSGSPAEPKNYRPITCLSTVYKLLTSILRAKIHTHIDKNSIMSASQNGCRSGSRGTKELLLIDMAISQQVRRSRKDLSTCWIDYKKAYDSVPHTWLMRVLELYKIDATLRTFLESCMGQWRTVLRYPGCGQIQGNDEPVWIKRGIFQGDSLSPLWFCLALNPLSTLLEDSGLGYRLRRGGQVISHLLYMDDLKLFAPNKLQLMELLKVTETFSSAIRMEFGVDKCAVMYVKQGEIMESEGIQLSDSIHLRTLSSTESYKYLGMSEALGINVTDMKQSLKERFFGRLNKVLHSLLSGGNKVRAFNGWVMPVLMYSFGVLKWTQTELDALDRRVRTLLTANRMHHPRSSVMRLYIPRKCGGRGFLNAKSLHNREMCSLREYFLKVEVGMHRDVVAVDKGLTPLSMAKENWRKPEVLTTDDRKEVWQGKELHGRFYRALHGPDVDFLASVSWLRFGDLFGETEGFVCAIMDEVMLTNNYRKYIMKDGTVDVCRACHRPGESVRHIISGCSRLANGEYLHRHNQVARIIHQQLALKYKLVESEVPYYKYVPDPVLEKDHVTLYWDQSIITDRTIVANKPDIVVIDRSARRVMIVDVTIPHDENLVKAEKEKQIKYLDLAHEVVDMWNVNSAIIVPIVVTANGLIAKSLDDHLSKLSLGGWIKGLIQKAVLLDTARIVRRFLSLEP

SEQ ID NO: 29524 - protein, 1202 aa, Noctua fimbriata
MLTRAAARRARLPPPDPSLSSASPPPESSHIVSAVTPAVAVASSSSDEYFSPPTSPTPVRRQGRGRPPRSLGLRGHPAPSRVPAAGGCVQRMRWTHSINENVIRAYYGSTEGGTNLTAYRVGMLSLFQVLEPTVNVSAQRLSDQVRVIQRNHMLDDAVLDRLRSEVLSNRIVLTPAQTAVQASVIDATPPRFNPAVVEEDDRVAVVSSQCNDRLRSALEDALREYRSTPTELRPRLPRLPMHNKNRALVCALDSQLENIFESSENLVDTHSILYCGAVAACRLANVKFPNCDVATRPKPAVPAWQRRIERRIDGARVLIGKLHCFREGNTRPRVMRFVRRAFSGTGISPQEYMSRATERIDFLKQKVYAWANRIRRYKRRVDRYSQNRMFQSDERWVYRAWERPEPNMTDVCRPDDAATSSFWRSIWSVPVCHTEADWMCDVERVCEPIPEMEPILITPLDIARAVRPLPNWKSPGPDGLHNFWLKWLSSSHTCLASQFQSSLESGSLPQFLTTGVTHLLHKSGSPAEPKNYRPITCLSTVYKLLTSILRAKINTHIDKNSIMSASQNGCRNGSRGTKELLLIDMAISQQVRRSRKDLSTCWIDYKKAYDSVPHTWLMRVLELYKIDATLRAFLESCMGQWRTVLRYPGCRQIQGNDEPVWIKRGIFQGDSLSPLWFCLALNPLSTLLEDSGLGYRLRRGGQVISHLLYMDDLKLFAPNELRLMELLKVTETFSSAIRMEFGVDKCAVMYVKQGEIMESEGIQLSDSIHLRTLSSTESYKYLGMSEALGINVTDMKQSLKERFFGRLNKVLHSLLSGGNKVRAFNGWVMPVLMYSFGVLKWTQTELDALDRRVRTLLTANRMHHPRSSVMRLYIPRKCGGRGFLNAKSLHNREMCSLREYFLKVEVGMHRDVVAVDKGLTPLSMAKENWRKPEVLTTDDRKEVWQGKELHGRFYRALHGPDVDFLASVSWLRFGDLFGETEGFVCAIMDEVMLTNNYRKYIMKDGTVDVCRACHRPGESIRHIISGCSRLANGEYLHRHNQVARIIHQQLALKYKLVESEVPYYKYVPDPVLEKDHVTLYWDQSIITDRTIVANKPDIVVIDRSARRVMIVDVTIPHDENLVKAEKEKQIKYLDLAHEVVDMWNVNSAIIVPIVVTANGLIAKSLDDHLSRLSLGGWIKGLIQKAVLLDTARIVRRFLSLEP

SEQ ID NO: 29525 - protein, 1202 aa, Noctua fimbriata
MLTRAAARRARLPPPDPSLSSASPPPESSHIVSAVTPAVAVASSSSDEYFSPPTSPTPVRRQGRGRPPRSLGLRGHPAPSRVPAAGGCVQRMRWTHSINENVMRAYYGSTEGGTNLTAYRVGMLSLFQVLEPTVNVSAQRLSDQVRVIQRNHMLDDAVLDRLRSEVLSNRIVLTPAQTAVQASVIDATPPRFNPAVVEEDDRVAVVSSQCNDRLRSALEDALREYRSTPTELRPRLPRLPMHNKNRALVCALDSQLENIFESSENLVDTHSILYCGAVAACRLANVKFPNCDVATRPKPAVPAWHRRIERRIDGARVLIGKLYCFREGNTRPRVMRFVRRAFSGTGISPQEYMSRATERIDFLKQKVYAWANRIRRYKRRVDRYSQNRMFQSDERWVYRAWERPELNMTDVCRPDDAATSSFWRSIWSVPVCHTEADWMCDVERVCEPIPEMEPILITPLDIARAVRPLPNWKSPGPEGLHNFWLKWLSSSHTCLASQFQSSLESGSLPQFLTTGVTHLLHKSGSPAEPKNYRPITCLSTVYKLLTSILRAKINTHIDKNSIMSASQNGCRNGSRGTKELLLIDMAISQQVRRSRKDLSTCWIDYKKAYDSVPHTWLMRVLELYKIDATLRAFLESCMGQWRTVLRYPGCRQIQGNDEPVWIKRGIFQGDSLSPLWFCLALNPLSTLLEDSGLGYRLRRGGQVISHLLYMDDLKLFAPNKLRLMELLKVTETFSSAIRMEFGVDKCAVMYVKQGEIMESEGIQLSDSIHLRTLSSTESYKYLGMSEALGINVTDMKQSLKERFFGRLNKVLHSLLSGGNKVRAFNGWVMPVLMYSFGVLKWTQTELDALDRRVRTLLTANRMHHPRSSVMRLYIPRKCGGRGFLNAKSLHNREMCSLREYFLKVDLGMHRDVVAVDKGLTPLSMAKENWRKPEVLTTDDRKEVWQGKELHGRFYRALHGPDVDFLASVSWLRFGDLFGETEGFVCAIMDEVMLTNNYRKYIMKDGTVDVCRACHRPGESIRHIISGCSRLANGEYLHRHNQVARIIHQQLALKYKLVESEVPYYKYVPDPVLEKDHVTLYWDQSIITDRTIVANKPDIVVIDRSARRVMIVDVTIPHDENLVKAEKEKQIKYLDLAHEVVDMWNVNSAIIEPIVVTANGLIAKSLDDHLSKLSLGGWIKGLIQKAVLLDTARIVRRFLSLEP

SEQ ID NO: 29526 - protein, 1199 aa, Noctua fimbriata
MITRAAYRRARLTTPDSPLSSASPPPDPGSPVSPAAAVASSSSDEYFSPPTSPTPVRRQGRGRPPRSLGLRGHPAPSRVPAAGGCVQRMRWTHSINENVMRAYYGSTEGGTNLTAYRVGMLSLFQVLEPTVNVSAQRLSDQVRVIQRNHMLDEAVLDRLRSEVLSNRIILTPAQTAVQASVVDATPPRFNPAVVEEDDRVAVVSSQCNDRLRSALEDALREYRSTPTELRPRLPRLPMHNKNRALVCALDSQLKNIFESSENLVDTHSILYCGAVAACRLANVKFPNCDVATRPKPAVPAWQRRIERRIDGARVLIGKLYCFREGNTRPRVMRFVRRAFLGTEISPQEYMSRVTERIDFLKQKVYAWANRIRRYKRRVDRYSQNRMFQSDERWVYRAWERPELNMTDVCRPDDAATCSFWRSIWSVPVCHTEADWMRDVERVCEPIPEMEPILITPLDIARAVRPLPNWKSPGPDGLHNFWLKWLSSSHTCLASQFQSSLESGSLPQFLTTGVTHLLHKSGSPAEPKNYRPITCLSTVYKLLTSILRVKINTHIDKNSIMSASQNGCRNGSRGTKELLLIDMAISQQVRRSRKDLSTCWIDYKKAYDSVPHTWLMRVLELYKIDATLRAFLESCMGQWRTVLRYPGCRQIQGNDEPVWIKRGIFQGDSLSPLWFCLALNPLSTLLEDSGLGYRLRRGGQVISHLLYMDDLKLFAPNKLRLMELLKVTETFSSAIRMEFGVDKCAVMYVKQGEIMESEGIQLSDSIHLRTLSSTESYKYLGMSEALGINVTDMKQSLKERFFGRLNKVLHSLLSGGNKVRAFNGWVMPVLMYSFGVLKWTQTELDALDRRVRTLLTANRMHHPRSSVMRLYIPRKCGGQGFLNAKSLHNREMCSLREYFLKVEVGMHRDVVAVDKGLTPLSMAKENWRKPEVLTTDDRKEVWQGKELHGRFYRALHGPDVDFLASVSWLRFGDLFGETEGFVCAIMDEVMLTNNYRKYIMKDGTVDVCRACHRPGESIRHIISGCSRLANGEYLHRHNQVARIIHQQLALKYKLVESEVPYYKYVPDPVLEKDHVTLYWDQSIITDRTIVANKPDIVVIDRSARRVMIVDVTIPHDENLVKAEKEKQIKYLDLAHEVVDMWNVNSAIIVPIVVTANGLIAKSLDDHLSKLSLGGWIKGLIQKAVLLDTARIVRRFLSLEP

SEQ ID NO: 29527 - protein, 1202 aa, Noctua fimbriata
MITRAAYRRARLPPPDPSLSSASPPPESSPIVSAVTPAVAVASSSSDEYFSPPTSPTPVRRQGRGRPPRSLGLRGHPAPSRVPAAGGCVQRMRWTHSINENVMRAYYGSTEGGTNLTAYRVGMLSLFQVLEPTVNVSAQRLSDQVRVIQRNHMLDDAVLDRLRSEVLSNRIVLTPAQTAVQASVIDATPPRFNPAVVEEDDRVAVVSSQCNDRLRSALEDALREYRSTPTELRPRLPRLPMHNKNRALVCALDSQLENIFESSENLVDTHSILYCGAVAACRLANVKFSNCDVATRPKPAVPAWQRRIERRIDGARVLIGKLHCFREGNTRPRVMRFVRRAFSGTGISPQEYMSRVTERIDFLKQKVYAWANRIRRYKRRVDRYSQNRKFQSDERWVYRAWERPELNMTDVCRPDDAATSSFWRSIWSVPVCHTEADWMRDVERVCEPIPEMEPILITPLDIARAVRPLPNWKSPGPDGLHNFWLKWLSSSHTCLASQFQSSLESGSLPQFLTTGVTHLLHKSGSPAEPKNYRPITCLSTVYKLLTSILRAKINTHIDKNSIMSASQNGCRNGSRGTKELLLIDMAISQQVRRSRKDLSTCWIDYKKAYDSVPHTWLMRVLELYKIDATLRAFLESCMGQWRTVLRYPGCRQIQGNDEPVWIKRGIFQGDSLSPLWFCLALNPLSTLLEDSGLGYRLRRGGQVISHLLYMDDLKLFAPNKLQLMELLKVTETFSSAIRMEFGVDKCAVMYVKRGEIMESEGIQLSDFIHLRSLSSSESYKYLGMSEALGINVTDMKQSLKERFFGRLNKVLHSLLSGGNKVRAFNGWVMPVLMYSFGVLKWTQTELDALDRRVRTLLTANRMHHPRSSVMRLYIPRKCGGRGFLNAKSLHNREMCSLREYFFKVEVGMHRDVVAVDKGLTPLSMAKENWRKPEVLTTDDRKEVWQGKELHGRFYRALHGPDVDFLASVSWLRFGDLFGETEGFVCAIMDEVMLTNNYRKYIMKDGTVDVCRACHRPGESIRHIISGCSRLANGEYLHRHNQVARIIHQQLALKYKLVESEVPYYKYVPDPVLEKNHVTLYWDQSIITDRTIVANKPDIVVIDRSARRVMIVDVTIPHDENLVKAEKEKQIKYLDLAHEVVDMWHLNSAIIVPIVVTANGLIAKSLDEHLSKLSLGGWIKGLIQKAVLLDTARIVRRFLSLEP

SEQ ID NO: 29528 - protein, 1206 aa, Noctua fimbriata
MITRSRAKQLQEAHTPSPGSSLSSASQPPRRATSVSTVSPVAAVASSSSDEFFSPPSTPPPSPRRRGRGRPPAGLGPRGQPAPNRVPAAGGNVSRMRWTQSINEQVMRAYYGATEGGTNLTAYRVGMLSLFQVLEPTVNVSAQRLSDQVRVIQRNHMLDDAVLDRLRSEVLSNRIVLTPAQTAVQASVIDATPPRFNPAVVEEDDRVAVVSSQCNDRLRSALEDALREYRSTPTELRPRLPRLPMHNKNRALVCALDSQLENIFESSENLVDTHSILYCGAVAACRLANVKFPNCDVATRPKPAVPAWQRRIERRIDGARVLIGKLHCFREGNTRPRVMRFVRRAFSGTGISPQEYMSRVTERIDFLKQKVYAWANRIRRYKRRVDRYSQNRMFQSDERWVYRAWERPELNMTDVCRPDDAATSSFWRSIWSVPVCHTEADWMRDVERVCEPIPEMEPILITPLDIARAVRPLPNWKSPGPDGLHNFWLKWLSSSHTCLASQFQSSLESGSLPQFLTTGVTHLLHKSGSPAEPKNYRPITCLSTVYKLLTSILRAKINTHIDKNSIMSASQNGCRNGSRGTKELLLIDMAISQQVRRSRKDLSTCWIDYKKAYDSVPHTWLMRVLELYKIDATLRAFLESCMGQWRTVLRYPGCRQIQGNDEPVWIKRGIFQGDSLSPLWFCLALNPLSTLLEDSGLGYRLRRGGQVISHLLYMDDLKLFAPNKLRLMELLKVTETFSSAIRMEFGVNKCAVMYVKQGEIMESEGIQLSDSIHLRTLSSTESYKYLGMSEALGINVTDMKQSLKERFFGRLNKVLHSLLSGGNKVRAFNGWVMPVLMYSFGVLKWTQTELDALDRRVRTLLTANRMHHPRSSVMRLYIPRKCGGRGFLNAKSLHNREMCSLREYFLKVEVGMHRDVVAVDKGLTPLSMAKENWRKPEVLTTDDRKEVWQGKELHGRFYRALHGPDVDFLASVSWLRFGDLFGETEGFVCAIMDEVMLTNNYRKYIMKDGTVDVCRACHRPGESIRHIISGCSRLANGEYLHRHNQVARIIHQQLALKYKLVESEVPYYKYVPDPVLEKDHVTLYWDQSIITDRTIVANKPDIIVIDRSARRVMIVDVTIPHDENLVKAEKEKQIKYLDLAHEVVDMWNVNSAIIVPIVVTANGLIAKSLDDHLSKLSLGGWIKGLIQKAVLLDTARIVRRFLSLEP

SEQ ID NO: 29529 - protein, 1202 aa, Atethmia centrago
MLTRSAARARPPPPDSSLSSASPPPVPSPTVSAVTTPAAVVASSSSDEYFSSPTSPTPVRRQGRGRPPKSLGLRGQLAPSRVPAAGGCVQRMRWTQSMNENVMRAYYGSTEGGTNLTAYRVRMLSLFQKLEPTVNVSAQRLSDQVRVIQRNHRLDDAALDRLRSEVLSNHIVSTPAQTATHAPIINAIPPRSNHDVEEEDDRVATVSSQCNVRLRSALEDAFREYRSTPTELRPRLPRLPMHKKNRALVCTLDSLLKDFFESSEDLVDTHSILYCAAVAACRLANVKFPNCDGATRPKPAVPAWQCRIERRIDGARVLIGKLYCFREGNTRPRVMRFVRRAFSGTGISPREYMSRVTERIDFLKQKVCAWASRIRRYKRRVDRYTQNRMFQSDERWVYRAWERPEQNETDVCRPDDATTTAFWRSIWSVPVCHAEADWMRDVERVCETIPEMDVVIITPSDIARAVRPLPNWKSPGPDGLHNFWLKWLTSSHTCLASQFQSSLESGSLPQFLTTGITHLLHKSGSPAEPKNYRPITCLSTVYKLLTSILRAKINTHIDSNSIMSASQNGCRNGSRGTKELLLIDMAISQQVRRFRKDLSTCWIDYKKAYDSVPHTWLMRVLEFYKIDTTLRTFLESCMGQWRTVLRYPGCRQIQGNDEPVWIKRGIFQGDSLSPLWFCLALNPLSTLLEDSGLGYRLRRGGQVISHLLYMDDLKIFAPNKLQLMELLKVTETFSSAIRMEFGVDKCAVMHVKRGEIMESEGIQLSDSIHLRSLSSPESYKYLGMSEALGINVTDMKQSLKERFFGRLKKVLISPLSGGNKVRAFNGWVMPVLMYSFGILKWTQTELDALDRRVRTLLTANRMHHPRSSVMRLYIPRKCGGRGFLNAKTLHNREICSLREYFLKTEVGMHRDVVAVDKGLTPLSMAKENWCKPVILTTDDRKEIWQNKELHGRFYRALHEPDVDFLASVSWLRFGDLFGETEGFVCAIMDEVILTNNYRRHIMKDGTVDVCRACHRPGESIRHIISGCSRLANGEYLHRHNQVARIIHQQLALKYKLVNSEVPYYKYAPDPVLENDHVTLYWDRSIITDRTIVANKPDIVVIDRLARRAMIVDVTIPHDENLVKAEKEKQIKYLDLAHEVVDMWNVDSAVIVPIVVTANGLMAESLNHHLSRLSLGGWIKGLIQKAVLLDTARIVRRFLSLES

SEQ ID NO: 29530 - protein, 962 aa, Atethmia centrago
MHKKNRALMCALDSQLKVFFESSEDLVDTHSILYCAAVAACRLANVKFPNSDGATRPKPAVPAWQCRIERRIDKARVLIGKLYCFREGNTRPRVMRFVRRAFSGTGISTREYMSHITERIDFLKQKVCAWASRIRRYKRRVDRYTQNRMFQSDERWVYRAWERPKQNVTDVCRPDDATTTAFWRSIWSVPVCHVEADWMRDVERVCETIPEMEVVIITPSDIARAVRPLPNWKSPGPDGLHNFWLKWLTSSHTCLASQFQSSLESGSLPQFMTTGITHLLHKSGSPAEPKNYRPITCLSTVYKLLTSILRAKINTHIDSNSIMSASQNGCRNGSRGTKELLLIDMAISQQVRRSRKDLSTCWIDYKKAYDSVPHTWLMRVLELYKIDTTLRTFLESCMGQWRTVLRYPGCRQIQGNDEPVWIKRGIFQGDSLSPLWFCLALNPLSMQLEDSGLGYRLRRGGQVISHLLYMDDLKIFAPNKLQLMKLLKVTETFSSAIRMEFGVDKCAVMHVKRGEIMESEGIQLSDSIHLRSLSSPESYKYLGMSEALGINVTDMKQSLKERFFGRLKKVLISLLSGGNKVRAFNGWVMPVLMYSFGILKWTQTELDALDRRVRTLLTANRMHHPRSSVMRLYIPRKCGGRGFLNAKTLHNREICSLREYFLKTEVGMHRDVVAVDKGLTPLSMAKENWCKPVVLTTDDRKEIWQSKELHGRFYRALHEPDVDFLASVSWLRFGDLFGETEGFVCAIMDEVILTNNYRRHIMKDGTVDVCRACHRPGESIRHIISGCSRLANGEYLHRHNQVARIIHQQLALKYKLVNSEVPYYKYVPDPVLENDHVTLYWDRSIITDRTIVANKPDIVVIDRLARRAMIIDVTIPHDDNLVKAEKEKQIKYLDLAHEVVDMWNVNSAVIVPIVVTANGLMARSLNHHLSRLALDDWIKGLIQKAVLLDTARIVRRFLSLEP

SEQ ID NO: 29531 - protein, 1202 aa, Atethmia centrago
MLTRSAARARPPPPDSSLSSVSPPPVPSPTVSAVTTPAAVVASSSSDEYFSPPTSPTPVRRQGRGRPPKSLGLRGQLAPSRVPAAGGCVQRMRWTQSMNENVMRAYYGSTEGGTNLTAYRVRMLSLFQELEPTVNVSAQRLSDQVRVIQRNHRLDDAALDRLRSEVLSNHIVSTPAQTATHTPIINAIPPRSNHDVEEEDDRVATVSSQCNVRLRSALEDAFREYRSTPTELRPRLPRLPMPKKNRALVCALDSLLKDFFESSEDLVDTHSILYCAAVAACRLANVKFPNCDGATRPKPAVPAWQCRIERRIDGARVLIGKLYCFREGNTRPRVMRFVRRAFSGTGISPREYMSRVTERIDFLKQKVCAWASRIRRYKRRVDRCTQNRMFQSDERWVYRSWERPEQNETDVCRPDDATTTAFWRSIWSVPVCHAEADWMRDVERVCETIPEMEVVVITPSDIARAVRPLPNWKSPGPDGLHNFWLKWLTSSHTCLASQFQSSLESGSLPQFLTTGITHLLHKSGSPAEPKNYRPITCLSTVYKLLTSILRAKINTHIDSNSIMSASQNGCRNGSRGTKELLLIDMAISQQVRRFRKDLSTCWIDYKKAYDSVPHTWLMRVLELYKIDTTLRTFLESCMGQWRTVLRYPGCRQIQGNDEPVWIKRGIFQDDSLSPLWFCLALNPLSTLLEDSGLGYRLRRGGQVISHLLYMDDLKIFAPNKLQLMELLKVTETFSSAIRMEFGVDKCAVMHVKRGEIMESEGIQLSDSIHLRSLSSPESYKYLGMSEALGINVTDMKQSLKERFFGRLKKVLISPLSGGNKVRAFNGWVMPVLMYSFGILKWTQTELDALDRRVRTLLTANRMHHPRSSVMRLYIPRKCGGRGFLNAKTLHNREICSLREYFLKTEVGMHRDVVAVDKGLTPLSMGKENWCKPVILTTDDRKEIWQNKELHGRFYRALHEPDVDFLASVSWLRFGDLFGETEGFVCAIMDEVILTNNYRRHIMKDGTVDVCRACHRPGESIRHIISGCSRLANGEYLHRHNQVARIIHQQLALKYKLVNSEVPYYKYAPDPVLENDHVTLYWDRSIITDRTIVANKPDIVVIDRLARRAMIVDVTIPHDENLVKAEKEKQIKYLDLAHEVVDMWNVDSAVIVPIVVTANGLMAESLNHHLSRLSLGGWIKGLIQKAVLLDTARIVRRFLSLES

SEQ ID NO: 29532 - protein, 1202 aa, Atethmia centrago
MLTRSAARARPPPPDSSLSSASPPPVPSPTVSAVTTPAAVVASSSSDEYFSPPTSPTPVRRQGRGRPPKSLGLRGQLAPSRVPAAGGCVQRMRWTQSMNENVMRAYYGSTEGGTNLTAYRVRMLSLFQKLEPTVNVSAQRLSDQVRVIQRNHRLDDAALDRLRSEVLSNHIVSTPAQTATHAPIINAIPPRSNHDVEEEDDRVATVSSQCNVRLRSALEDAFREYRSTPTELRPRLPHLPMHKKNRALVCTLDSLLKDFFESSEDLVDTHSILYCAAVAACRLANVKFPNCDGATRPKPAVPAWQCRIERRIDGARVLISKLYCFREGNTRPRVMRFVRRAFSGTGISPREYMSRVTERIDFLKQKVCAWASRIRRYKRRVDRYTQNRMFQSDERWVYRAWERPEQNETDVCRPDDATTTAFWRSIWSVPVCHAEADWMRDVERVCETIPEMEVVIITPSDIARAVRPLPNWKSPGPDGLHNFWLKWLTSSHTCLASQFQSSLESGSLPQFLTTGITHLLHKSGSPAEPKNYRPITCLSTVYKLLTSILRAKINTHIDSNSIMSASQNGCRNGSRGTKELLLIDMAISQQVRRFRKDLSTCWIDYKKAYDSVPHTWLMRVLEFYKIDTTLRTFLESCMGQWRTVLRYPGCRQIQGNDEPVWIKRGIFQGDSLSPLWLCLALNPLSTLLEDSGLGYRLRRGGQVISHLLYMDDLKIFAPNKLQLMELLKVTETFSSAIRMEFGVDKCAVMHVKRGEIMESEGIQLSDSIHLRSLSSPESYKYLGMSEALGINVTDMKQSLKERFFGRLKKVLISPLSGGNKVRAFNGWVMPVLMYSFGILKWTQTELDALDRRVRTLLTANRMHHPRSSVMRLYIPRKCGGRGFLNAKTLHNREICSLREYFLKTEVGMHRDVVAVDKGLTPLSMAKENWCKPVILTTDDRKEIWQNKEPHGRFYRALHEPDVDFLASVSWLRFGDLFGETEGFVCAIMDEVILTNNYRRHIMKDGTVDVCRACHRPGESIRHIISGCSRLANGEYLHRHNQVARIIHQQLALKYKLVNSEVPYYKYAPDPVLENDHDTLYWDRSIITDRTIVANKPDIVVIDRLARRAMIVDVTIPHDENLVKAEKEKQIKYLDLAHEVVDMWNVDSAVIVPIVVTANGLMAESLNHHLSRLSLGGWIKGLIQKAVLLDTARIVRRFLSLES

SEQ ID NO: 29533 - protein, 1202 aa, Atethmia centrago
MLTRSAARARPPPPDSSLSSASPPPVPSPTVSAVTTPAAVVALSSSDEYFSPPTSPTPVRRQGRGRPPKSLGLRGQLAPSRVPAAGGCVQRMRWTQSMNENVMRAYYGSTEGGTNLTAYRVRMLSLFQELEPTVNVSAQRLSDQVRVIQRNHRLDDAALDRLRSEVLSNHIVSTPAQTATHAPIIDAIPPRSNHDVEEEDDRVATVSSQCNVRLRSALEDAFREYRSTPTELRPRLPRLPMHKKNRALVCALDSLLKDFFESSEDLVDTHSILYCAAVAACRLANVKFPNCDEATRPKPAVPAWQYRIERRIDGARVLISKLYCFREGNTRPRVMRFVRRAFSGTGISPREYMSRVTERIDFLKQKVCAWASRIRRYKRRVDRYTQNRMFQSDERWVYRAWERPEQNETDMCRPDDATTTAFWRSIWSEPVCHAEADWMRDVERVCETIPEMEVVVITPSDIARAVRPLPNWKSPGPDGLHNFWLKWLTSSHTYLASQFQSSLESGSLPQFLTTGITHLLHKSGSPAEPKNYRPITCLSTVYKLLTSILRAKINTHIDSNSIMSASQNGCRNGSRGTKELLLIDMAISQQVRRSRKDLSTCWIDYKKAYDSVPHTWLMKVLELYKIDTTLRTFLESCMGQWRTVLRYPGCRRIQGNDEPVWIKRGIFQGDSLSPLWFCLALNPLSTLLEDSGLGYRLRRGGQVISHLLYMDDLKIFAPNKLRLMELLKVTETFSGAIRMEFGVDKCAVMHVKRGEIMESEGIQLSDSIHLRSLSSPESYKYLGMSEALGINVTDMKQLLKERFFGRLKKVLISLLSGGNKVRAFNGWVMPVLMYSFGILKWTQTELDALDRRVRTLLTANRMHHPRSSVMRLYIPRKCGGRGFLNAKTLHNREICSLREYFLKAEVGMHRDVVAVDKGLTPLSMAKENWCKPVVLTTDDRKEIWQNKELHGRFYRALHEPDVDFLASVSWLRFGDLFGETEGFVCAIMDEVILTNNYRRHIMKDGTFDVCRACHRPGESIRHIISGCSRLANGEYLHRHNQVARIIHQQLALKYKLVNSEVPYYKYVPDPVLENDHVTLYWDRSIITDRTIVANKPDIVVIDRLARRAMIVDVTIPHDDNLVKAEKEKQIKYLDLAHEVVDMWNVNSAVIVPIVVTANGLMAESLNHHLSRLSLGGWIKGLIQKAVLLDTARIVRRFLSLEP

SEQ ID NO: 29534 - protein, 1169 aa, Atethmia centrago
MTTPTAAVASSSSDEYFSPPSSPSPVRRQGRSRPPKSLGLRGHPAPSRVPAAGGCVQRMKWTQSMNENVKRAYYGSTEGGTNLTAYRVKMLSLFQELEPAVNVSAQRLSDQVRVIQRNRRLDDAALDRLRSEVLSNHIISTPPQTAVHTPIIDVIPPRSNHGVEEEDDRAATVSSQCYVRLRSALEDAFREYRSTPTELRPRLPRLPMHKKNRALMCALDSQLKVFFESSEDLVDTHSILYCAAVAACRLANVKFPNSDGATRPKPVLPAWQCRIERRIDGARVLIGKLYCFREGNTRPRVMRFVRRAFSGTGISPREYMSHITERIDFLKQKVCAWASRIRRYKRRVDRYTQNRMFQSDERWVYRAWERPKQNETDVCRPDDATTTAFWRSIWSVPVCHVEADWMRDVERVCETIPEMEVVIITPSDIARAVRPLPNWKSPGPDGLHNFWLKWLTSSHTCLASQFQSSLESGSLPQFMTTGITHLLHKSGSPAEPKNYRPITCLSTVYKLFTSILRAKINTHIDSNSIMSASQNGCRNGSRGTKELLLIDMAISQQVRRFRKDLSTCWIDYKKAYDSVPHTWLMRVLELYKIDTTLRTFLESCMGQWRTVLRYPGCRQIQGNDERVWIKRGIFQGDSLSPLWFCLALNPLSTLLEDSGLGYRLRRGGQVISHLLYMDDLKIFAPNKLQLMELLKVTETFSSAIRMEFGVDKCAVMHVKRGEIMESEGIQLSDSIHLRSLSSPESYKYLGMSEALGINVTDMKQSLKERFFGRLKKVLISPLSGGNKVRAFNGWVMPVLMYSFGILKWTQTELDALDRRVRTLLTANRMHHPRSSVMRLYIPRKCGGRGFLNAKTLHNREICSLREYFLKTEVGTHRDVVAVDKGLTPLSMAKENWCKPVILTTDDRKEIWQNKELHGRFYRALHEPDVDFLASVSWLRFGDLFGETEGFVCAIMDEVILTNNYRRHIMKDGTVDVCRACHRPGESIRHIISGCSRLANGEYLHRHNQVARIIHQQLALKYKLVNSEVLYYKYAPDPVLENDHVTLYWDRSIITDRTIVANKPDIVVIDRLARRAMIVDVTIPHDENLVKAEKEKQIKYLDLAHEVVDMWNVDSAVIVPIVVTANGLMAESLNHHLSRLSLDGWIKGLIQKAVLLDTARTVRRFLSLES

SEQ ID NO: 29535 - protein, 1110 aa, Mesoligia furuncula
MRWTQSMNENVMRAYYGSTEGGINLTAYRDRMLSLFQELEPTVNVSAQRLSDQVRVIQRNHRLDDIALDRLRSEVLSNHIVSTSAQTAAQVSTVDAIPPRFNRVEEEDDRVDTVSSQCNVRLRSALEDALREYRPTPTELRPRLPRLPMHKKNRALVCALDSQLKNFFESSEDLVDTHSILYCAAVAACRLANVKFSSCDGATRPKPAVPAWQRRIERRIDGARVLIGKLYCFREGNTRPRVMRFVRRAFSGTGISPREYMSRVTERIDFLKQKVCAWASRIRRYKRRVDRYTQNRMFQSDERWVYRAWERPEQNVTDVCRPDDAATSAFWCSIWSVPVCHTEAGWMQDVERVCESVPEMEKVLITPSDVARAVRPLSNWKSPGPDGLHNFWLKWLISSHTCLASQFQSSLESGSLPQFLTTGVTHLLHKSGSPAEPKNYRPITCLSTVYKLLTSILRAKINKHIESNSIMSASQNGCRNGSRGTKELLLIDMAISQQVRRFRKDLSTCWIDYKKAYDSVPHTWLMRVLELYKIDATLRTFLESCMGQWKTVLRYPGCRQIQGNDEPVWIKRGIFQGDSLSPLWFCLALNPLSTLLEDSGLGYRLRRGGQVISHLLYMDDLKLFAPNKLRLMELLKVTKTFSSAIKMEFGVDKCAVMHVKRGEIMESEGIQLSDSISLRSLSSSESYKYLGMSEALGINDADMKQSLKERFFCRLKKVLISLLSGGNKVRAFNGWVMPVLMYSFGILKWTQTELDALDRRVRTLLTANRMHHPRSSVMRLYIPRKCGGRGFLNAKTLHNREVCSLREYFLKAEVGMHRDVVAVDKGLTPLSMAKENWRKPVVLSTDDRKRVWQSKELHGRFYRALHEPGVDFIASVSWLRFGDLFGETEGFVCAIMDEVILTNNYRRHIMKDGTVDVCRACHRPGESIRHIISGCSRLANGEYLHRHNQVARIIHQQLALKYKLVDSEVPYYKYVPDPVLENDHVTLYWDRSIITDRTIVANKPDIVVIDRLARRTMIVDVTIPHDGNLVKAEKEKQIKYLDLAHEVVDMWNVSSAIIVPIVVSANGLMAESLDQHLSRLSLGGWIKGLIQKAVLLDTARIVRRFLSLEP

SEQ ID NO: 29536 - protein, 1201 aa, Mesoligia furuncula
MLTRSAARRAHLPPPDSSLSPAPPPPEPSPIESAVTPVVAVASSSSDEYFSPPTSPTPVRRQGRGRPPNSLGLRGHPAPSRVPATGGCVQRMRWTQSMNENVMRAYYGSTEGGINLTAYRDRMLSLFQELEPTVNVSAQRLSDQVRVIQRNHRLDDIALDRLRSEVLSNHIVSTSAQTAAQVSTVDAIPPRFNRVEEEDDRVDTVSSQCNVRLRSALEDALREYRSTPTELRPRLPRLPMHKKNRALVCALDSQLKNFFESSEDLVDTHSILYCAAVAACRLANVKFSSCDGATRPKPAVPAWQRRIERRIDGARVLIGKLYCFREGNTRPRVMRFVRRAFSGTGISPREYMSRVTERIDFLKQKVCAWASRIRRYKRRVDRYTQNRMFQSDERWVYRAWERPEQNVTDVCRPDDAATSAFWCSIWSVPVCHTEAGWMQDVERVCESVPEMEKVLITPSDVARAVRPLSNWKSPGPDGLHNFWLKWLISSHTCLASQFQSSLESGSLPHFLTTGVTHLLHKSGSPAEPKNYRPITCLSTVYKLLTSILRAKINKHIESNSIMSASQNGCRNGSRGTKELLLVDMAISQQVRRSRKDLSTCWIDYKKAYDSVPHTWLMRVLELYKIDATLRTFLESCMGQWKTVLRYPGCRQIQGNDEPVWIKRGIFQGDSLSPLWFCLALNPLSTLLEDSGLGYRLRRGGQVISHLLYMDDLKLFAPNKLRLMELLKVTKTFSSAIKMEFGVDKCAVMHVKRGEIMESEGIQLSDSISLRSLSSSESYKYLGMSEALGINDADMKQSLKERFFCRLKKVLISLLSGGNKVRAFNGWVMPVLMYSFGILKWTQTELDALDRRVRTLLTANRMHHPRSSVMRLYIPRKCGGRGFLNAKTLHNREVCSLREYFLKAEVGMHRDVVAVDKGLTPLSMAKENWRKPVVLSTNDRKRVWQSKELHGRFYRALHEPGVDFIASVSWLRFGDLFGETEGFVCAIMDEVILTNNYRRHIMKDGTVDVCRACHRPGESIRHIISGCSRLANGEYLRRHNQVARIIHQQLALKYKLVDSEVPYYKYVPDPVLENDHVTLYWDRSIITDRTIVANKPDIVVIDRLARRTMIVDVTIPHDGNLVKAEKEKQIKYLDLAHEVVDMWNVSSAIIVPIVVSANGLMAESLDQHLSRLSLGGWIKGLIQKAVLLDTARIVRRFLSLEP

SEQ ID NO: 29537 - protein, 868 aa, Xestia c-nigrum
MRFVRRAFSGTDVSFRDYLARITERIDFLKQKICAWASRIRRYKRRVERYTQNRSFQSDERWVYRAWERPDQGVTDTRLPDDDAMCSFWRSIWSVPVSHTEGDWIRKVEQVCDQIQEMGAIIISPQDVACAVRPLPNWKSPGPDGLHNFWIKWFQRSHARLASQFQSALESGSLPQFMTTGITHLLHKSGSTAEPKNYRPITCLPTVYKVLTSILRAKINKHIESNSIMSTSQNGCRNGSRGTKELLLIDMAISQQVRRSRKNLSTCWIDYKKAYDSVPHTWLMRVLELYKINATLRAFLESCMGQWKTVLRYPGCGQIQGSDEPVWIKRGIFQGDSLSPLWFCLALNPLSTLLENSGLGYRLRKDGQVISHLLYMDDLKLFAPNKLQLLELLKVTETFSNAIRMEFGVDKCAVMYVKRGEIMESEGLQLSDSIHLRSLSSSESYKYLGMSEALGINVTDMKQSLRERFFGRLKKVLNSLLSGGNKVRAFNGWVMPVLMYSFGILKWTQTELDALDRRVRTLLTANRMHHPRSSMMRLYIPRKCGGRGFLNAKNLHNREVCSLREYFLEADVGMHRDVVSVDKGLTPLSLANGNWRKPKVLDTNDRREEWQGKELHGRFYRALHGPDVDFLASVSWLRFGDLFGETEGFVCAIMDEVMMTNNYRKYIVKDGTVDICRACHRPGESIRHIISGCSSLANGEYLHRHNLVARIIHQQLALKYNLVESEVPYYKYAPDPVLVNGNITLYWDRPITTDRTVVANRPDIVVIDRLERRTMIVDITVPHDENLVKAEQDKKNKYLDLAREVVDMWDVSTAIIVPIVVSANGLIAKSLDQHLRRLSLGSWIKGLIQKAVLLDTARIVRKFLSQEP

SEQ ID NO: 29538 - protein, 1199 aa, Xestia c-nigrum
MITRAASRRALIPSPDSSLSSASPPPDPGSPVSPVAAVASSSSDEYFSPPTSPTPVRRAGRGRPPKGLGLRGQQAPSRVPATGGCVQRMKWTQLMNENVMRAYYGSTEGGTNLTAYRVRMLSLFQDLEPTVNASVQRLSDQVRVIQRNHLLDGAALDRLRSEVLSNRIILTPAQTAVQASSIDANPPRSNPAVVEEDDRVATVSSQCNDRLRSALEDALHEYRSTSAELRPRLPRLPMHKKNRALVCALDSQLKNVFESSEDLVDTHSILFCGAVAACRLANVKFPNCDLATRPKPAVPAWQRRIERRIDGARVLIGKLHCFREGNTRPRVMRFVRRAFSGTEISPQEYMSRVTERIDFLKQKVYAWASRIRRYKRRVDRYSQNRMFQSDERWVYRAWERPQQNMTDVCRPDDAATSSFWRSIWSVPVCHSEADWMRDVERVCEPIPTMEPILITPLDIARAVRPLPNWKSPGPDGLHNFWLKWFSSSHTCLASQFQSSLESGSLPQFLTTGITHLLHKSGSPAEPKNYRPITCLSTVYKLLTSILRTKINTHVDSNSIMSASQNGCRNGSRGTKELLLIDMAISQQVRRARKDLSICWIDYKKAYDSVPHSWLKRVLELYKIDATLRTFLESCMGQWRTVLRYPGCRQIQGNDEPVWIKRGIFQGDSLSPLWFCLALNPVSTLLENSGLGYRLRKDGQVISHLLYMDDLKLFAPNKLQLMELLKVTETFSSAIGMEFGVDKCAVMYVKRGKIMGSEGLQLSDSIHLRSLSSSESYKYLGMSEALGINVTDMKQSLKERFFGRLKKVLNSLLSGGNKVRAFNGWVMPVLMYSFGILKWTQTELDALDRRVRTLLTENRMHHPRSSVMRLYIPRKCGGRGFLNAKTLHNREVCSLREYFLKVDVGMHRDVVAVDKGLTPLSMAKENWRKPVVLTTDDRKKEWQGKELHGRFYRALHGPDVDFLASVSWLRFGDLFGETEGFVCAIMDEVMLTNNYRKYIMKDGTVDVCRACHCPGESIRHIISGCSRLANGEYLHRHNQVARIIHQQLALKFKLVESEVPYYKYVPDPVLVKDHVTLYWDQSIITDRTIVANKPDIVVIDRSARRVMIIDVTIPHDENLVKAEKEKQMKYLDLAHEVRDMWNMNSVIIVPIVVTANGLIAKSLDEHLSKLSLGGWIKGLIQKAVLLDTARIVRRFLSLQP

SEQ ID NO: 29539 - protein, 1203 aa, Omphaloscelis lunosa
MLTRSAARLARPPPPDSSLSSASPPPVPSPTVSATTTPAAVVASSSSDEYFSPPTSPTPVRRQGRGRPPKSLGLRGQPAPSRVPAAGGCVQRMRWTQSMNENVMRAYYGSTEGGTNLTAYRVRMLSLFQELEPTVNVSAQRLSDQVRVIQRNHRLDDTALDRLRSEVLSNHIVSTRAQTAAQASNIDATPPRFNHGVEEEDDRVATVSSQCNNRLRSALEDAFREYRYTPTELRPRLPRLPMHNKNRALVCALDSQLTNFFESSEDLIDTHSILYCAAVAACRLANVKFPNCDGATRPKPVVPAWQCRIERRIDGARVLIGKLYCFREGNTRPRVMRFVRRAFSGTGISPQDYMSRVTERIDFLKQKVCAWASRIRRYKRRVDRYTQNRVFQSDERWVYRAWERSEQNVTDVCRPDDAATSAFWRSIWSVPVCHTEAGWMQDVERVCETIPVMDAVFITPLDVATAVRPLPNWKSPGPDGLHNFWLKWLSSSHTRLASQFQSSLESGSLPQFLTTGVTHLLHKSGNPAEPKNYRPITCLSTVYKLLTSILRTKINTHIDNNSIMSVSQNGCRNGSRGTKELLLIDMAISQQVRRSRKDLSTCWIDYKKAYDSVPHTWLMRVLELYKVDTTLRTFLMSCMGQWRTVLRYPGCRQTQGNDEPVWIKRGIFQGDSLSPLWFCLALNPLSTLLEDSGLGYRLRRGGQVISHLLYMDDLKLFAPNKLRLMELLKVTETFSGAIRMEFGVDKCAVMHVKRGEIMESEGIQLSDSIHLRSLSSAENYRYLGMSESLGINVADMKQSLKERFFGRPKKVLISFLSGGNKVRAFNGWVMPVLMYSFGILKWTQTELDALDRRVRTLLTANRMHHPHSSVMRLYIPRKCGGRGFLNAKTLHNREVCSLREYFFKADVGMHRDVVAVDNGLTPLSMAKENWLKPVVLTTDDRKEVWQSKALHGRYFRALHEPDVDFLASVSWLRFGDLFGETEGFICAIMDEVILTNNYRRHIMKDGTVDVCRACHRPGESIRHIISGCSRLANGEYLHRHNQVARIIHQQLALKYELVDSEVPYYKYVPDPVLENDHVTLYWDRSIITDRTIVANKPDIVVIDRLARHAMIVDVTIPHDENLVKAEKEKQIKYLDLAHEVVDMWNVSSAIIVPIVVTANGLMAKSLDQHLSRLSLDGWIKRLIQKAVLLDTARIVRRFLSLQP

SEQ ID NO: 29540 - protein, 1079 aa, Sesamia nonagrioides
MLSLFQALEPTVNVSAQRLSDQVRVIQRNHRLDDTALDRLRSEVLSNQIAPTLTQTAALASIIDAVPPRSNHVEEEDDRVETVSSQYNDRLRSTLEDAFREYRSTPTDLRPRLPRLPMHKKNRALVSALDSQLKNVFESSEDLIDTHSILFCAAVAACRLANIKFPNCDEANRPKPAVPAWQHRIERRIDGARVLIGKLYCFREGNTRPRVMRFVRQAFSGTGISPREYLTHVTERIDFLKQKVCAWANRIRRYKRRVDRYTQNRMFQSDERWVYRAWERSELNEADVCRPDVAATSAFWRSIWSVPVCHAEGDWIQNVEQVCEMIPEMDTILITPIDVATAVRSLPNWRSPGPDGLHNFWLKWLSSSHTCLASQFQSSLESGSLPQFLTTGITHLLHKSGSTAEPNNYRPITCLPTVYKVLTSILKAKINKHLDSNSIMSVSQNGCKSGSRGTKELLLIDMAISQQVRRSRKDLSTCWIDYKKAYDSVPHTWLMRVLELYKINTTLRTFLRSCMGQWKTVLRYPGSRRIQGNDEPVWIKRGIFQGDSLSPLWFCLALNPLSTLLEDSGLGYRLKRGGQVISHLLYMDDLKLFAPNKLHLMKLLNVTETFSSGIKMEFGVDKCAVMHVERGQIMESEGITLPDSIHLRSLSSFESYKYLGMSEALGINDADMKQSLKERFFGRLKKVLKSILSGGNKVRAFNGWVMPVLMYSFGILKWTQTELDALDRRVRTLLTANRMHHPRSSVMRLYIPRKCGGRGFLNAKTLHNREVCSLREHFLKTVVGMHHDVVTVDKGLTPLSMAKENWHKPIILTTDDRKMIWQSKELHGRFYRALHGPDVDFLASVSWLRFGDLFGETEGFVCAIMDEVILTNNYRRYIMKDGTIDVCRACHHPGESIRHIISGCSRLANSEYLHRHNQVARIIHQQLALKYKLVDSEVPYYKYVPDPVLENDHVTLYWDRSIITDRTIVANKPDIVVIDRLARLAMIVDVTIPHDGNLVKAEKEKQMKYLDLAHEVVDMWNVNSAVIVPIIVSANGLIAKSLDQHLLRLSLGSWIKGLIQKAVLLDTARIVRRFLSLEP

SEQ ID NO: 29541 - protein, 1203 aa, Sesamia nonagrioides
MLTRQAARRARSPPPDSSPSCASPPPVPSANAVSAVTTPATVVASSSSDEYFSPPTSPTPVRRQGRGRPPKSLGLRGHPAPSRVPAAGGCVQRMRWTQTMNENVMRAYYRATEGGTNLTAYRERMLSLFQALEPTVNVSAQRLSDQVRVIQRNHRLDDIALDRLRSEVLSNQITPTLTQTAAQASTIDAAPPRSNRVEEEDDRVETVSSQYNDRLRNALEDAFRDYRSTPTNLRPRLPRLPMHKKNRALVCALDSLLKNFFESSEDLIDTHSILYCTAVAACRLAKVKFPNCEEAARPKPAVPAWQRRIERRIDGTRVLIGKLYCFRDGNTRPRVMRFVRRAFSGTGISPREYINHLTERIDFLKQKVCAWASRIRRYKRRVDRYTQNRMFQSDERWVYRAWERPELNEADVCRPDDATTSAFWRGIWSVSVCHTEGDWIQNVEQVCETIPEMDAIFITSPDVATAVRSLPNWKSPGPDGLHNFWLKWLSSSHTCLASQFQSSLESGSLPQFLTTGITHLLHKSGSTAEPKNYRPITCLPTVYKVLTSILKAKINKHLDSNSIMSVSQNGCKSGSRGTKELLLIDMAISQQVRRSRKDLSTCWIDYKKAYDSVPHTWLMRVLELYKINATLRTFLRSCMGQWKTALHYPGSRQIQGNDEPVWIKRGIFQGDSLSPLWFCLALNPLSTLLENSGLGYRLRRGGQVISHLLYMDDLKLFAPNELHLMKLLNVTETFSSGIRMEFGVDKCAVMHVKQGEIMESAGITLPDSIHLRSLSSFESYKYLGMSEALGINDADMKQSLKERFFGRLKKVLNSLLSGGNKVRAFNGWVMPVLMYSFGILKWTQTELDALDRRVRTLLTANRMHHPRSSVMRLYIPRKCGGRGFLNAKTLHNREVCSLREYFLQTVVGMHHDVVTVDKGLTPLSMAKKNWHKPIILTTDNRKKVWQSKELHGRFYRALHEPDVDFLASVSWLRFSDLFGETEGFVCAIMDEVILTNNYRRYIMKDGTIDVCRACHHPGESIRHIISGCSRLANSEYLHRHNQVARIIHQQLALKYKLVDSEVPYYKYVPDPVLENDHVTLYWDRSIITDRTIVANKPDIVVIDRLARLAMIVDVTIPHDGNLVKAEKEKQIKYLDLAHEIVDMWNVNSAVIVPIVVSANGLIAKSLDQHLLRLSLGSWIKGLIQKAVLLDTARIVRRFLSLEP

SEQ ID NO: 29542 - protein, 1199 aa, Noctua janthe
MITRAAYRRARLTTPDSSLSSASPPPDPGSPVSPAAAVASSSSDEYFSPPTSPTPVRRQGRGRPPKSLGLRGHPAPSRVPAAGGCVQRMRWTQTINENVMRAYYGSTEGGTNLTAYRVRMLSLFQVLEPIVNVSAQRLSDQVRVIQRNHMLDDAALDRLRSEVLSNRIVLTPAQTAVQASTIDATPPRSNPAVVEEDDRVAMVSSQCNDRLRSALEDALREYRSTPTKLRPRLPRLPMHNKNRALVCALDSQLKNIFESSENLVDTHSILYCGAVAACRLANVKFPNYDVAIRPKPAVPTWQRRIVCRIDEARVLIGKLHCFREGNTRPRVMRFVRRAFSGTGISPQEYMSRVTERIDFLKQKVYAWANRIRRYKRRVDRYSQNRIFQSDERWVYRAWERPEQNMTDVCRPDDAATSSFWRSIWSVPVCHTEADWMRDVERACEPIPEMEPILITSIDITRAVRPLPNWKSPGPDGLHNFWLKWLSSSHTCLASQFQSSLESGSLPQFLTTGVTHLLHKSGSPAEPKNYRPITCLSTVYKLLTSILRVKINTHIDKNFIMSASQNGCRNRSRGTKELLLIDMAISQQVRRSRKDLSTCWIDYKKAYDSVPHTWLMRVLELYKIDATLRAFLESCMGQWRTVLRYPGCRQIQGNDEPVWIKRGIFQGDSLSPLWFCLALNPLSTLLEDSGLGYRLRRGGQVISHLLYMDDLKLFAPNKLRLMELLKVTETFSNAIRMEFGVDKCAVMYVKRGEIMESEGIQLSDSIHLRSLSSSESYKYLGMSESLGINVTDMKQSLRERFFGRLNKVLNSLLSGGNKVRAFNGWVMPVLMYSFGVLKWTQTELDALDRRVRTLLTANRMHHPRSSVMRLYIPRKCGGRGFLNAKTLHNREICSLREYFLKTEVGMHRDVVAVDKGLTPLSMAKENWRKPVVLTTDDRKEVWQGKELHGRFYRALHGPDVDFLASVSWLRFGDLFGETEGFVCAIMDEVMLTNNYRKYIMKDGTVDVCRACHRPGESIRHIISGCSRLANGEYLHRHNQVARIIHQQLALKYKLVESEVPYYKYVPDPVLEKDHVTLYWDRSIITDRTIVANKPDIVVIDRLARRVMIVDVTIPHDENLVKAEKEKQIKYLDLAHEVVDMWNVNSAIIVPIVVTANGLIAKSLDDHLSRLSLGGWIKGLIQKAVLLDTARIVRRFLSLEP

SEQ ID NO: 29543 - protein, 1200 aa, Mythimna ferrago
MLTRAAAQRARLPPPDSLLSSASPPPDPGSSVSPAAAVASSSSDEYFSPPTSPTPVRRPGRGRPPNGLGFRGQPAPSQVPAAGGCVQRMKWTQSMNENVMRAYYGSTEGGTNLTAYRVRMLSLFQDLEPTVNVSAQRLSDQVRVIQRNHRLDDAALDRLRSQVLSNPIVSTPQQIQTAGPSTYVTTTPRYVHVEDEADDRVNRVSSQCNDRLRSALEDALREYRSTPTELRPRLPRLPMHKKNRALVCALDSLLKNVFESSDSLLDTHSILYCGAVAACRLANVKFPCYGVATRQTPAAPAWQCRIERRIDEARALIGKLYCFREGNTRPRVMRFVRRAFLGTEISPREYMSRVTERIDFLKQKVCAWANRIRRYKRRVDRYSQNRLFQSDERWVYRAWERPGQNVTDGLRPDSVATNTFWRSIWSEPVCHNEGGWMRDVERVCEAIPEMDKVFITPLDVARAVRPLPNWKSPGPDGLQNFWLKWYSSSHAILASQFQSSLESGSLPQILTTGTTLLLHKTGSTADPKNYRPITCLSTVYKLLTSFLRVKITLHIEKNSIMFASQNGCRNGSRGTKELLLIDMAINQQVRRSRKDLSTCWIDYKKAYDSVPHTWLMKVLELYKIDATLRTFLESCMRQWKTVLRYPGCRPIQRNDEPIWIKRGIFQGESLSPLWFCLALNPLSTLLEDSGLGYRLRRGGQVLSHLLYMDDLKLFAHNNSQLMELLKVTETFSSAIRMEFGVDKCAVMHVRRGEIVESEGIQLSDSIHLRSLSSTETYKYLGMSEALGINVADMKQTLKERFFGRLKKVLNSLLSGGNKVRAFNSWVIPVLMYSFGILKWTQTELDALDRRVRTLLTANRMHHPRSSVMRLYIPRKCGGRGFLNAKTLHNREVCSLREYFLKTDVGMHRDVVAVDKGLTPLSMAKENWRKPVVLTTDDRKEVWKGKELHGRFFRALHEPDVDFSASVAWLRFSNLFGETEGFVCAIMDEVILTNNCRRHIMKDGTVDVCRACHRPGESIRHIISGCSRLANGEYLHRHNQVARILHQQLALKYNLVDSEVPYYRYVPDPVLENDHVTLYWDRSIITDRTIVANKPDIVVIDRLARRAMIVDVTIPHDENLVKAEKEKQIKYLDLAHEVVDMWNVDSAIIVPIVVTANGLIAKSFDDHLSKLSLHGWIKGLIQKAVLLDTARIVRRFLSLEP

SEQ ID NO: 29544 - protein, 1202 aa, Noctua pronuba
MLTRAAARRARLLPPDSSLSSASPLPESSPIVSAVTPAVAVASSSSDEYFSPPTSPTPVRRQGRGRPPTSLGLRGHPAPSRVPATGGCVQRMRWTHPINENVMRAYYGSTEGGTNLTAYRVRMLSLFQVLEPTVNVSAQRLSDQVRVIQRNHMLDDAVLDRLRSEVLSNRIVLTPSQTVVQTTAIDVSPPRSNPAVVEEDDRVATVSSQCNDRLRSALEDALREYRYTPTELRPRLPRLPMHKKNRALVCALDSQLKNLFESSEDLVDTHSILYCGAVAACRLAKLKFTNSDAATRPKPAVPAWQCRIERRIDGARVLIGKLHCFREGNTRPRVMRFVRRAFSGTGISPQEYMSRVTERIDFLKQKVYAWANRIRRYKRRVDRYSQNRMFQSDERWVYRAWERPEQNMADVCRPDDATTSSFWSSIWSVPVCHTEGDWMRAVERVCEPIPEMEPILITSLDVARSVRPLPNWKSPGPDGLHNFWLKWLSSSHTCLASQFQSSLESGALPQFLTTGVTHLLHKSGNPAEPKNYRPITCLSTVYKLLTSILRAKINTHIDKNSIMSASQNGCRNGSRGTKELLLIDMAISQQVRRSRKDLSTCWIDYKKAYDSVPHTWLMRVLELYKIDATLRTFLESCMGQWRTVLRYPGCRQIQGNDEPVWIKRGIFQGDSLSPLWFCLALNPLSTLLEDSGLGYRLRRGGQVISHLLYMDDLKLFAPNKLRLMELLKVTETFSSAIRMEFGVDKCAVMYVKRGEIMESEGIQLSDSIHLRSLSSSESYKYLGMSEALGINVTDMKQSLRERFFGRLKKVLNSLLSGGNKVRAFNGWVMPVLMYSFGILKWTQTELDALDRRVRTLLTANRMHHPRSSVMRLYIPRKCGGRGFLNAKTLHNRELCSLREYFLKAEVGMHRDVVAVDKGLTPLSMAKENWRKPVVLTTDDRKEVWQGKELHGRFYRALHGPDVDFLASVSWLRFGDLFGETEGFVCAIMDEVMLTNNYRKYIMKDGTVDVCRACHRPGESIRHIISGCSRLANGEYLHRHNQVARIIHQQLALKYKLVESEVPYYKYVPDPVLEKDHVTLYWDRSIITDRTIVANKPDIVVIDRSARRVMIVDVTIPHDENLVKAEKEKQIKYLDLAHEVVDMWNVNSAIIVPIVVTANGLMAKSLDDHLSRLSLGGWIKGLIQKAVLLDTARIVRRFLSLEP

SEQ ID NO: 29545 - protein, 1050 aa, Noctua pronuba
MLDDAALDRLRSEVLSNPIVLTPSQTVVQASTIDITPPRSNPAVAEEDDRVATVSSQCNDRLRSALEDALREYRYTRTEFRPRLPRLPMHKKNRALVCALDSQLKNLFESSENLVDTHSILYCGAVAACRLANVKFTNSDTATRPKPAVPAWQCRIERRIDGARVLIGKLHCFREGNTRPRVMRFVRRAFSGTGISPQEYMSRVTERIDFLKQKVYAWANRIRRYKRRVDRYSQNRMFQSDERWVYRAWERPEQNMTDVCRPDDATTSSFWSSIWSVPVCHTEADWMRDVERMCEPIPEMEPILITPQDIARAVRPLPNWKSPGPDGLHNFWLKWLSSSHTCLASQFQSSLESGSLPQFLTTGVTHLLHKSGSPAEPKNYRPITCLSTVYKLLTSILRAKINTHIDKNSIMSASQNGCRNGSRGTKELLLIDMAISQQVRRSRKDLSTCWIDYKKAYDSVPHTWLMRVLELYKVDATLRAFLESCMGQWRTVLRYPGCRQIQGNNEPVWIKRGIFQGDSLSPLWFCLALNPLSTLLEDSGLGYRLRRGGQVISHLLYMDDLKLFAPNKLRLMELLKVTETFSSAIRMEFGVDKCAVMYVKRGEIMESEGIQLSDSIHLRSLSSSESYKYLGMSEALGINVTDMKQSLRERFFGRLKKVLNSLLSGGNKVRAFNGWVMPVLMYSFGILKWTQTELDALDRRVRTLLTANRMHHPRSSVMRLYIPRKCGGRGFLNAKTLHNREVCSLREYFLKAEVGMHRDVVAVDKGFTPLSMAKENWRKPVVLTTDDRKEVWQGKELHGRFYRALHGPDVDFLASVSWLRFGDLFGETEGFVCAIMDEVMLTNNYRKYIMKDGTVDVCRACHRPGESIRHIISCCSRLANGEYLHRHNQVARIIHQQLALKYKLVESEVPYYKYVPDPVLEKDHVTLYWDRSIITDRTIVANKPDIVVIDRSARRVMIVDVTIPHDENLVKAEKEKQIKYLDLAHEVVDMWNVNSAVIVPIVVTANGLMAKSLDDHLSKLSLGGWIKGLIQKAVLLDTARIVRRFLSLEP

SEQ ID NO: 29546 - protein, 1199 aa, Noctua pronuba
MITRAASRRARLPTPDSSLSSASPPPDPGSPVLPAAAVASSSSDEYFSPPTSPTPVRRQGRGRPPRSLGLRGHPAPSRVPATGGCVQRMRWTHPINENVMRAYYGSTEGGTNLTAYRVRMLSLFQVLEPTVNVSAQRLSDQVRVIQRNHMLDDAALDRLRSEVLSNPIVLTPSQTVVQASTIDITPPRSNPAVAEEDDRVATVSSQCNDRLRSALEDALREYRYTRTEFRPRLPRLPMHKKNRALVCALDSQLKNLFESSENLVDAHSILYCGAVAACRLANVKFTNSDTATRPKPAVPAWQCRIERRIDGARVLIGKLHCFREGNTRPRVMRFVRRAFSGTGISPQEYMSRVTERIDFLKQKVYAWANRIRRYKRRVDRYSQNRMFQSDERWVYRAWERPEQNMMDVCRPDDATTSSFWSSIWSVPVCHTEADWMRDVERMCEPIPEMEPILITPQDIARAVRPLPNWKSPGPDGLHNFWLKWLSSSHTCLASQFQSSLESGSLPQFLTTGVTHLLHKSGSPVEPKNYRPITCLSTVYKLLTSILRAKINTHIDKNSIMSASQNGCRNGSRGTKELLLIDMAISQQVRRSRKDLSTCWIDYKKAYDSVPHTWLMRVLELYKVDATLRAFLESCMGQWRTVLRYPGCRQIQGNNEPVWIKRGIFQGDSLSPLWFCLALNPLSTLLEDSGLGYRLRRGGQVISHLLYMDDLKLFAPNKLRLMELLKVTETFSSAIRMEFGVDKCAVMYVKRGEIMESEGIQLSDSIHLRSLSSSESYKYLGMSEALGINVTDMKQSLRERFFGRLKKVLNSLLSGGNKVRAFNGWVMPVLMYSFGILKWTQTELDALDRRVRTLLTANRMHHPRSSVMRLYIPRKCGGRGFLNAKTLHNREVCSLREYFLKAEVGMHRDVVAVDKGFTPLSMAKENWRKPVVLTTDDRKEVWQGKELHGRFYRALHGPDVDFLASVSWLRFGDLFGETEGFVCAIMDEVMLTNNYRKYIMKDGTVDVCRACHRPGESIRHIISGCSRLANGEYLHRHNQVARIIHQQLALKYKLVESEVPYYKYVPDPVLEKDHVTLYWDRSIITDRTIVANKPDIVVIDRSARRVMIVDVTIPHDENLVKAEKEKQIKYLDLAHEVVDMWNVNSAVIVPIVVTANGLMAKSFDDHLSKLSLGGWIKGLIQKAVLLDTARIVRRFLSLEP

SEQ ID NO: 29547 - protein, 1101 aa, Hecatera dysodea
MRTSCAHITGLQRTNLTAYRARMLSMFQDLEPTVDVSAQRLSDQVRVIQRNHRLDDAALDRLRSEVLDNPIISTSTQTVVPVPSSGAITSRTINVCDEVDDRIVTVSSQCNDRLRSALEDALREYRSTPTELRPRLPRLPMHKRNRALVCALDSLLQNIFESSENLVDTHSILYCGAVAACRVANVKFTNSDGATRPKTAAPAWQCRIERRIDEARVLIGKLYCFRVGNTRPRVMRFVRRAFSGTEISPQEYISRVTERIDFLKQKVCAWANRIRRYKRRVDRYSQNRIFQSDERWVYRSWERPEQSVTDVCLPDDIVTSTFWRSIWSVPVRHTEGDWMRGIERVCEAIPQMEKITITPTDVATAVRPLPNWKSPGPDGLHNFWLKWYSSSHAVLASQFQSSLESGSLPQFLTTGVTHLLHKTGSPAEPKNYRPITCLSTVYKLLTSILRVKINEHIESNSIMSSSQNGCRKGSRGTKELLLIDMAISQQVRRTRKDLSTCWIDYKKAYDSVPHTWLMKVLELYKIDATLRTFLESCMRQWKTVLCYPGCQPIQGNDEPVWIKRGIFQGDSLSPLWFCLALNPLSTLLEDSGLGYRLRRGGQAISHLLYMDDLKLFAHNKLRLMELLKITETFSSAIRMEFGVDKCAVMHVKKGEIMESEGVQLSDSIQVRSLSSTETYKDLGMSEALGINVADMKQSLKERFFGRLKKVLNSLLSGGNKVRAFNGWVMPVLMYSFGILKWTQTELDALDRRVRTLLTANRMHHPRSSVMRLYIPRKCGGRGFLNAKTLHNREMCSIREYFLKVDVGMHRDVVAVDKGLTPLSMANENWRKPVIHTTDDRKEVWKGKELHGRFYRALYGSDVDFSASVAWLRFGDLFGETEGFVCAIMDEVILTNNYRRHIMKDGTVDVCRACHRPGESIRHIISGCSRLANGEYLHRHNQVARIIHQQLALKYKLVDSEVPYYKYVPDPVLENGRVTLYWDRSIITDRTIVANKPDIVVIDRLARRTMIIDVTIPHDENLVKAEKEKQIKYLDLAHEVVDMWDVDSAVIVPIVITANGLMAKSFDDHLSKLALHGWLKGLIQKAVLLDTARIVRFLSLEP

SEQ ID NO: 29548 - protein, 1199 aa, Hecatera dysodea
MLTRAATLRARHPPPGSPLSSASPPPDIESQVSPAVAVASSSSDEYFSPPTSPPPVRRQGRGRPPRGLGPRGQPAPSRVPATGGCVQRMRWTQSMNENVMRAYYGSTEGGTNLTAYRVRMLSLFQDLEPAVNVSAQRLSDQVRVIQRSHRLDDAALERLRSEVLNNLIISTQTQTAVQVPASGASIPRANNDSDEVDERVVTVSSQCNDRLRSALEDALREYRSTPAELRQRLPRLPMHKKNRALVCALDSLLQNTFLSSENLVDTHSILYCGAVAACRLANVKFPSCDEAIRPKPAAPAWQCRIERRIDEARALIGKLYCFREGNTRPRVMRFVRRAFAGTGISPHEYTSRITERIDFLKQKVCAWANRIRRYKRRVDRYSQNRMFQSDERWVYRNWERPEQSVTDVYRPDDIATSTFWRSIWSVPVRHTEGDWMRGVERVCEAIPQMEKIIITSADVATAVRPLPNWKSPGPDGLHNFWLKWYSSSHALLASQFQSSLESGSLPQFLTTGVTHLLHKTGSPAEPKNYRPITCLSTVYKLLTSILRVKINKHIESNSIMSSSQNGCRKGSRGTKELLLIDMAISQQVRRSRKDLSTCWIDYKKAYDSVPHTWLMKVLELYKIDTTLRTFLESCMRQWKTVLRYPGCRPIQGSDEPVWIKRGIFQGDSLSPLWFCLALNPLSTLLEDSGLGYRLKRGGQAISHLLYMDDLKLFAHNKLRLMELLKVTETFSSAIRMEFGVDKCAVMHVKKGEIVESEGVQLSDSIQVRSLSSTETYKYLGMSEALGINGADMKQSLKERFFGRLKKVLNSLLSGGNKVRAFNGWVMPVLMYSFGILKWTQTELDALDRRVRTLLTANRMHHPRSSVMRLYIPRKCGGRGFLNAKTLHNREMCSLREYFLKADVGMHRDVVAVDKGLTPLSMAKENWRKPVILTTDDRKEVWRGKELHGRFYRALHGSDVDFSASVAWLRFGDLFGETEGFVCAIMDEVILTNNYRRHIMKDGTVDVCRACHCPGESIRHIISGCSRLANGEYLHRHNQVARIIHQQLALKYKLVDSEVPYYKYVPDPVLENDHVTLYWDRSIITDRTIVANKPDIVVIDRLARRTMIIDVTIPHDENLVKAEKEKHIKYLDLAHEVVDMWNVDSAVIVPIVVTANGLMAKSFDDHLSKLALHGWLKGLIQKAVLLDTARIVRRFLSLEP

SEQ ID NO: 29549 - protein, 895 aa, Mythimna impura
MVFNNNNNNNNKLYCFREGNTRPRVMRYVRRAFSGTEISPREYLSRVTERIDFLKQKVCAWANRIRRYKRRVDRYSQNRMFQSDERWVYRAWERPEQNVTDVTRPDAVATNTFWRNIWSVPVCHTEDGWMREVERVCEAIPEMEKIVISPIDVARAVRPLPNWKSPGPDGLQNFWLKWYSSSHALLASQFQSSLESGSLPQFLTTGVTHLLHKTGSTAEPKNYRPITCLSTVYKLLTSILRTKINKHIDSNSIMSASQNGCRNGSRGTKELLLIDMAISQQVRRSRKDLSTCWIDYKKAYDSVPHTWLMRVLELYKIDATLRTFLESCMGQWNTVLRYPGCRSIRRDDEPIWIKRGIFQGDSLSPLWFCLALNPLSTLLEESGLGYRLRRGGQVLSHLLYMDDLKLIAPNKLRLMELLKVTETFSSAIRMEFGVDKCAVMHVKRGEIMESEGIQLSDSIHFRSLSSTETYKYLGMSEALGINVADMKQSLKERFFGRLKKVLNSLLSGGNKVRAFNGWVMPVLMYSFGILKWTQTELDAVDRRVRTLLTANRMHHPRSSVMRLYIPRKCGGRGFLNAKTLHNREVCSLREYFHKTDVGMHRDVVAVDKGLTPLSMAKENWRKPVVLTTDDRKEVWKSKELHGRFYRALHESDIDFAASLAWLRFSNLFGETEGFICAIMDEIILTNNYRRYIMKDGTVDVCRACHRPGESIRHIISGCSRLANGEYLHRHNQVARIIHQQLALKYNLVDYEVPYYRYVPDPVLENDHVTLYWDRSIITDRTIVANKPDIVVIDRLARRVMIVDVTIPHDENLVKAEKEKQIKYLDLAHEVVDMWNVDSAVIVPIVVTANGLIAKSFDDHLSKLSLRGWIKGLIQKAVLLDTARRGGSCLWSPNHR

SEQ ID NO: 29550 - protein, 1200 aa, Mythimna impura
MLTRAAARRARHRPPGSPLSSASPPPDLESPVSPAAAVASSSSDEYFSPPTSPTPVRRPGRGRPPRSLGSRGQPAPSRVPAAGGCVQRMRWTQSMNENVMRAYYGSTEGGTNLTAYRVRMLSLFQVLEPTVNVTTQRLSDQVRVIQRNHRLDNAALDRLRSEVLSNRIISTPIQTQTAAPRATDGILPQSNHVDDEADDRVVTVSSQCNDRLRSALEDALREYRSTPIDLRPRLPRLPMHKKNRALVCALDSLLENVFESSVNLADTHSILYCGAIAACRLANVKLPSCDGATRPKSVAPAWQCRIEKRIDGARALIGKLYCFREGNTRPRVMRYVRRAFSGTGISPPEYLSRVTERIDFLKQKVCAWANRIRRYKRRVDRYSQNRMFQSDERWVYRAWERPEQNVTDVTRPDAVATNAFWRNIWSVPVCHTEDGWMREVERVCEAIPEMEKVIISPTDVARAVRPLPNWKSPGPDGLQNFWLKWYSSSHALLASQFQSSLESGSLPQFLTTGVTHLLHKTGSTAEPKNYRPITCLSTVYKLLTSILRTKINQHIDNNSIMSASQNGCRNGSRGTKELLLIDMTISQQVRRSRKDLSTCWIDYKKAYDSVPHTWLMRVLELYKIDATLRTFLESCMGQWNTVLRYPGCRSIRRDDEPIWIKRGIFQGDSLSPLWFCLALNPLSTLLEESGLGYRLRRDGQVLSHLLYMDDLKLIAPNKLRLMELLKVTETFSSAIRMEFGVDKCAVMHVKRGEIMESEGIQLSDSIHLRSLSSTETYKYLGMSEALGINVADMKQSLKERFFGRLKKVLNSLLSGGNKVRAFNGWVMPVLMYSFGILKWTQTELDALDRRVRTLLTANRMHHPRSSVMRLYIPRKCGGRGFLNTKTLHNREVCSLREYFHKTDVGMHRDVVAVDKGLTPLSMAKENWRKPVVLTTDDRKEVWKSKELHGRFYRALHESDVDFVASVAWLRFSNLFGETEGFICAIMDEVILTNNYRRYIMKDGTVDVCRACHRPGESIRHIISGCSRLANGEYLHRHNQVARIIHQQLALKYNLVYSEVPYYRYVPDPVLENDHVTLYWDRSIITDRTIVANKPDIVVIDRLARRAMIVDVTIPHDENLVKAEKEKQIKYLDLAHEVVDMWNVDSAVIVPIVVTANGLIAKSFDDHLSKLSLRGWIKGLIQKAVLLDTARIVRRFLSLEP

SEQ ID NO: 29551 - protein, 1199 aa, Phlogophora meticulosa
MLTRAAKRRARPPSPDSPLSSASPPPDLGSPVTPTVAAASSSSDEYFSPPTSPTPVRRQGRGWPPKSLGSRGQPAPSQVPATGGCVQRMRWTQSMNENVMRAYYGSTEGGTNLTAYRARMLSLFQVLEPTVNVSAQRLSDQVRVIQRNHRLDDTALDRLRSEVLNNHIVLTSTQTAVQAPIINATPSPSNHVSEEADDRVVTVSSQCNEKLRSALEDALREYRSTPTELRPRLPRLPMHKKNRALVCNLDSLLKDLFESSGDLVDTHSILYCAAVAACRLANVKFPNNDVAIRPKTAVPAWQSRIERRIDGARVLIGKLYCFREGNTRPRVMRFVRRAFAGTGISPREYMSRIVERIDFLKQKVCAWANRIRRYKRRVDRYSQNRMFQSDERWVYRAWERPEQDVADVHRPDDTTTNTFWRNIWSVPVCHTEAHWMRDVERVCETITEMEKIIITPLDVATAVRPLPNWKAPGPDGLHNFWLKWLGSSHTRLASQFQSCLESGSLPQFLTTGITHLLYKSGSTTEPKNYRPITCLSTVYKLLTSILRAKIAEHIVGNSIMSASQNGCRNGSRGTKELLLIDMAISQQVRRSHKDLSTCWIDYKKAYDSVPHAWLMRVLELYKIDATLRTFLESCMGQWRTVLRYPGCRQIQGNDEPIWIKRGIFQGDSLSPLWFCLALNPLSTLLEDSGLGYRLRRGGQVISHLLYMDDLKLFAPNNLQLMELLKITESFSSTIRMEFGVDKCAVMHVKRGEIVESEGIQLSDSIQLRSLSSSENYKYLGMSEALGINVTDMKQSLKECFFGRLKKVLNSLLSGGNKVRAFNGWVMPVLMYSFGILKWTQTELDALDRRVRTLLTANRMHHPRSSVMRLYIPRKCGGRGFLNAKTLCNREVCNLRDYFLKTEVGMHRDVVAVDKGLTPLSMAKENWRKPVVLTTDDRKQVWQSKELHGRFYRALHGPDVDFIASVSWLRFGDLFGETEGFVCAIMDEVILTNNYRKHIMKDGTVDMCRACHRPGESIRHIISGCSRLANGEYLHRHNQVARIIHQQLALRYKLVESEVPYYKYVPDPVLEDDHVTLYWDRSIITDRTIVANKPDIVVIDRLARRAMIVDVTIPHDENLVKAEKEKQIKYLDLAHEVVDMWNVDSAVIVPIVVTANGLLAKSLDDHLSRLSLHGWIKGLIQKAVLLDTARIVRRFLSLQP

SEQ ID NO: 29552 - protein, 1202 aa, Cosmia trapezina
MLTRSAARARPPPPDSSLSSASPPPVSSPTVGAVMTPAAAVASSSSDEYFSPPTSPTPVRRQGRGRPPRSLGLRGQPAPSRVPAAGGCVQRMRWTQSMNENVMRAYYGSTEGGTNLTAYRVRMLSLFQELEPTVNVSAQRISDQVRVIQRNHRLDDAALDRLRSEVLSNHIISNPTQTAVQPSIIDALPPRSNHVVEEVDDRVATVSSQYNDRLRDALEDAFCEYRSTPTELRPRLPRLPMHKKNRALMCALDSLLKDFFESSENLVDTHSILYCAAVAACRLANVKFPNCDGATRPKPAVPAWQCRIERRIDGARVLIGKLYCFRQGNTRPRVMRFVRRAFSGTGISPPEYMSRVTERIDFLKQKVCAWASRIRRYKRRVDRYTQNRMFQSDERWVYRAWERPEQNVTDVCRPDDAATSAFWRSIWSVPVCHAEAGWMKDVERVCEAIPEMEPVLITPLDVARAVRPLPNWKSPGPDGLHNFWLKWLISSHTRLASQFQSSLESGSLPQFLTTGVTHLLHKSGSPAEPKNYRPITCLSTIYKLLTSILRAKINMHIDSNSIMSTSQNGCRNGSRGTKELLLIDMAISQQVRRSRKDLSTCWIDYKKAYDSVSHAWLMRVLELYKIDATLRTFLESCMGQWRTVLRYPGCRRIQGNDEPVRIKRGIFQGDSLSPLWFCLALNPLSTLLEDSGLGYRLRRGGQVISHLLYMDDLKLFAPNKLRLMELLKVTETFSSAIRMEFGVDKCAVMHVKRGEIMESEGIQLSDSIHLRSLSSSETYKYLGMSEALGINVADMKQSLRERFFGRLTKVLISLLSGGNKVRAFNGWVMPVLMYSFGILKWTQTELDALDRRVRTLLTANRMHHPRSSVMRLYIPRKCGGRGFLNAKTLHNREVCSLREYFLKSDVGMHRDVVAVDKGLTPLSMAKENWRKPVVLTTDDRKKVWQSKELHGRFYRALHEPDVDFLASVSWLRFGDLFGETEGFVCAIMDEVILTNNYRRYIMKDGTVDVCRACHRPGESIRHIISGCSRLANGEYLHRHNQVARIIHQQLALKYKLVDSEVPYYKYVPDPVLENDHVTLYWDRSIITDRTIVANKPDIVVMDRLARRAMIVDVTIPHDGNLVKAEKEKQIKYLDLAHEVVDMWNVDSAVIVPIVVTANGLIADSLDQHLSRLSLGGWIKGQIQKAVLLDTARIVRRFLSLQP

SEQ ID NO: 29553 - protein, 1199 aa, Mamestra brassicae
MITRAAARRAHPPPPGSSLSSASPTPDIGSQVSPVVAVASSSSDEYFSPPTSPTPVRRQGRGRPPRSLGSRGQPALSRVPAAGGCVQRMRWTQSMNENVMRAYYGSTEGGTNLTAYRVRMLSLFQDLEPTVNVSAQRLSDQVRVIQHNCRLDDAALERLRSEVLSNLIISTPTQTVVQAPASGAITPRPNNGSDEVDDRVVTVSSQCNDRLRSALEDALREYRLTPTELRPRLPRLPMHKKNRALVCALDSLLQNIFESSESLVDTHSILFCGAVAACRIANVKFPSCDEAIRPKPAAPAWQCRIERRIDEARALIGKLYCFREGNTRPRVMRFVRRAFSGTGISPREYTFRVTERIDFLKQKVCAWANRIRLYKRRVDRYSQNRMFQSDERLVYRAWERPEQSVTDVYRPDDVATSTFWRSIWSVPICHAEGGWMRDVERVCEAIPQMEKITITTLDIAKAVRPLPNWKSPGPDGLHNFWLKWYSSSHALLASQFQSSLESGSLPQFLTTGITHLLHKTGSPAEPKNYRPITCLSTVYKLLTSILRAKINEHIESNSIMSASQNGCRKGSRGTKELLLIDMAISQQVRRSRKDLSTCWIDYKKAYDSVPHTWLMKVLELYKIDATLRTFLESCMRQWKTVLRYPGCQPIQGSDEPVWIKRGIFQGDSLSPLWFCLALNPLSTLLEDSGLGYRLRRGGQAISHLLYMDDLKLFAPNNLRLMELLKVTETFSSAIRMEFGVDKCAVMHVKKWEIMESEGIQLSDSIQVRSLSSTESYKYLGMSEALGINGTDMKQSLRERFFGRLKKVLNSLLSGGNKVRAFNGWVMPVLMYTFGILKWTQTELDALDRRVRTLLTANRMHHPRSSVMRLYIPRKCGGRGFLNAKTLHNREMCSLREYFLKADVGMHRDVVAVDKGLTPLSMAKENWRKPVILTTDDRKEVWKGKELHGRFYRALYGSDVDFSASVAWLRFGDLFGETEGFVCAIMDEVILTNNYRKHIMKDGTVDVCRACHRPGESIRHIISGCSRLANGEYLHRHNQVARIIHQQLALKYKLVDSEVPYYKYVPDPVLENDHVTLYWDRSIITDRTIVTNKPDIVVIDRLARRTMIIDVTIPHDENLVKAEKEKQIKYLDLAHEVVDMWNVDSAVIVPIVITANGLMAKSFDDHLSKLALRGWIKGLIQKAVLLDTARIVRRFLSLEP

SEQ ID NO: 29554 - protein, 1199 aa, Mamestra brassicae
MITRAAARRAHPPPPGSSLSSASPTPDIGSQVSPVVAVASSSSDEYFSPPTSPTPVRRQGRGRPPRSLGSRGQPAPSRVPAAGGCVQRMRWTQSMNENVMRAYYGSTEGGTNLTAYRVRMLSLFQDLEPTVNVSAQRLSDQVRVIQHNCRLDDAALERLRSEVLSNLIISTPTQTVVQAPASGAITPRPNNGSDEVDDRVVTVSSQCNDRLRSALEDALREYRLTPTELRPRLPRLPMHKKNRALVCALDSLLQNIFESSESLVDTHSILFCGAVAACRIANVKFPSCDEAIRPKPAAPAWQCRIERRIDEARALIGKLYCFREGNTRPRVMRFVRRAFSGTGISPREYTFRVTERIDFLKQKVCAWANRIRRYKRRVDRYSQNRMFQSDERWVYRAWERPEQSVTDVYRPDDVATSTFWRSIWSVPICHAEGGWMRDVERVCEAIPQMEKITITTLDVAKAVRPLPNWKSLGPDGLHNFWLKWYSSSHALLASQFQSSLESGSLPQFLTTGITHLLHKTGSPAEPKNYRPITCLSTVYKLLTSILRAKINEHIESNSIMSASQNGCRKGSRGTKELLLIDMAISQQVRRSRKDLSTCWIDYKKAYDSVPHTWLMKVLELYKIDATLRTFLESCMRQWKTVLRYPGCQPIQGSDEPVWIKRGIFQGDSLSPLWFCLALNPLSTLLEDSGLGYRLRRGGQAISHLLYMDDLKLFAPNNLRLMELLKVTETFSSAIRMEFGVDKCAVMHVKKGEIMESEGIQLSDSIQVRSLSSTESYKYLGMSQALGINGTDMKQSLRERFFGRLKKVLNSLLSGGNKVRAFNGWVMPVLMYTFGILKWTQTELDALDRRVRTLLTANRMHHPRSSVMRLYIPRKCGGRGFLNAKTLHNREMCSLREYFLKADVGMHQDVVAVDKGLTPLSMAKENWRKPVILTTDDRKEVWKGKELHGRFYRALYGSDVDFSASVAWLRFGDLFGETEGFVCAIMDEVILTNNYRKHIMKDGTVDVCRACHRPGESIRHIISGCSRLANGEYLHRHNQVARIIHQQLALKYKLVDSEVPYYKYVPDPVLENDHVTLYWDRSIITDRTIVANKPDIVVIDRLARRTMIIDVTIPHDENLVKAEKEKQIKYLDLAHEVVDMWNVESAVIVPIVVTANGLMAKSFDDHLSKLALRSWVKGLIQKAVLLDTACIVRRFLSLEP

SEQ ID NO: 29555 - protein, 1202 aa, Noctua fimbriata
MITRAASRRARLPPPDQSLSSASPPPESNPIVSAVTPAVAVASSSSDEYFSPPTSPTPVRRQGRGRPPRSLGLRGHPAPSRVPAAGGCVQRMRWTHSINENVMRAYYGSTEGGTNLTAYRVGMLSLFQVLEPTINVSAQRLSDQVRVIQRNHMLDDAVLDRLRSEVLSNRIVFTPAQTAAQASVIDATPPRFNPAVVEEDDRVAVVSSQCNDRLRSALEDALREYRSTPTELRPRLPRLPMHNKNRALVCALDSQLKNLFESSENLVDTHSILYCGAVAACRLANVKFPNCDVATRPKPAVPAWQRRIECRIDGARVLIGKLHCFREGNTRPRVMRFVRRAFSGTGISPQEYMSRVTERIEFLKQKVYAWANRIRRYKRRVDRYSQNRMFQSDERWVYRAWERPDQNMTDLCRPDDAATSSFWRSIWSVPVCHTEADWMRDVEQVCEPIPEMEPILITPLDVARAVRPLPNWKSPGPDGLHNFWLKWLSSSHTCLASQFQSSLESGSLPQFLTTGVTHLLHKSGSPAEPKNYRPITCLSTVYKLLTSILRAKINTHIDKNSIMSASQNGCRNGSRATKELLLIDMAISQQVRRSRKDLSTCWIDYKKAYDSVPHTWLMRVLELYKIDATLRAFLESCMGQWRTVLRYPGCRQIQGNDEPVWIKRGIFQGDSLSPLWFCLALNPLSTLLEDSGLGYRLRRGGQVISHLLYMDDLKLFAPNKLQLMELLRVTETFSSAIRMEFGVDKCAVMYVKQGEIMESEGIQLSDSIHLRTLSSTESYKYLGMSEALGINVIDMKQSLKERFFGRLNKVLHSLLSGGNKVRAFNGWVMPVLMYSFGVLKWTQTELDALDRRVRTLLTANRMHHPRSSVMRLYIPRKCGGRGFLNAKSLHNREMCSLREYFLKVEVGMHRDVVAVDKGLTPLSMAKENWRKPEVLTTDDRKEVWQGKELHGRFYRALHGPDVDFLASVSWLRFGDLFGETEGFVCAIMDEVMLTNNYRKYIMKDGTVDVCRACHRPGESIRHIISGCSRLANGEYLHRHNQVARIIHQQLALKYKLVESEVPYYKYVPDPVLEKDHVTLYWDQSIITDRTIVANKPDIVVIDRSARRVMIVDVTIPHDENLVKAEKEKQIKYLDLAHEVVDMWNVNSAIIVPIVVTANGLIAKSLDDHLSKLSLGGWIKGLIQKAVLLDTARIVRRFLSLEP

SEQ ID NO: 29556 - protein, 1050 aa, Noctua fimbriata
MLDDAVLDRLRSEVLSNRIVFTPAQTAVQASVIDATPPRFNPAVVEEDDRVAVVSSQCNDRLRSALEDALREYRSTPTKLRPRLPRLPMHNKNRALVCALDSQLKNLFESSENLVNTHSILYCGAVAACRLANVKFPNCDVATRPKPAVPAWQRRIECRIDGARVLIGKLHSFREGNTRPRVMRFVRRAFSGTGISPQEYMSRVTERIDFLKQKVYAWANRIRRYKRRVDRYSQNRMFQSDERWVYRAWERPDQNMTDVCRPDDAATSSFWRSIWSVPVCHTAADWMRDVEQVCEPIPEMEPILITPLDVARAVRPLPNWKSPGPDGLHNFWLKWLSSSHTCLASQFQSSLESGSLPQFLTTGVTHLLHKSGSPAEPKNYRPITYLSTVYKLLTSILRAKINTHIDKNSIMSASQNGCRNGSRGTKELLLIDMAISQQVRRSRKDLSTCWIDYKKAYDSVPHTWLMRVLELYKIDATLRAFLESCMGQWRTVLRYPGCRQIQGNDAPVWIKRGIFQGDSLSPLWFCLALNPLSTLLDDSGLGYRLRRGGQVISHLLYMDDLKLFAPNKLRLMELLKVTETFSSAIRMEFGVDKCAVMYVKQGEIMESEGIQLSDSIHLRTLSSTESYKYLGMSEALGINVTDMKQSLKERFFGRLNKVLHSLLSGGNKVRAFNGWVMPVLMYSFGVLKWTQTELDALDRRVRTLLTANRMHHPRSSVMRLYIPRKCGGRGFLNAKSLHNREMCSLREYFLKVEVGMHRDVVAVDKGLTPLSMAKENWRKPEVLTTDDRKEVWQGKELHGRFYRALHGPDVDFLASVSWLRFGDLFGETEGFVCAIMDEVMLTNNYRKYIMKDGTVDVCRACHRPGESIRHIISGCSRLANGEYLHRHNQVARIIHQQLALKYKLVESEVPYYKYVPDPVLEKDHVTLYWDQSIITDRTIVANKPDIVVIDRSACRVMIVDVTIPHDENLVKAEKEKQIKYLDLAHEVVDMWNVNSAIIVPIVVTANGLIAKSLDDHLSKLSLGGWIKGLIQKAVLLDTARIVRRFLSLEP

SEQ ID NO: 29557 - protein, 1202 aa, Noctua fimbriata
MITRAASRRARLPPPDQSLSSASPPPESSPIVSAVTPAVAVASSSSDEYFSPPTSPTPVRRQGRGRPPRSLGLRGHPAPSRVPAAGGCVQRMRWTHSINENVMRAYYGSTEGGTNLTAYRVGMLSLFQVLEPTINVSAQRLSDQVWVIQRNHMLDDAVLDRLRSEVLSNRIVFTPAQTAVQASVIDATPPRFNPAVVEEDDRVAVVSSQCNDRLRSALEDALREYRSTPTELRPRLPRLPMHNKNRALVCALDSQLKNLFESSENLVDTHSILYCGAVAACRLANVKFPNCDVATRPKPAVPAWQRRIECRIDGARVLIGKLHCFREGNTRPRVMRFVRRAFSGTGISPQEYMSRVTERIDFLKQKVYAWANRIRRYKRRVDRYSQNRMFQSDERWVYRAWERPDQNMTDMCRPDDAATSSFWRSIWSVPVCHTEADWMRDVEQVCEPIPEMEPILITPLDVARAVRPLPNWKSPGPDGLHNFWLKWLSSSHTCLASQFQSSLESGSLPQFLTTGVTHLLHKSGSPAEPKNYRPITCLSTVYKLLTSILRAKINTHIDKNSIMSASQNGCRNGSRATKELLLIDMAISQQVRRSRKDLSTCWIDYKKAYDSVPHTWLMRVLELYKIDATLRAFLESCMGQWRTVLRYPGCRQIQGNDEPVWIKRGIFQGDSLSPLWFCLALNPLSTLLEDSGLGYRLRRGGQVISHLLYMDDLKLFAPNKLQLMELLKVTETFSSAIRMEFGVDKCAVMYVKQGEIMKSEGIQLSDSIHLRTLSSTESYKYLGMSEALGINVTDMKQSLKERFFGRLNKVLHSLLSGGNKVRAFNGWVMPVLMYSFGVLKWTQTELDALDRRVRTLLTANRMHHPRSSVMRLYIPRKCGGRGFLNAKSLHNREMCSLREYFLKVEVGMHRDVVAVDKGLTPLSMAKENWRKPEVLTTDDRKEVWQGKELHGRFYRALHGPDVDFLASVSWLRFGDLFGETEGFVCAIMDEVMLTNNYRKYIMKDGTVDVCRACHRPGESIRHIISGCSRLANGEYLHRHNQVARIIHQQLALKYKLVESEVPYYKYVPDPVLEKDHVTLYWDQSIITDRTIVANKPDIVVIDRSARRVMIVDVTIPHDENLVKAEKEKQIKYLDLAHEVVDMWNVNSAIIVPIVVTANGLIAKSLDDHLSRLSLGGWIKGLIQKAVLLDTARIVRRFLSLEP

SEQ ID NO: 29558 - protein, 1202 aa, Noctua fimbriata
MITRAAYRRARLPPPDPSLSSASPPPESSPIVSAVTPAVAVASSSSDEYFSPPTSPTPVRRQGRGRPPRSLGLRGHPAPSRVPAAGGCVQRMRWTHSINENVMRAYYGSTEGGTNLTAYRVGMLSLFQVLEPTVNVSAQRLSDQVRVIQRNHMLDDAVLDRLRSEVLSNRIVLTPAQTAVQASVIDATPPRFNPAVVEEDDRVAVVSSQCNDRLRSALEDALREYRSTPTELRPRLPRLPMHNKNRALVCALDSQLENIFESSENLVDTHSILYCGAVAACRLANVKFSNCDVATRPKPAVPAWQRRIERRIDGARVLIGKLHCFREGNTRPRVMRFVRRAFSGTGISPQEYMSRVTERIDFLKQKVYAWANRIRRYKRRVDRYSQNRMFQSDERWVYRAWERPELNMTDVCRPDDAATSSFWRSIWSVPVCHTEADWMRDVERVCEPIPEMEPILITPLDIARAVRPLPNWKSPGPDGLHNFWLKWLSSSHTCLASQFQSSLESGSLPQFLTTGVTHLLHKSGSPAEPKNYRPITCLSTVYKLLTSILRAKINTHIDKNSIMSASQNGCRNGSRGTKELLLIDMAISQQVRRSRKDLSTCWIDYKKAYDSVPHTWLMRVLELYKIDATLRAFLESCMGQWRTVLRYPGCRQIQGNDEPVWIKRGIFHGDSLSPLWFCLALNPLSTLLEDSGLGYRLRRGGQVISHLLYMDDLKLFAPNKLQLMELLKVTETFSSAIRMEFGVDKCAVMYVKRGEIMESEGIQLSDFIHLRSLSSSESYKYLGMSEALGINVTDMKQSLKERFFGHLNKVLHSLLSGGNKVRAFNGWVMPVLMYSFGVLKWTQTELDALDRRVRTLLTANRMHHPRSSVMRLYIPRKCGGRGFLNAKCLHNREMCSLREYFLKVEVGMHRDVVAVDKGLTPLSMAKENWRKPEVLTTDDRKEVWQGKELHGRFYRALHGPDVDFLASVSWLRFGDLFGETEGFVCAIMDEVMLTNNYRKYIMKDGTVDVCRACHRPGESIRHIISGCSRLANGEYLHRHNQVARIIHQQLALKYKLVESEVPYYKYVPDPVLEKNHVTLYWDQSIITDRTIVANKPDIVVIDRSARRVMIVDVTIPHDENLVKAEKEKQIKYLDLAHEVVDMWNVNSAIIVPIVVTANGLIAKSLDDHLSKLSLGGWIKGLIQKAVLLDTARIVRRFLSLEP

SEQ ID NO: 29559 - protein, 962 aa, Noctua fimbriata
MHNKNRALVCALDSQLKNIIESSENLVDTHSILYCGAVAACRLANVKFPNCDVATRPKPAVPAWQCRIERRIDGARVLIGKLHCFREGNTRPRVMRFVRRAFSGTGISPQEYMSRVTERIDFLKQKVYAWANRIRRYKRRVDRYSQNRMFQSDERWVYRAWERPELNMTDVCRPDDAATSSFWRSIWSVPICHTEADWMRDVERVCEPIPEMEPILITPLDIARAVRPLPNWKSPGPDGLHNFWLKWLSSSHTCLASQFQSSLESGSLPQFLTTGVTHLLHKSGSPAEPKNYRPITCLSTVYKLLTSILRAKINTHIDKNSIMSASQNGCRNGSRGTKELLLIDMAISQQVRRSRKDLSTCWIDYKKAYDSVPHTWLMRVLELYKIDATLRAFLESCMGQWRTVLRYPGCRQIQGNDEPVWIKRGIFQGDSLSPLWFCLALNPLSTLLEDSGLGYRLRRGGQVISHLLYMDDLKLFAPNKLQLMKLLKVTENFSSAIRMEFGVDKCAVMYVKHGEIMESEGIQLSDSIHLRTLSSTESYKYLGMSEALGINVTDMKQSLKERFFGRLNKVLHSLLSGGNKVRAFNGWVMPVLMYSFGVLKWTQTELDALDRRVRTLLTANRMHHPRSSVMRLYIPRKCGGRGFLNAKSLHNREMCSLREYFLKVELGMHRDVVAVDKGLTPLSMAKENWRKPEVLTTDDRKEVWQGKELHGRFYRALHGPDVDFLASVSWLRFGDLFGETEGFVCAIMDEVMLTKNYRKYIMKDGTVDVCRACHRPGESIRHIISGCSRLANGEYLHRHNQVARIIYQQLALKYKLVESEVPYYKYVPDPVLEKDHVTLYWDQSIITDRTIVANKPDIVVIDRSARRVMIVDVTIPHDENLVKAEKEKQIKYLDLAHEVVDMWNVNSAIIVPIVVTANGLIAKSLDDHLSKLSLGGWIKGLIQKAVLLDTARIVRRFLSLEP

SEQ ID NO: 29560 - protein, 950 aa, Noctua fimbriata
MRFVNIDPLLPNLGPDYHGYPCIIKIGRWCVPWTRNSRIYSRVARTSLIHTRSCGAVAACRLANVKFPNCDVATRPKPAVPAWQRRIERRIDGARVLIGKLHCFREGNTRPRVMRFVRRAFSGTGISPQEYMSRVTERIDFLKQKVYAWANRIRRNKRRVDRYSQNRMFQSDERWVYRAWERPELNMTDVCRPDDAATSSFWRSIWSVPVCHTEADWMRDVERVCEPIPEMEPILITPLDIARAVRPLPNWKSPGPDGLHNFWLKWLSSSHTCLASQFQSSLETGSLPQFLTTGVTHLLHKSGSPAEPKNYRPITCLSTVYKLLTSILRAKINTHIDKNSIMSASQNGCRNGSRGTKELLLIDMAISQQVRRSRKDLSTCWIDYKKAYDSVPHTWLMRVLELYEIDATLRAFLESCMGQWRTVLRYPGCRQIQGNDEPVWIKRGILQGDSLSPLWFCLALNPLSTLLEDSGLGYRLRRGGQVISHLLYMDDLKLFAPNKLQLMELLKVTETFSSAIRMEFGVDKCAVMYVKRGEIMESEGIQLSDSIHLRSLSSSESYKYLGMSEALGINVTDMKQSLKERFFGRLNKVLHSLLSGGNKVRAFNGWVMPVLMYSFGVLKWTQTELDALDRRVRTLLTANRMHHPRSSVMRLYIPRKCGGRGFLNAKSLHNREMCSLREYFLKVEVGMHRDVVAVDKGLTPLSMAKENWRKPEVLTTDDRKEVWQGKELHGRFYRALHGPDVDFLASVSWLRFGDLFGETEGFVCAIMDEVMLTNNYRKYIMKDGTVDVCRACHRPGESIRHIISGCSRLANGEYLHRHNQVARIIHQQLALKYKLVESEVPYYKYVPDPVLEKDHVTLYWDQSIITDRTIVANKPDIVVIDRSARRVMIVDVTIPHDENLVKAEKEKQIKYLDLAHEVVDMWHMNSAVIVPIVVTANGLIASMTIFRRSP

SEQ ID NO: 29561 - protein, 1202 aa, Noctua fimbriata
MLTRAAARRARLPPPDPSLSSASPPPESSHFVSAVTPAVAVASSSSDEYFSPPTSPTPVRRQGRGRPPRSLGLRGHPAPSRVPAAGGCVQRMRWTHSINENVMRAYYGSTEGGTNLTAYRVGMLSLFQVLEPTVNVSAQRLSDQVRVIQRNHMLDDAVLDRLRSEVLSNRIVLTPAQTAVQASVIDATPPRFNPAVVEEDDRVAVVSSQCNDRLRSALEDALREYRSTPTELRPRLPRLPMHNKNRALVCALDSQLENIFESSENLVDTHSILYCGAVAACRLANVKFPNCDVATRPKPVVPAWQRRIERRIDGARVLIGKLHCFREGNTRPRVMRFVRRAFSGTGSSPQEYMSRVTERIDFLKQKVYAWANRIRRYKRRVDRYSQNRMFQSDERWVYRAWERPELNMTDVCRPDDAATSSFWRSIWSVPVCHTEADWMRDVERVCEPIPEMEPILITPLDIARAVRPLPNWKSPGPDGLHNFWLKWLSSSHTCLASQFQSSLESGSLPQFLTTGVTHLLHKSGSPAEPKNYRPITCLSTVYKLLTSILRAKINTHIDKNSIMSASQNGCRNGSRGTKELLLIDMAISQQVRRSRKDLSTCWIDYKKAYDSVPHTWLMRVLELYKIDATLRAFLESCMGQWRTVLRYPGCRQIQGNDEPVWIKRGIFQGDSLSPLWFCLALNPLSTLLEDSGLGYRLRRGGQVISHLLYMDDLKLFAPNKLRLMELLKVTETFSSAIRMEFGVDKCAVMYVKQGEIMESEGIQLSDSIHLRSLSSTESYKYLGMSEALGINVTDMKQSLKERFFGRLNKVLHSLLSGGNKVRAFNGWVMPVLMYSFGVLKWTQTELDALDRRVRTLLTANRMHHPRSSVMRLYIPRKCGGRGFLNAKSLHNHEMCSLREYFLKVEVGMHRDVVAVDKGLTPLSMAKENWRKPEVLTTDDRKEVWQGKELHGRFYRALHGPDVDFLASVSWLRFGDLFGETEGFVCAIMDEVMLTNNYRKYIMKDGTVDVCRACHRPGESIRHIISGCSRLANGEYLHRHNQVARIIHQQLALKYKLVESEVPYYKYVPDPVLEKDHVTLYWDQSIITDRTIVANKPDIVVIDRSARRVMIVDVTIPHDENLVKAEKEKQIKYLDLAHEVVDMWNVNSAIIVPIVVTANGLIAKSLDDHLSRLSLGGWIKGLIQKAVLLDTARIVRRFLSLEP

SEQ ID NO: 29562 - protein, 1202 aa, Noctua fimbriata
MITRAAYRRARLPPPDPSLSSASPPPESSPIVSAVTPAVPVASSSSDEYFSPPTSPTPVRRQGRGWPPRSLGLRGHPAPSRVPAAGGCVQRMRWTHSINENVMRAYYGSTEGGTNLTAYRVRMLSLFQVLEPTVNVSAQRLSDQVRVIQRNHMLDDAVLDRLRSEVLSNRVILTPAQTAVQASVIDATPPRFNPAVVEEDDRVAVVSSQCNDRLRSALEDALREYRSTPTELRPRLPRLPMHNKNRALVCALDSQLKNIFESSENLVDTHSILYCGAVAACRLANVKFPNCDVATRPKPAVPAWQCRIERRIDEARVLIGKLHCFREGNTRPRVMRFVRRAFSGTGISPQEYMSRVTERIDFLKQKVYAWANRIRRYKRRVDRYSQNRMFQSDERWVYRAWERPELNMTDVCRPDDAATSSFWRSIWSVPVCHTEADWMRDVERVCEPIPEMEPILITPLDIARAVRPLPNWKSPGPDGLHNFWLKWLSSSHTCLASQFQSSLESGSLPQFLTTGVTHLLHKSGSPAEPKNYRPITCLSTVYKLLTSILRAKINTHIDKNSIMSASQNGCRNGSRGTKELLLIDMAISQQVRRSRKDLSTCWIDYKKAYDSVPHTWLMRVLELYKIDATLRAFLESCMGQWRTVLRYPGCRQIQGNDEPVWIKRGIFQGDSLSPLWFCLALNPLSTLLEDSGLGYRLRRGGQVISHLLYMDDLKLFAPNKLQLMELLKVTENFSSAIRMEFGVDKCAVMYVKQGEIMESEGIQLSDSIHLRTLSSTESYKYLGMSEALGINVTDMKQSLKERFFGRLNKVLHSLLSGGNKVRAFNGWVMPVLMYSFGVLKWTQTELDALDRRVRTLLTANRMHHPRSSVMRLYIPRKCGGRGFLNAKSLHNREMCSLREYFLKVEVGMHRDVVAVDKGLTPLSMAKENWRKPEVLTTDDRKEVWQGKELHGRFYRALHGPDVDFLASVSWLRFGDLFGETEGFVCAIMDEVMLTNNYRKYIMKDGTVDVCRACHRPGESIRHIISGCSRLANGEYLHRHNQVARIIHQQLALKYKLVESEVPYYKYVPDPVLEKDHVTLYWDQSIITDRTIVANKPDIVVIDRSARRVMIVDVTIPHDENLVKAEKEKQIKYLDLAHEVVDMWNVNSAIIVPIVVTANGLIAKSLDDHLSKLSLGGWIKGLIQKAVLLDTARIVRRFLSLEP

SEQ ID NO: 29563 - protein, 1202 aa, Atethmia centrago
MLTRSAARARPPPPDSSLSSASPPPVPSPTVSAVTTPAAVVASSSSDEYFSPPTSPTPVRRQGRGRPPKSLGLRGQLAPSRVPAAGGCVQRMRWTQSMNENVMRAYYGSTEGGTNLTAYRVRMLSLFQKLEPTVNVSAQRLSDQVRVIQRNHRLDDAALDRLRSEVLSNHIVSTPAQTATHAPIINAIPPRSNHDVEEEDDRVATVSSQCNVRLRSALEDAFREYRSTPTELRPRLPRLPMHKKNRALVCTLDSLLKDFFESSEDLVDTHSILYCAAVAACRLANVKFPNCDGATRPKPAVPAWQCRIERRIDGARVLIGKLYCFREGNTRPRVMRFVRRAFSGTGISPREYMSRVTERIDFLKQKVCAWASRIRRYKRRVDRYTQNRMFQSDERWVYRAWERPEQNETDVCRPDDATTTAFWRSIWSVPVCHAEADWMRDVERVCETIPEMDVVIITPSDIARAVRPLPNWKSPGPDGLHNFWLKWLTSSHTCLASQFQSSLESGSLPQFLTTGITHLLHKSGSPAEPKNYRPITCLSTVYKLLTSILRAKINTHIDSNSIMSASQNGCRNGSRGTKELLLIDMAISQQVRRFRKDLSTCWIDYKKACDSVPHTWLMRVLEFYKIDTTLRTFLESCMGQWRTVLRYPGCRQIQGNDEPVWIKRGIFQGDSLSPLWFCLALNPLSTLLEDSGLGYRLRRGGQVISHLLYMDDLKIFAPNKLQLMELLKVTETFSSAIRMEFGVDKCAVMHVKRGEIMESEGIQLSDSIHLRSLSSPESYKYLGMSEALGINVTDMKQSLKERFFGRLKKVLISPLSGGNKVRAFNGWVMPVLMYSFGILKWTQTELDALDRRVRTLLTANRMHHPRSSVMRLYIPRKCGGRGFLNAKTLHNREICSLREYFLKTEVGMHRDVVAVDKGLTPLSMAKENWCKPVILTTDDRKEIWQNKELHGRFYRALHEPDVDFLASVSWLRFGDLFGETEGFVCAIMDEVILTNNYRRHIMKDGTVDVCRACHRPGESIRHIISGCSRLANGEYLHRHNQVARIIHQQLALKYKLVNSEVPYYKYAPDPVLENDHVTLYWDRSIITDRTIVANKPDIVVIDRLARRAMIVDVTIPHDENLVKAEKEKQIKYLDLAHEVVDMCNVDSAVIVPIVVTANGLMAESLNHHLSRLSLDGWIKGLIQKAVLLDTARIVRRFLSLES

SEQ ID NO: 29564 - protein, 1202 aa, Atethmia centrago
MLTRSAARARPPPPDSSLSSASPPPVPSPTVSAVTTPAAVVASSSSDEYFSPPTSPTPVRWQGRGRPPKSLGLRGQLAPSRVPAAGGCVQRMRWTQSMNENVMRAYYGSTEGGTNLTAYRVRMLSLFQELEPTVNVSAQRLSDQVRVIQRNHRLDDAALDRLRSEVLSNHIVSTPAQTATHAPIINAIPPRSNHDVEEEDDRVATVSSQCNVRLRSALEDAFREYRSTPTELRPRLPRLPMHKKNRALVCALDSLLKDFFESSEDLVDTHSILYCAAVAACRLANVKFPNCDGATRPKPAVPAWQCRIERRIDEARVLIGKLYCFREGNTRTRVMRFVRRAFSGTGISPREYMSRVTERIDFLKQKVCAWASRIRRYKRRVDRCTQNRMFQSDQRWVYRSWERPEQNETDVCRPDDATTTAFWRSIWSVPVCHAEADWMRDVERVCETIPEMEVVIITPSDIARAVRPLPNWKSPGPDGLHNFWLKWLTSSHTCLASQFQSSLESGSLPQFLTTGITHLLHKSGSPAEPKNYRPITCLSTVYKLLTSILRAKINKHIDSNSIMSASQNGCRNGSRGTKELLLIDMAISQQVRRFRKDLSTCWIDYKKAYDSVPHTWLMRVLELYKIDTTLRTFLESCMGQWRTVLRYPGCRQIQGNDEPIWIKRGIFQGDSLSPLWFCLALNPLSTLLEDSGLGYRLRRGGQVISHLLYMDDLKIFAPNKLQLMELLKVTETFSSTIRMEFGVDKCAVMHVKRGEIMESEGIQLSDSIHLRSLSSPESYKYLGMSEALGINVTDMKQSLKERFFGRLKKVLISPLSGGNKVRAFNGWVMPVLMYSFGILKWTQTELEALDRRVRTLLTANRMHHPRSSVMRLYIPRKCGGRGFLNAKTLHNREICSLREYFLKTEVGMHRDVVAVDKGLTPLSMAKENWCKPVILTTDDRKEIWQNKELHGRFYRALYEPDVDFLASVSWLRFGDLFGETEGFVCAIMDEVILTNNYRRHIMKDGTVDVCRACHRPGESIRHIISGCSRLANGEYLHRHNQVARIIHQQLALKYKLVNSEVPYYKYAPDPVLENDHVTLYWDRSIITDRTIVANKPDIVVIDRLARRAMIVDVTIPHDENLVKAEKEKQIKYLDLAHEVVDMWNVDSAVIVPIVVTANGLMAESLNHHLSRLSLGGWIKGLIQKAVLLDTARIVRRFLSLES

SEQ ID NO: 29565 - protein, 1080 aa, Atethmia centrago
MLSLFQKLEPTVNVSAQRLSDQVRVIQRNHRLDDAALDRLRSEVLSNHIVSTPAQTATHAPIINAIPPRSNHDVEEEDDRVATVSSQCNVRLRSALEDAFREYRSTPTELRPRLPRLPMHKKNRALVCTLDSLLKDFFESSEDLVDTHSILYCAAVAACRLANVKFPNCDGATRPKPAVPAWQCRIERRIDGARVLIGKLYCFREGNTRPRVMRFVRRAFSGTGISPREYMSRVTERIDFLKQKVCAWASRIRRYKRRVDRYTQNRMFQSDERWVYRAWERPEQNETDVCRPDDATTTAFWRSIWSVPVCHAEADWMRDVERVCETIPEMDVVIITPSDIARAVRPLPNWKSPGPDGLHNFWLKWLTSSHTCLASQFQSSLESGSLPQFLTTGITHLLHKSGSPAEPKNYRPITCLSTVYKLLTSILRAKINTHIDSNSIMSASQNGCRNGSRGTKELLLIDMAISQQVRRFRKDLSTCWIDYKKAYDSVPHTWLMRVLEFYKIDTTLRTFLESCMGQWRTVLRYPGCRQIQGNDEPVWIKRGIFQGDSLSPLWFCLALNPLSTLLEDSGLGYRLRRGGQVISHLLYMDDLKIFAPNKLQLMELLKVTETFSSAIRMEFGVDKCAVMHVKRGEIMESEGIQLSDSIHLRSLSSPESYKYLGMSEALGINVTDMKQSLKERFFGRLKKVLISPLSGGNKVRAFNGWVMPVLMYSFGILKWTQTELDALDRRVRTLLTANRMHHPRSSVMRLYIPRKCGGRGFLNAKTLHNREICSLREYFLKTEVGMHRDVVAVDKGLTPLSMAKENWCKPVILTTDDRKEIWQNKELHGRFYRALHEPDVDFLASVSWLRFGDLFGETEGFVCAIMDEVILTNNYRRHIMKDGTVDVCRACHRPGESIRHIISGCSRLANGEYLHRHNQVARIIHQQLALKYKLVNSEVPYYKYAPDPVLENDDVTLYWDRSIITDRTIVANKPDIVVIDRLARRAMIVDVTIPHDENLVKAEKEKQIKYLDLAHEVVDMWNVDSAVIVPIVVTANGLMAESLNHHLSRLSLGGWIKGLIQKAVLLDTARIVRRFLSLES

SEQ ID NO: 29566 - protein, 1202 aa, Atethmia centrago
MLTRSAARARPPPPDSSLSSASPPPVPSPTVSAVTTPAAVVALSSSDEYFSPPTSPTPVRRQGRGRPPKSLGLRGQLAPSRVPATGGCVQRMRWTQSMNENVMRAYYGSTEGGTNLTAYRVRMLSLFQELEPTVNVSAQRLSDQVRVIQRNHRLDDAALDRLRSEVLSNHIVSTPAQTATHAPIIDAIPPRSNHDVEEEDDRVATVSSQCNVRLRSALEDAFREYRSTPTELRPRLPRLPMHKKNRALVCALDSLLKDFFESSEDLVDTHSILYCAAVAACRLANVKFPNCDEATRPKPAVPAWQYRIERRIDGARVLISKLYCFREGNTRPRVMRFVRRAFSGTGISPREYMSRVTERIDFLKQKVCAWASRIRRYKRRVDRYTQNRMFQSDERWVYRAWERPEQNETDMCRPDDATTTAFWRSIWSEPVCHAEADWMRDVERVCETIPEMEVVVITPSDIARAVRPLPNWKSPGPDGLHNFWLKWLTSSHTYLASQFQSSLESGSLPQFLTTGITHLLHKSGSPAEPKNYRPITCLSTVYKLLTSILRAKINTHIDSNSIMSASQNGCRNGSRGTKELLLIDMAISQQVRRSRKDLSTCWIDYKKAYDSVPHTWLMKVLELYKIDTTLRTFLESCMGQWRTVLRYPGCRRIQGNDEPVWIKRGIFQGDSLSPLWFCLALNPLSTLLEDSGLGYRLRRGGQVISHLLYMDDLKIFAPNKLRLMELLKVTETFSGAIRMEFGVDKCAVMHVKRGEIMESEGIQLSDSIHLRSLSSPESYKYLGMSEALGINVTDMKQLLKERFFGRLKKVLISLLSGGNKVRAFNGWVMPVLMYSFGILKWTQTELDALDRRVRTLLTANRMHHPRSSVMRLYIPRKCGGRGFLNAKTLHNREICSLREYFLKAEVGMHRDVVAVDKGLTPLSMAKENWCKPVVLTTDDRKEIWQNKELHGRFYRALHEPDVDFLASVSWLRFGDLFGETEGFVCAIMDEVILTNNYRRHIMKDGTVDVCRACHRPGESIRHIISGCSRLANGEYLHRHNQVARIIHQLLALKYKLVNSEVPYYKYVPDPVLENDHVTLYWDRSIITDRTIVANKPDIVVIDRLARRAMIVDVTIPHDDNLVKAEKEKQIKYLDLAHEVVDMWNVNSAVIVPIVVTANGLMAESLNHHLSRLSLGGWIKGLIQKAVLLDTARIVRRFLSLEP

SEQ ID NO: 29567 - protein, 962 aa, Atethmia centrago
MHKKNRALVCTLDSLLKDFFESSEDLVDTHSILYCAAVAACRLANVKFPNCDGATRPKPAVPAWQCRIERRIDGARVLIGKLYCFREGNTRPRVMRFVRRAFSGTGISPREYMSRVTERIDFLKQKVCAWASRIRRYKRRVDRYTQNHMFQSDERWVYRAWERPEQNETDVCRPDDATTTAFWRSIWSVPVCHAEADWMRDVERVCETIPEMDVVIITPSDIARAVRPLPNWKSPGPDGLHNFWLKWLTSSHTCLASQFQSSLESGSLPQFLTTGITHLLHKSGSPAEPKNYRPITCLSTVYKLLTSILRAKINTHIDSNSIMSASQNGCRNGSRGTKELLLIDMAISQQVRRFRKDLSTCWIDYKKAYDSVPHTWLMRVLEFYKIDTTLRTFLESCMGQWRTVLRYPGCRQIQGNDEPVWIKRGIFQGDSLSPLWFCLALNPLSTLLEDSGLGYRLRRGGQVISHLLYMDDLKIFAPNKLQLMELLKVTETFSSAIRMEFGVDKCAVMHVKRGEIMESEGIQLSDSIHLRSLSSPESYKYLGMSEALGINVTDMKQSLKERFFGRLKKVLISPLSGGNKVRAFNGWVMPVLMYSFGILKWTQTELDALDRRVRTLLTVNRMHHPRSSVMRLYIPRKCGGRGFLNAKTLHNREICSLREYFLKTEVGMHRDVVAVDKGLTPLSMAKENWCKPVILTTDDRKEIWQNKELHGRFYRALHEPDVDFLASVSWLRFGDLFGETEGFVCAIMDEVILTNNYRRHIMKDGTVDVCRACHRPGESIRHIISGCSRLANGEYLHRHNQVARIIHQQLALKYKLVNSEVPYYKYAPDPVLENDHVTLYWDRSIITDRTIVANKPDIVVIDRLARRAMIVDVTIPHDENLVKAEKEKQIKYLDLAHEVVDMWNVDSAVIVPIVVTANGLMAESLNHHLSRLSLGGWIKGLIQKAVLLDTARIVRRFLSLES

SEQ ID NO: 29568 - protein, 1202 aa, Atethmia centrago
MLTRSAARARPPPPDSSLSSASPPQVPSPTVSAVTTPAAVVASSSSDEYFSPPTSPTPVRRQGRGRPPKSLGLRGQLAPSRVPAAGGCVQRMRWTQSMNENVMRAYYGSTEGGTNLTAYRVRMLSLFQELEPTVNVSAQRLSDQVRVIQRNHRLDDAALDRLRSEVLSNHIVSTPAQTATHTPIINAIPPRSNHDVEEEDDRVATVSSQCNVRLRSALEDAFREYRSTPTELRPRLPRLPMHKKNRALVCALDSLLKDFFESSEDLVDTHSILYCAAVAACRLANVKFPNCDGATRPKPAVPAWQCRIERRIDGARVLIGKLYCFREGNTRPRVMRFVRRAFSGTGISPREYMSRVTERIDFLKQKVCAWASRIRRYKRRVDRCTQNRMFQSDERWVYRSWEQPEQNETDVCRPDDATTTAFWRSIWSVPVCHAEADWMRDVERVCETIPEMEVVVITPSDIARAVRPLPNWKSPGPDGLHNFWLKWLTSSHTCLASQFQSSLESGSLPQFLTTGITHLLHKSGSPAEPKNYRPITCLSTVYKLLTSILRAKINTHIDSNSIMSASQNGCRNGSRGTKELLLIDMAISQQVRRFRKDLSTCWIDYKKAYDSVPHTWLMRVLELYKIDTTLRTFLESCMGQWRTVLRYPGCRQIQGNDEPVWIKRGIFQGDSLSPLWFCLALNPLSTLLEDSGLGYRLRRGGQVISHLLYMDDLKIFAPNKLQLMELLKVTETFSSAIRMEFGVDKCAVMHVKRGEIMESEGIQLSDSIHLRSLSSPESYKYLGMSEALGINVTDMKQSLKERFFGRLKKVLISPLSGGNKVRAFNGWVMPVLMYSFGILKWTQTELDALDRRVRTLLTANRMHHPRSSVMRLYIPRKCGGRGFLNAKTLHNREICSLREYFLKTEVGMHRDVVAVDKGLTPLSMAKENWCKPVILTTDDRKEIWQNKELHGRFYRALHEPDVDFLASVSWLRFGDLFGETEGFVCAIMDEVILTNNYRRHIMKDGTVDVCRACHRPGESIRHIISGCSRLANGEYLHRHNQVARIIHQQLALKYKLVNSEVPYYKYAPDPVLENDHVTLYWDRSIITDRTIVANKPDIVVIDRLARRAMIVDVTIPHDENLVKAEKEKQIKYLDLAHEVVDMWNVDSAVIVPIVVTANGLMAESLNHHLSRLSLGGWIKGLIQKAVLLDTARIVRRFLSLES

SEQ ID NO: 29569 - protein, 1110 aa, Xestia xanthographa
MKWTRSMNENVMRAYYGSTEGGTNLTAYRVRMLSLFQDLEPTVNVSAQRLSDQVRVIQRNHRLDDAALDRLRSEVLSNLIILTPTQTAVQVSDINVTLPRSIPAVVEEDDRVATVSSQCNDRLRNALEDALREYRSTPTELRPRLPRLPMHKKNRALVCALDSQLKHIFESSENLVDTQSILFCGAVAACRLANVKFPNCDVATRPKPAVPAWQRRIERRIDGARVLIAKLYCFREGNTRPRVMRFVRRAFSGTEISPQEYMSRVTERIDFLKQKVYAWANRIRRYKQRVDRYSQNRMFQSDERWVYRAWERPEQNMTDVCRPDDATTSSFWRSIWSVPVCHTEADWMRDVERVCEPIPEMEPIFITPLDVARAVRPLPNWKSPGPDGLHNFWLKWFSSSHTCLASQFQSSLESGSLPQFLTTGVTHLLHKSGSPAEPKNYRPITCLSTIYKLLTSILRMKINTHIDKNSIMSASQNGCRNGSRGTKELLLIDMAISQQVRRSRKDLSTCWIDYKKAYDSVPHTWLMRVLELYKVDTTLRTFLESCMGQWKTFLRYPGCRQIQGSDEPVWIKRGIFQGDSLSPLWFCLALNPLSTLLENSGLGCRLRRDGQVISHLLYMDDLKLFAPNKLRLMELLKVTETFSSAIRMEFGVDKCAVMYVKRGEIMESEGLQLSDSIHLKSLSSSETYKYLGMSEALGINVTDMKQSLRERFFGRLRKVLNSLLSGGNKVRAFNGWVMPVLMYSFGILKWTQTELDALDRRVRTLLTESRMHHPRSSVMRLYIPRKCGGRGFLNAKTLHNREVCSLREYFLKAEVGMHRDVVAVDKGLTPLSMAKENWHRPEVLTTDDRKEVWQGKELHGRFYRALHGPDVDFLASVSWLRFGDLFGETEGFVCAIMDEVMLTNNYRKYIMKDSVDVCRACHLPGESIRHIISGCSRLANGEYLHRHNQVARIIHQQLALKYKLVESEVPYYKYVPDPVLENDHVTLYWDRSIITDRTIVANKPDIVMMDRSARRVMIIDVTIPHDENLVKAEKEKQIKYLDLAHEVRGMWNMDSVIIVPIVVTANGLIAKSFDDHLSKLSLGGWIKGLIQKAVLLDTARIVRRFLSLQP

SEQ ID NO: 29570 - protein, 806 aa, Atethmia centrago
MRFVRRAFSGTGISPREYMSRVTERIDFLKQKVCAWASRIRRYKRRVDRYTQNRMFQSDERWIYRAWERPEQNETAVCRPDDATTTAFWRSIWSVPVCHAEADWMRDVERVCETIPEMEVVIITPSDIARAVRPLPNWKSPGPDGLHNFWLKWLTSSHTCLASQFQSSLESGSLPQFLTTGITHLLHKSGSPAEPKNYRPITCLSTVYKLLTSILRAKINTHIDSNSIMSASQNGCKNGSRGTKELLLIDMAISQQVRRFRKDLSTCWIDYKKAYDSVPHTWLMRVLEFYKIDTTLRTFLESCMGQWRTVLRYPGCRQIQGNDEPVWIKRGIFQGDSLSPLWFCLALNPLSTLLEDSGLGYRLRRGGQVISHLLYMDDLKIFAPNKLQLMELLKVTETFSSAIRMEFGVDKCAVMHVKRGEIMESEGIQLSDSIHLRSLSAPESYLGMSEALGINVTDMKQSLNERFFGRLKKVLISLLSGGNKVRAFNGWVMPVLMYSFGILKWTQTELNALDRRVRTLLTANRMHHPRSSVMRLYIPRKCGGREFLNAKTLHNREICSLREYFLKTEVGMHRDVITVDKGLTPLSMAKENWCKPVILTTDDRKEIWQNKELHGRFYRALHEPDVDFLASVSWVRFGDLFGETEGFVCAIMDEVILTNNYRRHIMKDGTVDVCRACHRPGESIRHIISGCSRLANGEYLHRHNQVARIIHQQLALKYKLVNSEVPYYKYAPDPVLENNHVTLYWDRSIITDRTIVANKPDIVVIDRLARRAMIVDVTIPHDENLVKAEKVKYQKNKISRLSTRGC

SEQ ID NO: 29571 - protein, 866 aa, Noctua fimbriata
MRFVRRAFSGTGISPQEYMSRVTERIDFLKQKVYAWANRIRRYKRRVDRYSQNRMFQSDERWVYRAWERPDQNMTDVCRPDDAATSSFWLSIWSVPVCHTEADWMRDVEQVCEPIPEMEPILITPLDVARAVRPLPNWKSPGPDGLHNFWLKWLSSSHTCLASQFQSSLESGSLPQFLTTGVTHLLHKSGSPAEPKKYRPITCLSTVYKLLTSILRAKINTHIDKNSIMSASQNGCRNGSRGTKELLLIDMAISQQVRRSRKDLSTCWIDYKKAYDSVPHTWLMRVLELYKIDATLRAFLESCMGQWRTVLRYPGCRQIQGNDEPVWIKRGIFQGDSLSPLWFCLALNPLSTLLEDSGLGYRLRRGGQVISHLLYMDDLKLFAPNKLRLMELLKVTETFSSAIRMEFGVDKCAVMYVKQGEIMESEGIQLSDSIHLRTLSSTESYLGMSEALGINVTDMKQSLKERFFGRLNKVLHSLLSGGNKVRAFNGWVMPVLMYSFGVLKWTQTELDALDRRVRTLLTANRMHHRRSSVMRLYIPRKCGGRGFLNAKSLHNREMCSLREYFLKVEVGMHRDVVAVDKGLTPLSMAKENWRKPEVLTTDDRKEVWQGKELHGRFYRALHGPDVDFLASVSWLRFGDLFGETEGFVCAIMDEFMLTNNYRKYIMKDGTVDVCRACHRPGESIRHIISGCSRLANGEYLHRHNQVARIIHQQLALKYKLVESEVPYYKYVPDPVLEKDHVTLYWDQSIITDRTIVANKPDIVVIDRSARRVMIVDVTIPHDENLVKAEKEKQIKYLDLAHEVVDMWHMNSAVIVPIVVTANGLIAKSLDDHLSKLSLGGWIKGLIQKAVLLDTARIVRRFLSLEP

SEQ ID NO: 29572 - protein, 1200 aa, Xestia xanthographa
MITRAAARRAHLPTPDSSLSSASPPPDPGSPVSPVAAVASSSSDEYFSPPTSPPPVRRAGRGRPPKSLGLRGQQTPSRVPATGGCVQRMKWTQSMNENVMRAYYGSTEGGTNLTAYRVRMLSLFQGLEPTVNVSAQRLSDQVRVIQRSHRLDDAALDRLRSEVLSNLIVLTPTQTAVQVSAIDATPPRLNPVVVEEDDGVATVSSQCNDRLRSALENALHEYRSTPTELRPRLPRLPMHKKNRALVCALDSQLKNIFESSENLVDTHSILFCGAVAACRLANVKFPNCDVANRPKPAVPAWQRRIERRIDGARVLIGKLYCFREGNTRPRVMRFVRRAFSGTEISPQEYMSRVTERIDFLKQKVYAWANRIRRYKRRVDRYSQNRMFQSDERWVYRAWERPEQNMTDVCRPDDAATSSFWRSIWSVPVCHTEADWMRDVERVCEPIPEMEPTFITPLDVARAVRPLPNWKSPGPDGLHNFWLKWFSSSHTCLASQFQSSLESGSLPQFLTTGVTHLLHKSGSPAEPKNYRPITCLSTIYKLLTSILRVKINTHIDKNSIMSASQNGCRNGSRGTKELLLIDMAISQQVRRSRKDLSTCWIDYKKAYDSVPHTWLMRVLELYKIDTTLRKVRRVESCMGQWRTVLRYPGCRQIQGSDDPVWIKRGIFQGSLSPLWFCLALNPLSTLLENSGLGCRLRKDGQVISHLLYMDDLKLFASNKLRLMELLKVTETFSNAIRMEFGVDKCAVMYVKRGEIMESEGLQLSDSIQLRSLSSSETYKYLGMSEALGINITDMKQSLKERFFSRLRKVLNSLLSGGNKVRAFNGWVMPVLMYSFGILKWTQTELDALDRRVRTLLTESRMHHPRSSVMRLYIPRKCGGRGFLNAKTLHNREVCSLREYFLKAEVGMHRDVVAVEKGLTPLSMAKENWHKSEVLTTDDRKEVWQGKELHGRFYRALHGPDVDFLASVSWLRFGDLFGETEGFVCAIMDEVMLTNNYRKYIMKDGTVDMCRACHLPGESIRHIISGCSRLANGEYLHRHNQVARIIHQQLALKYKLVESEVPYHKYVPDPVLESDHVTLYWDRSIITDRTIVANEPDIVMIDRSARRVMIIDVTIPHDENLVKAEKEKQIKYLDLAHEVRDMWNMNSVIIVPIVVTANGLIAKSFDDHLSKLSLGGWIKGLIQKAVLLDTARIVRRFLSLQP

SEQ ID NO: 29573 - protein, 1200 aa, Xestia xanthographa
MITRAAARRAHLPTPDSSLSSASPPPDPGSPVSPVAAVASSSSDEYFSPPTSPPPVRRAGRGRPPKSLGLRGQQTPSRVPATGGCVQRMKWTQSMNENVMRAYYGSTEGGTNLTAYRVRMLSLFQGLEPTVNVSAQRLSDQVRVIQRSHRLDDAALDRLRSEVLSNLIVLTPTQTAVQVSAIDATPPRLNPVVVEEDDGVATVSSQCNDRLRSALENALHEYRSTPTELRPRLPRLPMHKKNRALVCALDSQLKNIFESSENLVDTHSILFCGAVAACRLANVKFPNCDVANRPKPAVPAWQRRIERRIDGARVLIGKLYCFREGNTRPRVMRFVRRAFSGTEISPQEYMSRVTERIDFLKQKVYAWANRIRRYKRRVDRYSQNRMFQSDERWVYRAWERPEQNMTDVCRPDDAATSSFWRSIWSVPVCHTEADWMRDVERVCEPIPEMEPTFITPLDVARAVRPLPNWKSPGPDGLHNFWLKWFSSSHTCLASQFQSSLESGSLPQFLTTGVTHLLHKSGSPAEPKNYRPITCLSTIYKLLTSILRVKINTHIDKNSIMSASQNGCRNGSRGTKELLLIDMAISQQVRRSRKDLSTCWIDYKKAYDSVPHTWLMRVLELYKIDTTLRKVRRVESCMGQWRTVLRYPGCRQIQGSDDPVWIKRGIFQGSLSPLWFCLALNPLSTLLENSGLGCRLRKDGQVISHLLYMDDLKLFASNKLRLMELLKVTETFSNAIRMEFGVDKCAVMYVKRGEIMESEGLQLSDSIQLRSLSSSETYKYLGMSEALGINITDMKQSLKERFFSRLRKVLNSLLSGGNKVRAFNGWVMPVLMYSFGILKWTQTELDALDRRVRTLLTESRMHHPRSSVMRLYIPRKCGGRGFLNAKTLHNREVCSLREYFLKAEVGMHRDVVAVEKGLTPLSMAKENWHKSEVLTTDDRKEVWQGKELHGRFYRALHGPDVDFLASVSWLRFGDLFGETEGFVCAIMDEVMLTNNYRKYIMKDGTVDMCRACHLPGESIRHIISGCSRLANGEYLHRHNQVARIIHQQLALKYKLVESEVPYHKYVPDPVLESDHVTLYWDRSIITDRTIVANEPDIVMIDRSARRVMIIDVTIPHDENLVKAEKEKQIKYLELAHEVRDMWNMNSVIIVPIVVTANGLIAKSFDDHLSKLSLGGWIKGLIQKAVLLDTARIVRRFLSLQP

SEQ ID NO: 29574 - protein, 1203 aa, Atethmia centrago
MLTRSAARARPPPPDSSLSSASPPPVPSPTVSAVTTPAAVVASSSSDEYFSPPTSPTPVRRQGRGRPPKSLGLRGQLAPSRVPAAGGCVQRMRWTQSINENVMRAYYGSTEGGTNLTAYRVRMLSLFQKLEPTVNVSAQRLSDQVRVIQRNHRLDDAALDRLRSEVLSNHIVSTPAQTATHAPIINAIPPRSNHDVEEEDDRVATVSSQCNVRLRSALEDAFREYRSTPTELRPRLPRLPMHKKNRALVCALDSLLKDFFESSEDLVDTHSILYCAAVAACRLANVKFPNCDGATRPKPAVPTWQCRIERRIDGARVLIGKLYCFREGNTRPRVMRFVRRAFSGTGIRPREYMSRVTERIDFLKQKVCAWASRIRRYKRRVDRYTQNRMFQSDERWVYRAWERPEQNETDVCRPDDATTTAFWRSIWLVPVCHAEADWMRDDERVCETIPEMEVVIITPSDIARAVRPLPNWKSPGPDGLHNFWLKWLTSSHTCLASQFQSSLESGSLPQFLTTGITHLLHKSGSPAEPKNYRPITCLSTVYKLLTSILRAKINTHIDSNSIMSASQNGCRNGSRGTKELLLIDMAISQQVRRFRKDLATCWIDYKKAYDSVPHTWLMRVLELYKIDTTLRTFLESCMGQWRTVLRYPGCRQIQGNDEPVWIKRGIFQGDSLSPLWFCLALNPLSTLLEDSGLGYWLRRGGQVISHLLYMDDLKIFAPNKLQLMELLKVTETFSSAIRMEFGVDKCAVMHVKRGEIMESEGIQLSDSIHLRSSISSPESYKYLGMSEALGINVTDMKQSLKERFFGRLKKVLISPLSGRNKVRAFNGWVMPVLMYSFGILKWTQTELDALDRRVHTLLTANRMHHPRSSVMRLYIPRKCGGRGFLNAKTLHNREICSLRKYFLKTEVGMHRDVVAVDKGLTPLSMAKENWCKPVILTTDDRKEIWQNKELHGRFYRALHEPDVDFLASVSWLRFGDLFGETEGFVCAIMDEVILTNNYRRHIMKDGTVDVCRACHRPGESIRHIISVCSRLANGEYLHRHNQVARIIHQQLALKYKLVNSEVPYYKYAPDPVLENDHVTLYWDRSIITDRTIVANKPDIVVIDRLARRAMIVDVTIPHDENLVKAEKEKQIKYLDLAHEVVDMWNVDSAVIVPIVVTANGLMAESLNHHLSRLSLGGWIKGLIQKAVLLDTARIVRRFLSLES

SEQ ID NO: 29575 - protein, 1051 aa, Noctua fimbriata
MLDDAVLDRLRSEVLSNRIVFTPAQTAVQASVIDATPPRFNPAVVEEDDRVAVVSSQCNDRLRSALEDALREYRSTPTELRPRLPRLPMHNKNRALVCALDSQLKNLFESSENLVDTHSILYCGAVAACRLANVKFPNCDVATRPKPAVPAWQRRIECRIDGARVLIGKLHCFREGNTRPRVMRFVRRAFSGTGISPQEYMSRVTERIDFLKQKVYAWANRIRRYKRRVDRYSQNRMFQSDERWVYRAWERPDQNMTDMCRPDDAATSSFWRSIWSVPVCHTEADWMRDVEQVCEPIPEMEPILITPLDVARAVRPLPNWKSPGPDGLHNFWLKWLSSSHTCLASQFQSSLESGSLPQFLTTGVTHLLHKSGSPAEPKNYRPITCLSTVYKLLTSILRAKINTHIDKNSIMSASQNGCRNGSRATKELLLIDMAISQQVRRSRKDLSTCWIDYKKAYDSVPHTWLMRVLELYKIDATLRAFLESCMGQWRTVLRYPGCRQIQGNDEPVWIKRGIFQGDSLSPLWFCLALNPLSTLLEDSGLGYRLRRGGQVISHLLYMDDLKLFAPNKLRLMELLKVIETFSSAIRMEFGVDKCAVMYVKHGVIMESEGIQLSDSIHLRSLSSSESYKYLGMSEALGINVTDMKQSLKERFFGRSPNKVLNSFLSGGNKVRAFNGWVMPVLMYSFGVLKWTQTELDALDRRVRTLLTANRMHHPRSSVMRLYIPRKCGGRGFLNAKSLHNREMCSLREYFFKVEVGMHRDVVAVDKGLTPLSMAKENWRKPEVLTTDDRKEVWQGKELHGRFYRALHGPDVDFLASVSWLRFGDLFGETEGFVCAIMDEVMLTNNYRKYIMKDGTVDVCRACHRPGESIRHIISGCSRLANGEYLHRHNQVARIIHQQLALKYKLVESEVPYYKYVPDPVLEKDHVTLYWDQSIITDRTIVANKPDIVVIDRSARRVMIVDVTIPHDENLVKAEKEKQIKYLDLAHEVVDMWNVNSAIIVPIVVTANGLIAKSLDDHLSKLSLGGWIKGLIQKAVLLDTARIVRRFLSLEP

SEQ ID NO: 29576 - protein, 1226 aa, Xestia xanthographa
MNKGNNNKKIHLPTPDSSLSSASPPPDPRSPVSPVAGVASSSSDEYFSPPTSPPPVRRAGRGRPPKRLGLRGQQAPSRVPATGGCVQRMKWTQSINENVMRAYYGSTEGGTNLTAYRVRMLSLFQDLEPTVNVSAQRLSDQVRVIQRSHRLDDAALDRLRSEVLSNLIVLTPTQTAVQVSAIDATPPRLNPAVVEEDDGVATVSSQCNDRLRSALENALHEYRSTPTELRPRLPRLPMHKKNRALVCALDSQLKNIFESSENLVDTHSILFCGAVAACRLANVKFPNCDVATRPKPAVPAWQRRIERRIDGARVLIGKLYCFREGNTRPRVMRFVRRAFSGTEISPQEYMSRVTERIDFLKQKVYAWANRIRRYKRRVDRYSQNRMFQSDERWVYRSWERPEQNMTDVCRPDDAATSSFWRSIWSVPVCHTEADWMRDVERVCEPIPEMEPIFITPLDVARAVRPLPNWKSPGPDGLHNFWLKWFSSSHTCLASQFQSSLESGSLPQFLTTGVTHLLHKSGSPAEPKNYRPITCLSTIYKLLTSILRVKINTHIDKNSIMSASQNGCKNGSRGTKELLLIDMAISQQVRRSHKDLSTCWIDYKKAYDSVPHTWLMRVLELYKIDTTLRTFLESCMGQWRTVLRYPGCRQIQGSDDPVWIKRGIFQGDSLSPLWFCLALNPLSTLLENSGCRLRKDGQVISHLLYMDDLKLFAPNKLRLMELLKVTETFNNAIRMEFGVDKCAVMYVKRGEIMESEGLQLSDSIQLRSLSSSETYKYLGMSEALGINITDMKQSLKERFFSRLRKVLNSLLSGGNKVRAFNGWVMPVLMYSFGILKWTQTELDALDRRVRTLLTESRMHHPRSSVMRLYIPRKCGGRGFLNAKTLHNREVCSLREYFLKAEVGMHRDVVAVDKGLTPLSMAKENWHKPEVLTTDDRKEVWQGKELHGRFYRALHGPDVDFLASVSWLRFGDLFGETDGFFCAIMDEVMLTNNYRKYIMKDGTVDMCRACHLPGESIRHIISGCSRLANGEYLHRHNQVARIIHQQLALKYKLVESEVPYYKYVPDPVLESDHVTLYWDRSIITDRTIVANKPDIVMIDRSARRVMIIDVTIPHDENLVKAEKEKQIKYLDLAHEVRDMWNMNSVIIVPIVVTANGLIAKLFRRLDQGPDSEGSTPRYGSHCKEVPVSAAPTTGVLDPAPDTGGPLFFIFLNVFFNIIFFKIGTFKNM

SEQ ID NO: 29577 - protein, 1101 aa, Ochropleura plecta
MRWTSSINANVMRAYYGSTEGGTNLTAYRVRMLSLFQDLEPTINVSAQRLSDQVRVIQRNHMLDDAALDRLRSEVLSNRIILTTPQTAMQASVIDGMQPRSDPAVVEEDDRVATVSSQCNERMRSALEDAVRDYRSTPAELRPRLPRLPMHKKNRALVCALDSQLKNLFESSEDLVDTHSILYCGAVAVCRLANVKFPSCDVATRPKPSVPAWQCRIERRIDEARVLIGKLYCFREGNTRPRVMRFVRRAFSGTEISPQEYMSRTTERIDFLKQKVYAWANRIRRYKRRVDRYSQNRMFRSDERWVYRAWERPEQSVTDVCRPDDVATSSFWHSIWSVPVCHTEADWMRDVERVCETIPEMEPILITSLDIASAVRPLPNWKSPGPDGLHNFWLKWLSSSHTRLASQFQSCLESGSLPQFLTTGVTHLLYKSGSPAEPKNYRPIMCLSTVYKLLTSILRAKINSHIDNNSIMSASQNGCRNGSRGTKELLLIDMAISQQVRRSRKDLSTCWIDYKKAYDSVPHTWLKRVLELYKIDATLRAFLESCMGQWRTVLRYPGCRQIQGNDEPVWIKRGIFQGDSLSPLWFCLALNPLSTLLEDSGLGYRLRRGGQVISHLLYMDDLKLFAPNKLRLMELLKVTETFSNAIRMEFGVDKCAIMYVKRGEIIESEGIQLSDSIHLRSLSSSESYKYLGMSEALGINVADMKQLLRECFFGRLKKVLKSLLSGGNKVRAFNSWVMPVLMYSFGILKWTQTELDALDRRVRTLLTGNRMHHPRSSVMRLYIPRKCGGRGFLNAKTLHNREVCSLREYFLKTDVGVHRDVVAVDKGLTPLSMAKENWRRVIWQGKELHGRFYKALHGPDVDFLASVSWLRFGDLFGETEGFVCAIMDKVMLTNNYRKYIMRDGTVDVCRACHRPGESIRHIISGCSRLANSEYLHRHNQVARIIHQQLALKYNLVESEVPYYKYVPDPVLEKDHVTMYWDRSIITDRTIVANKPDIVVIDRSARRVMIIDVTIPHDENLVKAEKEKQLKYLDLAHEVVDMWNVNSAIIVPIVVTANGLIAKSLEEHLSKLSLGGWIKSLIQKAVLLDTARIVRRFLSLEP

SEQ ID NO: 29578 - protein, 889 aa, Xestia xanthographa
MRFVRRAFSGTEISPQEYMFRVTERIDFLKQKVYAWANRIRRYKRRVDRYSQNRMFQSDERWVYRAWERSEQNMTNVCRPDDVATSSFWRSIWSVPVCHTEADWMRDVERVCEPIPEMEPIFITPLDVARAVRPLPNWKSPGPDGLHNFWLKWFSSSHTCLASQFQSSLESGSLPQFLTTGVTHLLHKSGSPAEPKNYRPITCLSTIYKLLTSILRVKINTHIDKNSIMSASQNGCRNGFRGTKELLLIDMAISQQVRRSRKDLSTCWIDYKKAYDSVPHTWLMRVLELYKIDTTLRTFLESCMGQWRTVLRYPGCRQIQGSDEPVWIKRGIFQGDSLSPLWFCLALNPLSTLLENSGLGCRLRKDGHVISHLLYMDDLKLFAPNKLRLMELLKVTETFSSAIRMEFGVDKCAVMYVKRGEIMESEGLQLSDPIHLRSLSSSETYKYLGMSEALGINITDMKQSLKERFFGRLRKVLNSLLSGGNKVRAFNGWVMPVLMYSFGILKWTQTELDALDRRVRTLLTESRMHHPRSSVMRLYIPRKCGGRGFLNAKTLHNREVCSLREYFLKAEVGMHRDVVAVDKGLTPLSMAKENWHKPEVLTTTDNRKEVWQGKELHGRFYRALHGPDVDFLASVFWLRFGDLFGETEGFVCAIMDEVMLTNNYRKYIMRDGTVDVCRACHLPGESIRHIISGCSRLANGEYLHRHNQVSRIIHQQLALKYKLVESEVPYYKYVPDPVLEKDHVTLYWDRSIITDRTIVANKPDIVMIDRSARRVMIIDVTIPHDENLVKAEKEKQIKYLDLAHEVRDMWNMNSVIIVPIVVTANGLIAKSLDDHLSKLFRRLDQGPDSEGGTPRYGSHCEEVPVSAALTTGGLDPAPDTGWTSIFLYF

SEQ ID NO: 29579 - protein, 1113 aa, Xestia c-nigrum
MRWTQSMNENVMRAYYGSTEGGINLTAYRDRMLSLFQDLEPAVNVSAQRLSDQVRVIQRSHRLDDATLDRLRSEVLSNLITITPTQTAVHMSVVNATLPRSNPVVVEEDDRVALVSSQCNDRLRSALDNALREYRSISAELRPRLPRLPMHKKNRALVCALDSQLKNIFESSEDLVDTHSILFCGAVAACRLANVKFPNCDVAIRPKPAVPAWQRRIERRIDGARVLIGKLYCFREGNTRPRVMRFVRRAFSGTEISPQEYMSRVTERIDFLKQKVYAWASRIRRYKRRVDRYSQNRMFQSDERWVYRAWERPQQNMTDVCRPDDAATSSFWRSIWSVPVCHSEADWMRDVERVCEPIPTMEPILITPLDIARAVRPLPNWKSPGPDGLHNFWLKWFSSSHTCLASQFQSSLESGSLPQFLTTGVTHLLHKSGSPAEPKNYRPITCLSTVYKLLTSILRSKINTHVDSNSIMSASQNGCRSGSRGTKELLLIDMAISQQVRRARKDLSICWIDYKKAYDSVPHSWLRRVLELYKIDATLRAFLESCMGQWRTVLRYPGCRQIQGNDEPVWIKRGIFQGDSLSPLWFCLALNPVSTLLENSGLGYRLRKDGQVISHLLYMDDLKLFAPNKLQLQLMELLKVTETFSSAIGMEFGVDKCAVMYVKRGKIMGSEGLQLSDSIHLRSLSSFESYKYLGMSEALGINVTDMKQSLRERFFGRLKKVLNSLLSGGNKVRAFNGWVMPVLMYSFGILKWTQTELDALDRRVRTLLTENRMHHPRSSVMRLYIPRKCGGRGFLNAKTLHNREVCSLREYFLKADVGMHRDVAAVDKGLTPLSMAKENWRKPVVLTTDDRMKEWQGKELHGRFYRALHGPDVDFLASVSWLRFGDLFGETEGFVCAIMDEVMLTNNYRKYIMKDGTVDVCRACHLPGESIRHIISGCSRLANGEYLHRHNQVARIIHQQLALKFNLVELEVPYYKYVPDPVLVKDHVTLYWDQSIITDRTIVANKPDIVVIDRSARRVMIIDVTIPHDENLVKAEKEKQIKHLDLAHEVRDMWNMDSVIIVPIVVSANGLIAKSLDEHLSKLSLGGWIKGLIQKAVLLDTARIVRRFLSLQP

SEQ ID NO: 29580 - protein, 998 aa, Atethmia centrago
MHKKNRALVCTLDSLLKDFFENSEDLVDTHSILYCAAVAACRLANVKFPNCDGATRPKPAVPAWQCRIERRIDGARVLIGKLYCFREGNTRPRVMRFVRRAFSGTGISPREYMSRVTERIDFLKQKVCAWASRIRRYKRRVDRYTQNRMFQSDERWVYRVWERPEQNETDVCRPDDVTTTAFWRSIWSVPVCHAEADWMRDVERVCETIPEMEVVIITPSDIARAVRPLPNWKSPGPDGLHNFWLKWLTSSHTCLASQFQSSLESGSLPQFLTTGITHLLHKSGSPAEPKNYRPITCLSTVYKLLTSILRAKINTHIDSNSIMSASQNGCRNGSRGTKELLLIDMAISQQVRRFRKDLSTCWIDYKKAYDSVPHTWLMRVLEFYKIDTTLRTFLESCMGQWRTVLRYPGCRQIQGNDEPVWIKRGIFQGDSLSPLWFCLALNPLSTLLEDSGLGYRLRRGGQVISHLLYMDDLKIFAPNKLQLMELLKVTETFSSAIRMEFGVDKCAVMHVKRGEIMESEGIQLSDSIHLRSLSSPESYKYLGMSEALGINVTDMKQSLKERFFGRLSLLSGGNKVRAFNGWVMPVLMYSFGVLKWTQTELDALDRRVRTLLTANRMHHPRSSVMRLYIPRKCGGRGFLNAKTLHNREICSLREYFLKTEVGMHRDVVAVDKGLTPLSMAKENWCKPVILTTDDRKEIWQNKELHGRFYRALLEPDVDFLASVSWLRFGDLFGETEGFVCAIMDEVILTNNYRRHIMKDGTVDVCRACHRPGESIRHIISGCSRLANGEYLHRHNQVARIIQQQLALKYKLVNSEVPYYKYAPDPVLENDHVTLYWDWSIITDRTIVANKPDIVVIDRLARRAMIVDVTIPHDENLVKAEKEKQIKYLDLAHEVVDMWNVDSAVIVPIVVTANGLMAESLNHHLSRLSLGGWIKGLIQKAVPTPRYGPHCEEVPVSGVLTTGSLDSAPDTGGPLFFIFLNVFFFYTFFQEIFKNIFYM

SEQ ID NO: 29581 - protein, 1210 aa, Xestia c-nigrum
MLTRHRAKLLRDAQPPSPGSSLSSASQPPGRATPVSTVSPVAAVASSSSDEFFSPPSTPPPPPSRGRRRGRGRPPAGLGPRGQQASSRVPAAGGNVSRMRWTQSMNENVMRAYYGATEGGSNLIAYRGQMLSLFQVLEPAVNVDAQRLSDQVRVIQRNHMLDDTVLDRLRSESRSNLVTPASPMIAVQLQTIPCTPLRSDYDSEEDGDEVISVSTQCNAQLRSALEGAFREYRSTPPELRPRLPRLPMHKKNKALVCALDSQLSNCFDSSKDLADTHSILYCGAVAACRVAHVKFPNNDRTTRPKLAVPAWQCRIERRIGEARVLIGKLICFREGNTRPRVMRFVRRAFSGTDVSFRDYLARITERIDFLKQKICAWASRIRRYKRRVERYTQNRSFQSDERWVYRAWERPDQGVTDTRLPDDDAMCSFWRSIWSVPVSHTEGDWIRKVEQVCDQIQEMGAIIISPQDVACAVRPLPNWKSPGPDGLHNFWIKWFQRSHARLASQFQSALESGSLPQFMTTGITHLLHKSGSTAEPKNYRPITCLPTVYKVLTSILRAKINKHIESNSIMSTSQNGCRNGSRGTKELLLIDMAISQQVRRSRKNLSTCWIDYKKAYDSVPHTWLMRVLELYKINATLRAFLESCMGQWKTVLRYPGCRQIQGSDEPVWIKRGIFQGDSLSPLWFCLALNPLSTLLENSGLGYRLRKDGQVISHLLYMDDLKLFAPNKLQLLELLKVTETFSNAIRMEFGVDKCAVMYVKRGEIMESEGLQLSDSIHLRSLSSSESYKYLGMSEALGINVTDMKQSLRERFFGRLKKVLNSLLSGGNKVRAFNGWVMPVLMYSFGILKWTQTELDALDRRVRTLLTANRMHHPRSSMMRLVYIPRKCGGRGFLNAKNLHNREVCSLREYFLEADVGMHRDVVSVDKGLTPLSLANGDWRKPKVLDTNDRREEWQGKELHGRFYRALHGPDVDFLASVSWLRFGDLFGETEGFVCAIMDEVMMTNNYRKYIVKDGTVDICRACHRPGESIRHIISGCSSLANGEYLHRHNLVARIIHQQLALKYNLVESEVPYYKYAPDPVLVNGNITLYWDRPITTDRTVVANRPDIVVIDRLERRTMIVDITVPHDENLVKAEQDKKNKYLDLAREVVDMWDVSTAIIVPIVVSANGLIAKSLDQHLRRLSLGSWIKGLIQKAVLLDTARIVRRFLSQEP

SEQ ID NO: 29582 - protein, 1196 aa, Noctua fimbriata
MITRSRAKQLQEAHTPSPGSSLSSASQPPRRATSVSTVSPVAAVASSSSDEFFSPPSTPPPSPRRRGRGRPPAGLGPRGQPAPNRVPAAGGIVSRMRWTQSINEQVMRAYYGATEGGTNLTAYRVGMLSLFQVLEPTINVSAQRLSDQVRVIQRNHMLDDAVLDRLRSEVLSNRIVFTPAQTAVQASVIDATPPRFNPAVVEEDDRVAVVSSQCNDRLRSALEDALREYRSTPTELRPRLPRLPMHNKNRALVCALDSQLKNLFESSENLVDTHSILYCGAVAACRLANVKFPNCDVATRPKPAVPAWQRRIECRIDGARVLIGKLHCFREGNTRPRVMRFVRRAFSGTGISPQEYMSRVTERIDFLKQKVYAWANRIRRYKRRVDRYSQNRMFQSDERWVYRAWERPDQNMTDMCRPDDAATSSFWRSIWSVPVCHTEADWMRDVEQVCEPIPEMEPILITPLDVARAVRPLPNWKSPGPDGLHNFWLKWLSSSHTCLASQFQSSLESGSLPQFLTTGVTHLLHKSGSPAEPKNYRPITCLSTVYKLLTSILRAKINTHIDKNSIMSASQNGCRNGSRATKELLLIDMAISQQVRRSRKDLSTCWIDYKKAYDSVPHTWLMRVLELYKIDATLRAFLESCMGQWRTVLRYPGCRQIQGNDEPVWIKRGIFQGDSLSPLWFCLALNPLSTLLEDSGLGYRLRRGGQVISHLLYMDDLKLFAPNKLQLMELLKVTETFSSAIRMEFGVGKCAVMYVKQGEIMESEGIQLSDSIHLRTLSSTESYKYLGMSEALGINVTDMKQSLKERFFGRLNKVLHSLLSGGNKVRAFNGWVMPVLMYSFGVLKWTQTELDALDRRVRTLLTANRMHHPRSSVMRLYIPRKCGGRGFLNAKSLHNREMCSLREYFLKVEVGMHRDVVAVDKGWRKPEVLTTDDRKEVWQGKELHGRFYRALHGPDVDFLASVSWLRFGDLFGETEGFVCAIMDEVMLTNNYRKYIMKDGTVDVCRACHRPGESIRHIISGCSRLANGEYLHRHNQVARIIHQQLALKYKLVESEVPYYKYVPDPVLEKDHVTLYWDQSIITDRTIVANKPDIVVIDRSARRVMIVDVTIPHDENLVKAEKEKQIKYLDLAHEVVDMWNVNSAIIVPIVVTANGLIAKSLDDHLSKLSLGGWIKGLIQKAVLLDTARIVRRFLSLEP

SEQ ID NO: 29583 - protein, 1201 aa, Atethmia centrago
MLTRSAARARPPPPDSLLSSASPPPVPSPTVSAVTTPAAVVASSSSDEYFSPPTSPTPVRRQGRGRPPKSLGLRGQLAPSRVPAAGGCVQRMRWTQSMNENVMRAYYGSTEGGTNLTAYRVRMLSLFQELEPTVNVSAQRLSDQVRVIQRNHRLDDAALDRLRSEVLSNHIVSTPAQTATHAPIIDAIPPRSNHDVEEEDDRVATVSSQCNVRLRSALEDAFREYRSTPTELRPRLPRLPMHKKNRALVCALDSLLKDFFESSEDLVDTHSILYCAAVAACRLANVKFPNCDEATRPKPAVPAWQCRIERRIDGARVLISKLYCFREGNTRPRVMRFVRRAFSGTGISPREYMSRVTERIDFLKQKVCAWASRIRRYKRRVDRYTQNRMFQSDERWVYRAWERPEQNETDVCRPDDATTTAFWRSIWSEPVCHAEADWMRDVERVCETIPEMEVVVITPSDIARAVRPLPNWKSPGPDGLHNFWLKWLTSSHTYLASQFQSSLESGSLPQFLTTGITHLLHKSGSPAEPKNYRPITCLSTVYKLLTSILRAKIKTHIDSNSIMSASQNGCRNGSRGTKELLLIDMAISQQVRRSRKDLSTCWIDYKKAYDSVPHTWLMKVLELYKIDTTLRTFLESCMGQWRTVLRYPGCRQIQGNDEPVWIKRGIFQGDSLSPLWFCLALNPLSTLLEDSGLGYRLRRGGQVISHLLYMDDLKIFAPNKLRLELLKVTETFSGAIRMEFGVDKCAVMHVKRGEIMESEGIQLSDSIHLRSLSSHESYKYLGMSEALGINVTDMKQLLKERFFGRLKKVLISLLSGGNKVRAFNGWVMPVLMYSFGILKWTQTELDALDRRVRTLLTANRMHHPRSSVMRLYIPRKCGGRGFLNAKTLHNREICSLREYFLKAEVGMHRDVVAVDKGLTPLSMAKENWCKPVVLTTDDRKEIWQNKELNGRFYRALHEPDVDFLASVSWLRFGDLFGETEGFVCAIMDEVILTNNYRRHIMKDGTVDVCRACHRPGESIRHIISGCSRLANGEYLHRHNQVARIIHQQLALKYKLVNSEVPYYKYVPDPVLENDHVTLYWDRSIITDRTIVANKPDIVVIDRLARRAMIVDVTIPHDDNLVKAEKEKQIKYLDLAHEVVDIWNVNSAVIVPIVVTANGLMAESLNHHLSRLSLGGWIKGLIQKAVLLDTARIVRRFLSLEP

SEQ ID NO: 29584 - protein, 913 aa, Atethmia centrago
MHKKNRALVCALDSLLKDFFESSEDLVDTQSILYCAAVAACLANVKFPNCDGATRPKPAVAVRRIDGARVLIGKLYCFREGNTRPRVMRFVRRAFSGTGIPREYMSRVTECIDFLKQKVCVWASRIRRYKRRVDRYTQNRMFQSDEKWVYRAWERLEQNETDVCRPDDATTTAFWRSIWSVPICHAEADWMRDVERVCETIPEMEVVIITPSDIARAVRPLPNWKSPELDGLHNFWLKWLTSSHTCLASQFQSSLESGSLPQFLTTGITHLLHKSGSPAEPKNYRPITCLSTVYKLLTSILRAAINTHIDSNSIMSASQNGCRNGSRGTKELLLIDMAISQQVRRYRKDLSTCWIDYKKAFDSVPHTWLMRVLELYKIDTTLRTFLESCMGQWRIVLRYPGCRQIQGNDEPVWIKRGIFQGDSLSPLWFCLALNPLSTLLEDSGLGYRLRRGGQVLYMGDLKIIAPNKLQLMELLKVTETFSSAIRMEFGVDKCAVMYVKRGEIMESEGIQLSDSIHLRSLSSRESYKYLGMSEALDINVTDMKQSLKERFFGRLKKVLISPLSGGNKVRAFNGWVMPVLMYSFGILKWTQTELDALDRRVRTLLTANRMHHPRSSVMRLYIPRKCGGLGFLNAKTLHNCEIRVCSLREYFLKAEVGMHRDVVAVDKGLTPLSMAKENWCKPVILTTDDRKEIRQNKELHGRFYRALHEPDVDFLASVSWLRFGDLFGETEGFVCAIMDEVILTNNYRRHIMKDGTVGVCRAYHRPDESIRHIISGCSRLANGEYLHRHNQMARIIHQQLALKYKFVNSEVPYYKYAPDPVLENDHVTLYWDRSIITDRTIVANKPDIVVIDRLARRAMIVDVTIPLDENLVKAEKEKQIKYLDLAHEVVDMWNVNSAVIVPIVVTANGLAGG

SEQ ID NO: 29585 - protein, 1204 aa, Atethmia centrago
MLTRAASKRARPPPPDSSLSSASPPPVSSPTVSAVITPAAVVASSSSDEYFSPPTSPTPVRRQGRDRPPKSLGLRGHPAPSRVPAAGGCVQRMRWTQSMNENVMRAYYGSTEGGTNLTAYRVRMLSLFQELEPTVNVSAQRLSDQVRVIQRNRRLDDATLDRLRSEVLSNYIISTPAQTAVHTPIIDVIPPRSNHGVEEEDDRAATVSSQCNVRLRSALEDAFREYRSTPTELRPRLPRLPMHKKNRALMCALDSQLKVFFESSEDLVDTHSILYCAAVAACRLANVKFPNSDGATRPKPAVPAWQCRIERRIDKARVLIGKLYCFREGNTRPRVMRFVRRAFSGTGISPREYMSHITERIDFLKQKVCAWASRIRRYKRRVDRYTQNRMFQSDERWVYRAWERPKQNVTDVCRPDDATTTAFWRSIWSVPVCHVEADWMRDVERVCETIPKMEVVIITPSDIARAVRPLPNWKSPGPDGLHNFWLKWLTSSHTCLASQFQSSLESGSLPQFMTTGITHLLHKSGSPAEPKNYRPITCLSTVYKLLTSILRAKINTHIDSNSIMSASQNGCRNGSRGTKELLLIDMAISQQVRRSRKDLSTCWIDYKKAYDSVPHTWLMRVLELYKIDTTLRTFLESCMGQWRTVLRYPGCRQIQGNDEPVWIKRGIFQGDSLSPLWFCLALNPLSMQLEDSGLGYRLRRGGQIISHLLYMDDLKIFAPNKLQLMKLLKVTETFSSAIRMEFGVDKCAVMHVKRGEIMESEGIWKLSDSIHLRSLSSPESYKYLGMSEALGINVTDMKQSLKERFFGRLKKVLISLLSGGNKVRAFNSWVMPVLTYSFGILKWTQTELDALDRRVRTLLTANRMHHPRSSVMRLYIPRKCGGRGFLNAKTLHNREICSLREYFLKTEVGMHRDVVAVDKGLTPLSMAKENWCKPVVLTTDDRKEMWQSKELHGRFYRALHEPDVDFLASVSWLRFGDLFGETEGFVCAIMDEVILTNNYRRHIMKDGTVDVCRACHRPGESIRHIISGCSRLANGEYLHRHNQVARIIHQQLALKYKLVNSEVPYYKYVPDPVLENDHVTLYWDRSIITDRTIVANKPDIVVIDRLARRAMIVDVTIPHDDNLVKAEKEKQIKYLDLAHEVVDMWNVNSAVIVPIVVTANGLMARSLNHHLSRLALGGWIKGLIQKAVLLDTARIVRRFLSLEP

SEQ ID NO: 29586 - protein, 1097 aa, Noctua fimbriata
MRWTHSINENVMRAYYGSTEGGTNLTAYRVGMLSLFQVLEPTVNVSAQRLSVQVRVIQRNHMLDDAVLDRLRSEVLSNRIVLTPAQTAVQASVIDATPPRFNPAVVEEDDRVAVVSSQCNDRLRSALEDALREYRSTPTELRPRLPRLPMHNKNRALVCALDSQLENIFESSENLVDTHSILYCGAVAACRLANVKFPNCDVATRPKPAVPAWQRRIERRIDGARVLIGKLHCFREGNTRPRVMRFVRRAFSGTGISPQEYMSRVTERIDFLKQKVYAWANRIRRYKRWVDRYSQNRMFQSDERWVYRAWERPELNMTDVCRPDDAATSSFWRSIWSVPVCHTEADWMRDVERVCEPIPEMEPILITPLDIARAVRPLPNWKSPGPDGLHNFWLKWLSSSHTCLASQFQSSLESGSLPQFLITGVTHLLHKSGSPAEPKNYRPITCLSTVYKLLTSILRAKINTHIDKNSIMSASQNGCRNGSRGTKELLLIDVAISQQVRRSRKDLSTCWIDYKKAYDSVPHTWLMRVLELYKIDATLRAFLESCMGQWRTVLRYPGCRQGDSLSPLWFCLALNPLSTLLEDSGLGYRLRRGGQVISHLLYMDDLKLFAPNKLQLMELLKVTETFSSAIRMEFGVDKCAVMYVKRGEIMESEGIQLSDSIHLRSLSSSESYKYLGKRSFNDCFMSVTIMKQSLKERFFGRLNKVLHSLLSGGNKVRAFNGWVMPVLMYSFGVLKWTQTELDALDRRVRTLLTANRMHHPRSSVMRLYIPRKCGGRGFLNAKSLHNREMCSLREYFLKVEVGMHRDVVAVDKGLTPLSMAKENWHIPEVLTTDDRKEVWQGKELHGRFYRALHGPDVDFLASVSWLRFGDLFGETEGFVCAIMDEVMLTNNYRKYIMRDGTVDVCRACHRPGESIRHIISGCSRLANGEYLHRHNQVARIIHQQLALKYKLVESEVPYYKYVPDPVLEKDHVTLYWDQSIITDRTIVANKPDIVVIDRSARRVMIVDVTIPHDENLVKAEKEKQIKYLDLAHEVVDMWNVNSAIIVPIVVTANGLIAKSLDDHLSKLSLGGWIKGLIQKAVLLDTARIVRRFLSLEP

SEQ ID NO: 29587 - protein, 1070 aa, Xestia c-nigrum
MEHLIESYPILSYIIYNIILDNNNNNNNSNHMLDDAALDRLRSEVLSNRIILTPAQTAVQASAIDATPPRSNPAVVEEDGRVATVSSQCNDRLRSALEDALREYRSTPTELRPRLPRLPMHKKNRALVCALDSQLKNVFESSEDLVDTHSILFCGAVAACRLANVKFPNCDLATRPKPAVPVWQRRIERRIDGARVLIGKLYCFREGNTRPRVMRFVRRAFSGTEISPQEYMSRVTERIDFLKQNKRRVDRYSQNRMFQCDERWVYRAWERPDQNVTDVCHPGDAATSSFWRSIWSVPVCHSEADWMRDVERVCEPIPEMAPVVITSLDIARAVRPLPNWKSPGPDGLHNFWLKWLGSSHTCLASQFQSSLESGSLPQFLTTGVTHLLHKSGSPTEPQNYRPITCLSTVYKLLTSILRTKINTHIDNNSIMSASQNGCRNGSRGTKELLLIDMAISQQVRRSRKDLSTCWIDYKKAYDSVPHSWLMRVLELYKIDATLCTFLKSCMGQWRTVLRYPGCRQIQGNDESVWIKRGIFQGDSLSPLWFCLALNPLSTLLENSGLGYQLRKDGQVISHLLYMDDLKLFAPNKLRLMELLKVTETFSNAIRMEFGVDKCAVMYVKRGEIMESEGLQLSDSIHLRSLSSSESYKYLGMPEALGINVTDMKQSLRERFFGRLKNVLNSLLSGGNKVRAFNGWVMPVLMYSFGILKWTQTELDALGRRVRTLLTENRMHHPRSSVMRLYIPRKCGGRGFLNAKTLHNREVCSLREYFLKAEVGMHRDVVAVDKGLTPLSMAKENWRKPVVLTTDDRKKEWQGKVLHGRFYRALHGPDVDFLASVSWLRFGDLFGETEGFACAIMDEVMLTNNYRKYIMKDGTVDVCRACHCPGESIRHIISGCSRLANGEYLHRHNQVARIIHQQLALKFKLVESEVPYYKYVPDPVLVKDHITLYWDQSIITDRTIVANKPDIVVIDRSARRVMIIDVTIPHDENLVKAEKEKQIKYLDLAHEVRDMWNMNSVIIVPIVVTANGLIAKSLDEHLSRISLGDWIKGMIQKAVLLDTARIVRRFLSLQP

SEQ ID NO: 29588 - protein, 962 aa, Griposia aprilina
MHKKNRALVCALDSQLKNVFESSENLIDTHSILYCAAVAACRLANVRFPNCDGATRPKPAVPAWQCRIERRIDGARVLIGKLHCFREGNNRPRVMRFVRRAFSGTGISPREYMSHATERIDFLKQKVCAWASRIRRYKRRVDRYTQNRMFQSDERWVYRAWERPEQNVTDECRPDDATTSTFWRSIWSVPVCHVEADWMRDVGRACETVPEMDAVLITPLDVARAVRPLPNWKSPGPDGLHHFWLKWLISSNACLASQYQSSLESGSLPQFLTTGVTHLLHKSGSPTDPKNYRPITCLSTVYKLLTSILRAKINTHIESNSIMSASQNGCRNGSRGTKELLLIDMAISQQVRRSRRDLSTCWIDYKKAYDSVPHTWLMRVLELYKIDTTLRTFLRSCMGKWRTVLRYPGCRQIQANDEAVWIKRGIFQGDSLSPLWFCLALNPLSTLLEDSGLSYRLRRGGQVISHLLYMDDLKLFAPNKLQLMELLKVTETFSSTIRMEFGMDKCAVMHVKRGEVMEPEGIQLSDSIHLRSLSSSESYKYLGMSEALGINVADMKQSLKERFFGRLKKVLISLLSGGNKVRAFNGWVMPVLMYSFGILKWTQTELDALDRRVRTLLTANRMHHPRSSVMRLYIPRKCGGRGFLNAKTLHNREVCSLREYFLKAEVGMHRDVVAVDKGLTPLSMAKENWRNPVVLTTDDRKEVWQSKELHGRFYRALHEPGVDFLASVSWLRFGDLFGETEGFVCAIMDEVILTNNYRRHIMKDGTVDMCRACHRPGESIRHIVSGCSRLANGEYLHRHNQVARIIHQQLALKYKLVDSEVPYYKYVPDPVLENDHITLYWDRSIITDRTIVANKPDIVVIDRLARRTMIIDITIPHDENLVKAEKEKQIKYLDLAHEVVEMWNVSSAVIVPIVVSANGLMAKSLDQHLSRLSLGGWVKGLIQKAVLLDTARIVRRFLSLEP

SEQ ID NO: 29589 - protein, 1075 aa, Atethmia centrago
MLTRSAARARPPPPDSSLSSASPPPVPSPTVSAVTTPAAVVASSSSDEYFSPPTSPTPVRRQGRGRPPKSLGLRGQLAPSRVPAAGGCVQRMRWTQSMNENVMRAYYGSTEGGTNLTAYRVRMLSLFQKLEPTVNVSAQRLSDQVRVIQRNHRLDDAALDRLRSEVLSNHIVSTPAQTATHAPIINAIPPRSNHDVEEEDDRVATVSSQCNVRLRSALEDAFREYRSTPTELRPRLPRLPMHKQNRALVCALDSLLKDFFESSEDLVDTHSILYCAAVAACRLANVKFPNCDGATRPKPAVPAWQCRIEHRIDGARVLIGKLYCFREGNTRPRVMRFVRRAFSGTGISPREYMSRVTERIDFLKQKVCAWASRIRRYKRRVDRCTQNRMFQSDERWVYRSWERPEQNETDVCRPDDATTTAFWRSIWSVPVCHAEADWMRDVERVCETIPEMEVVIITPSDIARAVRPLPNWKSPGPDGLHNFWLKWLTSSHTRLASQFQSSLESGSLPQFLTTGITHLLHKSGSPAEPKNYRPITCLSTVYKLLTSILRAKINTHIDSNSIMSASQNGCRNGSRGTKELLLIDMAISQQVRRFRKDLSTCWIDYKKAYDSVPHTWLMRVLELYKIDTTLRTFLESCMGQWRTVLCYPGCRQIQGNDEPVWIKRGIFQGDSLSPLWFCLALNPLSTLLEDSGLGYRLRRGGQVISHLLYMDDLKIFAPNKLQLMELLKVTETFSSAIRMEFGVDKCAVMHVKRGEIMESEGIQLSDSIHLRSLSSPESYKYLGMSEALGINVTDMKQSLKERFFGRLKKVLISPLSGGNKVRAFNGWVMPVLMYSFGILKWTQTELDALDRRVRTLLTANRMHHPRSLVMRLYIPRKCGGRGFLNAKTLHNREICSLREYFLKTEVGMHRDVVAVDKGLTPLSMAKENWCKPVILTTDDRKEIWQNKELHGRFYRALHEPDVDFLASVSWLRFGDLFGETEGFVCAIMDEVILTNNYRRHIMKDGTVDVCRACHRPGESIRHIISGCSRLANGEYLHRHNQVARIIHQQLALKYKLVNSEVPYTVQVCARPSSRK

SEQ ID NO: 29590 - protein, 1100 aa, Noctua janthe
MLTRSRAKHQAHPPSPDSSLSSASQPPGRASIVSAVSPIAAVASSSSDEFLSPPSTPSPPRRRGRGRPPAGLGPRGQQAPNRVPAAGGNVSRMRWTQSINENVMRAYYGATEGGSNLTAYRGRMLSLFQVLEPGVSVSAQRLSDQVRVIQRNHMLDDTVLERLRFDSRSNLVIPASPMIAVQLQNVSSAPPRSEHDGEEDDDEVISVSTQCNAQLRSALEGAFREYRSTPPELRPRLPRLPMHKKNKALVCALDSQLSNCFDSSKDLTDTHSILYCGAVAACRVAHVKFPNNDRATRPKFAVPAWQCRIERRIGEARALIGKLICFREGNTRPRVMRFVKRAFSGTDVSFRDYLARVTERIDFLKQKICAWASRIRRDKRRVERYTQNRTFRSDERWVYRAWERPDQGVTDTRLPDDDAMCSFWRNIWSVPVSHTEGDWTREVERACDSIPEMGAIIISPQDVARAVRPLPNWKSPGPDGLHNFWIKWFQRSHVRLASQFQSALESGSLPQFLTTGITHLLHKSGSTAEPKNYRPITCLPTVYKVLTSILRAKINHHIDSNSIMSASQNGCRNGSRGTKELLLIDMAISQQVRRSRRDLSTCWIDYKKAYDSVPHTWLMKVLELYKVDATLRTFLMSCMGHWRTVLHYPGCRQIQGNSEPIKIERGIFQGDSLSPLWFCLALNPLSTLLEGSGLGYRLRRGGQVISHLLYMDDLKLFAPNNLQLMKLLKVTETFSSAIRMEFGVDKCAVMHVKRGEIMESVGTQLSDSIHLRSLSSTETYKYLGMSEALGINTADMKQSLRDRFFGRLNKVLSSLLSGGNKVRAFNGWVMPVLMYSFGILKWTQTELDALDRRVRALLTANRMHHPRSLVMRLYIPRKCGGRGFLNAKTLHNREICSLREYFLEVDEGMHRDVVSVDKGLTPLSLANENWRKPRVLDTNDRKEVWQGKELHGRFYRALHGPDVDFLASVSWLRFGDLFGETEGFVCAIMDEVMMTNNYRKYIVKDGTVDICRACHRPGESIRHIISGCSRLANGEYLHRHNLVARIIHQQLALKYNLVESEVPYYKYAPDPVLDNGNITLYLIDLSSLTGLLLPINLTLW

SEQ ID NO: 29591 - protein, 1099 aa, Griposia aprilina
MRAYYRSTEGGTNLTAYRDRMLSLFQELEPTINVSAQRLSDQVRVIQRSHRLDDAALDRLRSELNNHIISTPAQTAVQASTIDEIQPRSNHGVEVEDDRVASVSSQCNARLRSALEDAFREYRSTPTELRPRLPRLPMHKKNRALVCALDSQLKNVFESSENLIDTHSILYCAAVAACRLANVRFPNCDGATRPKPAVPAWQCRIERRIDGARVLIGKLHCFREGNNRPRVMRFVRRAFSGTGISPREYMSHATERIDFLKQKVCAWASRIRRYKRRVDRYTQNRMFQSDERWVYRAWERPEQNVTDECRPDDATTSTFWRSIWSVPVCHVEADWMRDVGRACETVPEMDAVLITPLDVARAVRPLPNWKSPGPDGLHNFWLKWLISSHACLASQYQSSLESGSLPQFLTTGVTHLLHKSGCPTDPKNYRPITCLSTVYKLLTSILRAKINTHIESNSIMSASQNGCRNGSRGTKELLLIDMAISQQVRRSRRDLSTCWIDYKKAYDSVPHTWLMRVLELYKIDTTLRTFLRSCMGQWRTVLRYPGCRQIQANDEPVWIKRGIFQGDSLSPLWFCLALNPLSTLLEDSGLGYRLRKDGQVISHLLYMDDLKLFAPNKLQLMELLKVTETFSSTIRMEFGVDKCAVMHVKRGEIMEPEGIQLSDSIHLRSLSSSESYKYLGMSEALGINVADMKQSLRERFFGRLKKVLISLLSGGNKVRAFNGWVMPVLMYSFGILKWTQTELDALDRRVRTLLTANRMHHPRSSVMRLYIPRKCGGRGFLNAKTLHNREVCSLREYFLKAEVGMHRDVVAVDKGLTPLSMAKENWRKPVVLTTDDRKEVWQSKELHGRFYRALHEPGVDFLASVSWLRFGDLFGETEGFVCAIMDEVILTNNYRRHIMKDGTVDMCRACHRPGESIRHIVSGCSRLANGEYLHRHNQVARIIHQQLALKYKLVDSEVPYYKYVPDPVLENDHITLYWDRSIITDRTIVANKPDIVVIDRLARRTMIIDITIPHDENLVKAEKEKQIKYLDLAHEVVEMWNVRSAVIMPIVVSANGLMAKSLDQHLSRLSLDGWVKGLIQKAVLLDTARIVRRFLSLEP

SEQ ID NO: 29592 - protein, 982 aa, Eupsilia transversa
MRWTQSMNENVMRAYYGSTEGGINLTAYRVRMLSLFQELEPTVNVSAQRLSDQVRVIQRNHRLDDAELDRLRSEVLSNHIIPSPAQTAELATPSNVIPPRSNRGLEQEDDRVATVSSQCNDRLRNALEDAFREYRYTPTELRPRLPRLPMHKKNRALVCALDSQLKNFFESSEDLIDTHSILYCAAVAACRLANVKFPNCDAATRPKPAVPAWQCRIERRIDGARVLIGKLYCFREGNTRPRVMRFVRRAFLGTGISPQEYMSRVTERIDFLKQKVCAWASRIRRYKRRVDRYTQNRMFQSDERWVYRAWERPEQNVADVCRPDDAATSAFWRSIWSVPVCHAEAGWMHGVERVCEAIPEMEAVIITPLDVARAVRPLPNWKSPGPDGLHNFWLKWLISSHTRLASQFQSSLESGSLPQFLTTGVTHLLHKSGSPAEPKNYRPITCLSTVYKLLTSILRAKINSHIDSHSIMSASQNGCRNGSRGTKELLLIDMAISQQVRRSRKDLSTCWIDYKKAYDSVPHTWLMRVLELYKIDATLRTFLMSCMGQWRTVLRYPGCRQIQGNDEPVWIKRGIFQGDSLSPLWFCLALNPLSTLLEESGLGYRLRRGGQVISHLLYMDDLKLFAHNKLRLMELLKVTETFSSAIRMEFGVDKCAVMHVKRGEIMESEGTQLSDSIHLRSLSSTESYKYLGMSEALGINVADMKQALKERFFGRLKKVLISLLSGGNKVRAFNGWVMPVLMYSFGILKWTQTELDALDRRVRTLLTANRMHHPRSSVMRLYIPRKCGGRGFLNAKTLHNREVCSLREYFLKTEEGMHRDVVAVDKGLTPLSMAKENWRKPVVLTTDDRKEVWQSKELHGRFYRVLHEPGVDFLASVSWLRFGDLFGETEGFVCAIMDEVILTNNYRRHIMKDGTVDVCRACHRPGESIRHIISGCSRLANGEYLHRHNQVARIIHQQLALKYKLADSEVPYYKYARPSSRK

SEQ ID NO: 29593 - protein, 1212 aa, Ptilodon capucinus
MTDAPRRNPRRQCRQRSAVRHYAQSTPPDQSPRSASPSPASIIRTSVTAVASSESDEYFSPPTSPPPVRRQRGRPPGHLGLLGQPAPNRVLVPSGVVRRMRWTSSMNENVMRAYYEATEGGTNLTAYRNRMLPLFQSLEPAVNVSAQRLSDQVRVIQRGNMLADTVLDRLRSEVQSRRVVPVASSQPAAQPVASATVTSRLAADSDVDRDNAPIDVSTQYNDLLRSTLEDVVREYRSMPNHLRPRIPRLPMHNGNRALVGALDSLLSIYFDSSDDLVDTHSILYCAAITVCRVARVKVFNTDTATRPKPAVPAWQCRIERRISEARALIGKLSCFREGNTRPRVMRFVKRAFAGTDVSPREYISRVTERIDFLKQKIYAWANRIRRYKARVDRYSQNSMFQRDQRWVYRSWERPNEPVSELQRPDDNAMTTFWRDIWSVPVTHYEGNWIGDVERMCEPIKEMEAISIGPLDVANAVRSLPNWKAPGPDGLHNFWLKWLRSSHVRLASQFQSALQSGSLPEFITTGVTHLLHKTGSTTDPKNYRPITCLPTIYKTLTSILRVKIARHVEDNSIMSASQNGCRSGSRGTKELLLIDMTICQQARRNRKDLSTCWIDYKKAYDSVPHTWLVRVLELYKIDTTLRTFLESCMRQWKTVLLCPGSRQILGNGEPIRIERGIFQGDSLSPLWFCLALNPLSALLEESGFGFRLRRGGQVISHLLYMDDLKLFAPTALQLSGLLKVTETFSNSIRMEFGVDKCAVMHAKQGRMVESEGIQLSDSIQLRSLAATETYKYLGMSQGLGISETDMKQLLRDRFLGRLKKVLKSLLSGGNKVRAYNGWVMPVLMYSFGILKWTQTELDTLDRTVRTTLTAYRMHHPRSSVMRLYIPRKCGGRGFLNVKTLHNREICSLREYFLRAVGEMHVDVVAVDNGLTPLSLAKENWRKPVVLTTDDRRVVWQGKELHGRYYRALHGPDVDLAASVAWLRFGDLFGETEGFVCAIMDEVVMTNNYRRYILRDGTIDICRACHRPGESLRHIISGCSRLANGQYLHRHNQVARIVHQQLALKYRLVTSEVPYYRYEPQPVLEEGHITLYWDRSIITDRTIVANKPDIVLIDRQERRAMIIDITVPHDENLVKAEKDKESKYLDLAHEVVDMWDIDAAIIVPIVVSAHGLLAKSLDKHLKRLALGSWIKGQIQKAVLLETARIVRKFLSLEP

SEQ ID NO: 29594 - protein, 969 aa, Ptilodon capucinus
MHKGNRAIMGALDSLLSIYFDSSDNLADTHSILYCAAITVCRVARVKVFNTDTATRPKPAVPAWQCRIERRISEARALIGKLSCFREGNTRPRVMRFVRRAFAGTDVSPREYISRVTERIDFLKQKIYAWANRIRRYKVRVDRYSQNSMFQRDQRWVYRSWERPNEPVSELQRPDDNAMTTFWRDIWSVPVTHYEGDWIGDVERMCEPIKEMEAISIGPLDVANAVRSLPNWKAPGPDGLHNFWLKWLRSSHVRLASQFQSALQSGSLPEFITTGVTHLLHISGSTTDPKNYRPITCLPTIYKTLTSILRAKIARHVEDNSIMSASQNGCRSGSRGTKELLLIDMTICEQARRNRKDLSTCWIDYKKAYDSVPHAWLVRVLELYKIDTTLRTFLESCMRQWKTVLLCPGSRQILGNGEPIRIERGIFQGDSLSPLWFCLALNPLSTLLEESGFGFRLRRGGQVISHLLYMDDLKLFAPTALQLTGLLKVTETFSNSIRMEFGVDKCAVMHAKQGRLVESEGIQLSDSIQLRSLAATETYKYLGMSQGLGISETDMKQLLRDRFLGRLKKVLKSLLSGRNKVRAYNGWVMPVLMYSFGILKWTQTELDTLDRTVRTTLTAYRMHHPRSSVMRLYIPRKCGGRGFLNVKTLHNREICSLREYFLRADGEMHADVVAVDNGLTPLSLAKENWRKPVVLTTDDRRLVWQGKELHGRYYRALHGPDVDLAASVAWLRFGDLFGETEGFVCAIMDEVVMTNNYRKYILRDGTIDICRACHRPGESLRHIISGCSRLANGQYLHRHNQVARIIHQQLALKYRLVTSEVPYYRYEPQPVLEEGHISLYWDRSIITDRTIVANKPDIVLIDRQERRAMIVDITVPHDENLVKAEKDKESKYLDLAHEVVDMWDIDAAIIVPIVVSAHGLLAKRRRPRQTPKEARVRRLDQGTDSEGGTSGDGAHCEEVPLSGALTTGN

SEQ ID NO: 29595 - protein, 1245 aa, Agrochola circellaris
MLTRSAAHRARLPPPDSPLSSASPPPVPSPIVSAASTPAAVVASSSSDEYFSPPTSPIPVRRQGRGRPPRSLGLRGQPAPSRVPAAGGCVQRMRWTQSMNENVMRAYYGSTEGGTNLTAYRVRMLSLFQELEPTANVSAQRLSDQVRVIQRNHRLDDAALDRLRSEVLSNHIVSTPAQTAAQASSIDAIPPRSNHGVAEEDDRAATVSSQCNVRLRSALEDAFREYRYTPTELRPRLPRLPMHKKNRALVCALDSQLRNYFENSEDLIDTHSILYCAAVAACRLANVKFPNCDGVTRPKPAVPAWQCRIEQRIDGARALIGKLYCFREGNTRPRVMRFVRRAFLGTGISPREYMPRVTERIDFLKQKVCAWASRIRRYKRRVERYTQNRMFQSDERWVYRAWERPEQNVADVCRPDDAATSAFWRSIWSVPVCHTEADWMRDVERVCETIPEMEKIEITPLDIARAVRPLPNWKSPGPDGLHNFWLKWLISSHTCLASQFQSSLESGSLPQFLTTGVTHLLHKSGSPAEPKNYRPITCLSTVYKLLTSILRAKINTHIDNNSIMSASQNGCRNGSRGTKELLLIDMAISQQVRRSRKDLSTCWIDYKKAYDSVPHTWLMRVLELYKIDATLRTFLMSCMGQWRTVLRYPGCRQTQGNDEPVWIKRGIFQGDSLSPLWFCLALNPLSTLLEDSGLGYRLRRGGQVISHLLYMDDLKLFAPNKLQLMELLKVTETFSSAIRMEFGVDKCAVMHVKRGEIMESEGTQLSESIHLRSLSSSESYKYLGMSEALGINVADMKQSLKERFFGRLKKVLISLLSGGNKVRAFNGWVMPVLMYSFGILKWTQTELDALDRRVRTLLTANRMHHPRSSVMRLYIPRKCGGRGFLNAKTLHNREVCNLREYFLKAEVGMHRDVVAVDKGLTPLSMAKENWHKPVVLTTDDRKEVWQSKELHGRFYRALHEPGVDFLASVSWLRFGDLFGETEGFVCAIMDEVILTNNYRRYIMKDGTVDVCRACHRPGESIRHIISGCCRLANGEYLHRHNQVARIIHQQLALKYKLVVSEVPYYKYVPDPVLENDHVTLYWDRSIITDRTIAANKPDIVVIDRLARRAMIVDVTIPHDGNLVKAEKEKQIKYLDLAQRGCRHVECELGYHCADCRNSQWPDGRKPRPTSLEALVRRLDQGPDPEGSTPRYGSHSEEVPVSAALTTGSLDPAPDTGGTLFFIFLNVFYILFKKYLKMYFICPILK

SEQ ID NO: 29596 - protein, 1111 aa, Mesoligia furuncula
MLTRSAARRAHLPPPDSSLSPAPPPPEPSPIESAVTPAVAVASSSSDEYFSPPTSPTPVRRQGRGRPPNSLGLRGHAAPSRVPATGGCVQRMRWTQSMNENVMRAYYGSTEGGINLTAYRDRMLSLFQELEPTVNVSAQRLSDQVRVIQRNHRLDDIALDRLRSEVLSNHIVSTSAQTAAQVSTVDAIPPRFNRVEEEDDRVDTVSSQCNVRLRSALEDALREYRSTPTELRPRLPRLPMHKKNRALVCALDSQLKNFFESSEDLVDTHSILYCAAVAACRLANVKFSSCDGATRPKPAVPAWQRRIERRIDGARVLIGKLYCFREGNTRPRVMRFVRRAFSGTGISPREYLSRVTERIDFLKQKVCAWASRIRRYKRRVDRYTQNRMFQSDERWVYRAWERPEQNVTDVCRPDDAATSAFWCSIWSVPVSHTEAGWMQDVERVCESVPEMEKVLITPSDVARAVRPLSNWKSPGPDGLHNFWLKWLISSHTCLASQFQSSLESGSLPQFLTTGVTHLLHKSGSPAEPKNYRPITCLSTVYKLLTSILRAKINKHIESNSIMSASQNGCRNGSRGTKELLLIDMAISQQVRRSRKDLSTCWIDYKKAYDSVPHTWLMRVLELYKIDATLRTFLESCMGQWKTVLRYPGCRQIQGNDEPVWIKRGIFQGDSLSPLWFCLALNPLSTLLEDSGLGYRLRRGGQVISHLLYMDDLKLFAPNKLRLMELLKVTKTFSSAIKMEFGVDKCAVMHVKRGEIMESEGIQLSDSINLRSLSSSESYKYLGMSEALGINDADMKQSLKERFFCRLKKVLISLLSGGNKVRAFNGWVMPVLMYSFGILKWTQTELDALDRRVRTLLTANRMHHPRSSVMRLYIPRKCGGRGFLNAKTLHNREVCSLREYFLKAEVGMHRDVVAVDKGLTPLSMAKENWRKPVVLSTDDRKRVWQSKELHGRFYRALHEPGVDFIASVSWLRFGDLFGETEGFVCAIMDEVILTNNYRRHIMKDGTVDVCRACHRPGESIRHIISGCSRLANGEYLHRHNQVARIIHQQLALKYKLVDSEVPYYKYVPDPGGLLPKHEVRRFGLRYGRFLLPMTNGRMIRSGSERRMNYNAI

SEQ ID NO: 29597 - protein, 1108 aa, Mesoligia furuncula
MLTRLAARRARLLPPDSSLSSASPPPVPSPTVSAVMTPAAAVASSSSDEYFSPPTTPPPARRRRGRRPPDGLGLRGPPASDRVPALGGSVQRMRWTQSINENVMRSYYGATEGGNILTAYRVRMLSLFQVLEPAVNVSAQRLSDQVRVIQRNHMLDDTVLDRLRSEMQSSHVIAPQSQTAAILPQPNISHTDEGSNDRAINVSTQCNEELRSALEDAIQEYRFMSPELRPRLPRLPMHNKNRALVAVLDSQLSKYFDTCEDLIDTHSILYCAAVAACRVAHVKFANDSRATRPKQAVPAWQCRIERRIGGARTLIGKLICFREGNTRPRVMRFVRRAFSGTDISPQDYMSCVTERIDFLKQKVYAWANRIRRYRRRVERYTQNRTFQSDERWVYRGWERPDQGVAETCLPDDDAMCSFWRSIWSVPVSHTEGDWAREVERACDPIPEMGAITICPQDVARAVRPLPNWKSPGPDGLQNFWIKWFPRSHARLASQFQTALESGSLPQFLTTGITHLLHKSGSTAEPKNYRPITCLPTVYKVLTSILRTKINKHIDTNSIMSASQNGSRNGSRGTKELLLIDMAISQQVRRFRKDLSTCWIDYKKAYDSVPHTWLMRVLELYKVDTTLRTFLMSCMGQWRTVLRYPGCRNIQRNSEPIRIERGIFQGDSLNPLWFCLALNPLSTLLEDSGLGYRLRRGGQVISHLLYMDDLKLFAPNTLQLMELLKITETFSSAIRMEFGVDKCAVMHVKRGEIVESVGTQLLDSTNLRALSASETYKYLGMSEALGINVTDMKQSVKERFFGRLKKVLNSLLSGGNKVRAFNGWVMPVLMYSFGILKWTQTELDALDRRVRTLLTANRMHHPRSSVMRLYIPRKCGGRGFLNAKTLHNREICSLREYFLETDVGMHPDVVIVDKGLTPLSLAKENWRKPVVLDTNDRMEVWQSKELHGRFLRALRGPDVDLQASVAWLRFGNLFGETEGFVCAIMDEVMMTNNYRRFIVKDGTVDICRACHRPGESIRHIISGCSRLANGEYLHRHNLVARIIHQQLALKYNLVESEVPYYRYVPDPVLENGNITLYWDRSIITDRTIGDLVDPGHSGLLKAYLQNKSY

SEQ ID NO: 29598 - protein, 1126 aa, Ortholexis melichroptera
MLTRAKRLQARPPPSGSSLSSASQPPPPASSVSVVTPAAAVASSESDEYFSPPTSPTPVRRRGRGRPLRNLGPRGPPASNRVPVPGGSVLRMKWTQTINENVMRAYFGATEGGSNLTAYRSRMLALFQTLEPTVNVSAQRLSDQVRVIQRDRRLDDAALDRLRSEMQSNRVAPSFVTQNSTVDLTNREVPAVPLGLNLIDEEMDNMATDVSTQYNHQLRSALEDALLEYRSIPPNDRPSIPRLPMHKKNRMLMGALDSILLDYFKCSKDLLDTHSILYCAAVAACRVAHVRFPNADRATRPKSTVPAWQCRIERRIDETRVLIGKLISFKEGNTRPRVMRFVKRAFLGTEVRPQEYPRRITERIDFYKQKLYAWANRIRRYKKRVDRYSQNRMFRNDERWVYRAWERPNQVVDNGCLPNTEAINTFWRSIWSVPVIHEEKDWIRDVELGCESILDMDTISIRPQDVVDAVRSIPNWKSPGADGLQNFWLKWFRSSHTCLASQFQSSLENGSLPLFLTTGITHLIHKSGSTTDPKNYRPITCLPTVYKLLTSILRVKILDHIDKNFIMSTSQNGCRNGSRGTKELLLIDMTISQQVRRSRKNLSTCWIDYRKAYDSVPHTWLMRVLELYKVNTTLRIFLMSCMRQWRTVLHYPGCWQIQGNGEPIRIKRGIFQGDSLSPLWFCLALNPLSTLLENSGLGYRLRRGGLIISHLLYMDDLKLIAPNNLQLLELLKTTETFSKSIRMDFGVDKCAVMHVKRGRIVESEGIQLSDSILIRSLSPTETYKYLGMSEALGINETDMKQSLKERFFGRLRKVLKSLLSGGNKVRAFNGWVMPVLMYSFGILRWNQTELDALDRQVRSLLTAYRMHHPRSSMMRLYISRRCGGRGFLNAKTLHNREVCNLREYFLHTEAAMHRDVVAVDKGLTPLSLAKENWRKPVVLSSNDRMDVWQGKELHGRYYRALHGPDVDFPASVAWLRFGDLFGETEGFVCAIMDEVMMTNNYRKYIVKDGTADICRACHRPGESIRHIISGCSHLANGEYLHRHNQVARIIHQQLALRYNLVGLKVPYYKYVPDPVLENGNVTLYWDRSIITDRTILANKPDIVIIDRVERRALIVDITVPHDENLV

SEQ ID NO: 29599 - protein, 962 aa, Noctua janthe
MHKKNKALVCALDSQLSNCFDSSKDLADTHSILYCGAVAACRVAHVNFPNNDRATRPKFAVPAWQCRIERRIGKARALIGKLICFREGNTRPRVLRFVKRAFSGTDVSFRDYLARVTERIDFLKQKICAWASRIRRYKRRVERYTQNRTFRSDERWVYRAWERPDQGVTDTRLPDDDAMCSFWRNIWSVPVSHTEGDWTREVERACDSIPEMGAIIISPQDVARAVRPLPNWKSPGPDGLHNFWIKWFQRSHVRLASQFQSALESGSLPQFLTTGITHLLHKSGSTAEPKNYRPITCLPTVYKVLTSILRAKINHHIDSNSIMSASQNGCRNGSRGTKELLLIDMAISQQVRRSRRDLSTCWIDYKKAYDSVPHTWLMRVLELYKVDATLRTFLMSCMGHWRTVLRYPGCRQIQGNSEPIKIERGIFQGDSLSPLWFCLALNPLSTLLEGSGLGYRLRRGGQVISHLLYMDDLKLFAPNNLQLMKLLKVTETFSSAIRMEFGVDKCAVMHVKRGEIMESVGTQLSDSIHLRSLSSTETYKYLVMSEALGINTADMKQSLRDRFFGRLNKVLSSLLSGGNKVRAFNGWVMPVLMYSFGILKWTQTELDALDRRVRALLTANRMHHPRSSVMRLYIPRKCGGRGFLNTKTLHNREICSLREYFLEVDEGMHRDVVSVDKGLTPLSLANENWRKPRVLDTNDRKEVWQGKELHGRFYRALHGPDVDFLASVSWLRFGDLFGETEGFVCAIMDEVMMTNNYRKYIVKDGTVDICRACHRPGESIRHIISGCSRLANGEYLHRHNLVARIIHQQLALKYNFVESEVPYYKYAPDPVLDNGNITLYWDRSIITDRTIVANKPDIVVIDRLERRAMIVDITVPHDENLVKAEKDKQFKYLDLAREVVDMWDVSTAVIVPIVVSANGLIANSLDKHLRRLLLGSWIKGLIQKAVLLDTARIVRRFLSQEP

SEQ ID NO: 29600 - protein, 1200 aa, Mythimna ferrago
MLTRAAAQRARLPSPDSLLSSASPPPDPGSSVSPAAAVASSSSDEYFSPPTSPTPVRRPGRGRPPNGLGFRGQPAPSRVPAAGGCVQRMKWTQSMNENVMRAYYGSTEGGTNLTAYRVRMLSLFQDLEPTVNVSAQRLSDQVRVIQRNHRLDDAALDRLRSQVLSNPIVSTPQQIQTAGPSTSVTTTPRYVHVEDEADDRVDRVSSQCNDRLRSALEDALREYRSTPTELRPRLPRLPMHKKNRALVCALDSLLKNVFESSDSLLDTHSILYCGAVAACRLANVKFPCYGVATRPTPAAPAWQCTIERRIDEARALIGKLYCFREGNTRPRVMRFVRRAFSGTEIGPREYMSRVTERIDFLKQKVCAWANRIRRYKRRVDRYSQNRMFQSDERWVYRAWERPGQNVTDGFRPDSVATNTFWRSIWSEPVCHNEGGWMRDVERVCEAIPEMDKVFITPLDVARAVRPLPNWKSPGPDGLQNFWLKWYSSSHVILASQFQSSLESGSLPQILTTGTTHLLHKTGSTADPKNYRPITCWSTVYKLLTSILRVKITLHIEKNSIMFASQNGCRNGSRGTKELLLIDMAISQQVRRSRKDLSTCWVDYKKAYDSVPHTWLTKVLELYKIDATLRTFLESCMRQWKTVLRYPGCRPIQRNDEPIWIKRGIFQGDSLSPLWFCLALNPLSTLLEDSGLGYRLRRGGQILSHLLYMDDLKLFAHNNSQLMELLKVTETFSSAIRMEFGVDKCAVMHVRRGEIVESEGIQFSDSIHLRSLSSTETYKYLGTSEALGINVADMKQTLKERFFGRLKKVLNSLLSGGNKVRAFNGWVMPVLMYSFGILKWTQTELDALDRRVRTLLTANRMHHPRSSVMRLYIPRKCGGRGFLNAKTLHNREVCSLREYFLKTDVGMHRDVVAVDKGLTPLSMAKENWRKPVVLTTDDRKEVWKGKELHGRFFRALHEPDVDFSASVAWLRFSNLFGETEGFVCAIMDEVILTNNYRRHIMKDGTVDVCRACHLPGESIRHIISGCSRLANGEYLHRHNQVARILHQQLALKYNLVDSEVPYYRYVPDPVLENDHVTLYWDRSIITDRTIVANKPDIVVIDRLARRAMIVDVTIPHDENLVKAEKEKQIKYLDLAHEVVDMWNVDSAIIVPIVVTANGLIAKSFDNHLSKLSLHGWIKGLIQKAVLLDTARIVRRFLSLEP

SEQ ID NO: 29601 - protein, 1200 aa, Mythimna ferrago
MLTRSRARRLETHPTTSGSSLNSASQPPGPAPAVSPVIPEAAVASSSSDEYFSPPTTPPPARRRGRGRPPASLGPRGPPASDRVPAVGGSVQRMRWTSSINENVMRSYFGATEGGINLTAYRGRMLSLFQVLEPAVNVSVQRLSDQVRVIQRNRMLDDAVLDRLRLESQSSRVLAATPSAAAQRQPSAAPRPDHVGDADDDAAISVSTQCNERLRGALEDAFREYRSIPPELRPRLPRLPMHKRNRALVCALDSQLSICFDSSEDLADTHSILYCAAVAACRVAHVKFPNCNRATRPAVPAWQCRIERRIGEARALIGKLICFREGNTRPRVMRFVRRAFSGTDISPRDYLPCVTERIDFLKQKIYAWANRIRRYKRRVERYTQNRTFQSNERWVYRAWERPDQGVTDARLPDDDAMCSFWRSIWSAPVSHTEGDWIREVERACDLLPEMGAITISPQDVARAVRPLPNWKSPGPDGLHNFWLKWFQGSHARLASQFQSALESGSLPQFLTTGITHLLHKSGSTAEPKNYRPITCLPTVYKVLTSILKAKINSHIETNSIMSVSQNGCRSGSRGTKELLLIDIAISQQVRRSRKNLSACWIDYKKAYDSVPHTWLMRVLELYKVDATLRTFLMSCMGQWRTVLHYPGCRPIWENSEPIRIERGIFQGDSLSPLWFCLALNPLSTLLEGSGLGYRLKRGGQVISHLLYMDDLKLFAPNNLQLMELLKVTETFSSAIRMDFGVDKCAVIHVKRGEIMESEGIQLSDSIHLRSLSSTETYKYLGMSEALGINTDDVKQSLKERFFGRLNKVLNSLLSGGNKVRAFNGWVMPVLMYSFGILKWTQTELDALDRRVRTLLTANRMHHPRSSVMRLYIPRKCGGRGFLNAKSLHNREVCSLREYLLAVDVGMHRDVVAVDKGLTPLSLANENWRKPLVLDTNDRREVWQGKELHGRFYRALHGPDVDLLASVSWLRFGDLFGETEGFVFAIMDEVMMTNNYRKYIVKDGTVDICRACHRPGESIRHIISGCSRLANGDYLHRHNLVARIIHQQLALKYNLVESEVPYYRYVPDPVLDNGSITLYWDRSIITDRTIVANKPDIVVIDRLERRTMIVDIAVPHDENLVKAEKDKQIKYLDLAREVVDMWEVDRAIIVPIVVTANGLIAKSLEQHLRRLSLGSWIKGLIQKAVLLDTARIVRRFLSQEP

SEQ ID NO: 29602 - protein, 1203 aa, Agrochola circellaris
MLTRSAAHRARLPPPDSPLSSASPPPVPSPIVSAASTPAAVVASSSSDEYFSPPTSPIPVRRQGRGRPPRSLGLRGQPAPRRVPAAGGCVQRMRWTQSMNENVMRAYYGSTEGGTNLTAYRVRMLSLFQELEPTANVSAQRLSDQVRVIQRNHRLDDAALDRLRSEVLSNHIVSTPAQTAAQASSIDAIPPRSNHGVAEEDDRAATVSSQCNVRLRSALEDAFREYRYTPTELRPRLPRLPMHKKNRALVCALDSQLRNYFENSEDLIDTHSILYCAAVAACRLANVKFPNYDGVTRPKPAVPAWQCRIEQRIDGARALIGKLYCFREGNTRPRVMRFVRRAFLGTGISPREYMPRVTERIDFLKQKVCAWASRIRRYKRRVERYTQNRMFQSDERWVYRAWERPEQNVADVCRPDDTATSAFWRSIWSVPVCHTEADWMRDVERVCETIPEMEKIEITPLDIARAVRPLPNWKSPGPDGLHNFWLKWLISSHTCLASQFQSSLESGSLPQFLTTGVTHLLHKSGSPAEPKNYRPITCLSTVYKLLTSILRAKINTHIDNNSIMSASQNGCRNGSRGTKELLLIDMAISQQVRRSRKDLSTCWIDYKKAYDSVPHTWLMRVLELYKIDATLRTFLMSCMGQWRTVLRYPGCRQIQGNDEPVWIKRGIFQGDSLSPLWFCLALNPLSTLLEDSGLGYRLRRGGQVISHLLYMDDLKLFAPNNLRLMELLKVTETFSSAIRMEFGVDKCAVMHVKRGEIMESEGTQLSESIHLRSLSSSESYKYLGMSEALGINVADMKQSLKERFFGRLKKVLISLLSGGNKVRAFNGWVMPVLMYSFGILKWTQTELDALDRRVRTLLTANRMHHPRSSVMRLYIPRKCGGRGFLNAKTLHNREVCNLREYFLKAEVGMHRDVVAVDKGLTPLSMAKENWHKPVVLTTDDRKEVWQSKELHGRFYRALHEPGVDFLASVSWLRFGDLFGETEGFVCAIMDEVILTNNYRRYIMKDGTVDVCRACHRPGESIRHIISGCCRLANGEYLHRHNQVARIIHQQLALKYKLVVSEVPYYKYVPDPVLENDHVTLYWDRSIITDRTIAANKPDIVVIDRLARRAMIVDVTIPHDGNLVKAEKEKQIKYLDLAHEVVDMWNVSSAIIVPIVVTANGLMAESLDQHLSRLSLGGWIKGLIQKAVLLDTARIVRRFLSLQP

SEQ ID NO: 29603 - protein, 1200 aa, Amphipyra tragopoginis
MLTRSKARARDAHPPPPDSSPSSASQQQGLDPASPAAAVASSSSDEYYSPPSSPPPARRRGGTRPPGGLGLRGPLASDRVPAPGGIVPRMKWTQKMNESVMRAYYGATEGGTNLTAYRSRMLSLFQVLEPAVNVSAQRLSDQVRVIQRGHMLDDTVLDRLRSEVQSSPVISPSSQVLEQQQNLAAALPRPNRADEEDDDRVANVSTQCNDELRSALEDAMREYRYTRSDLRPRIPRLPMHRKNRALVCALDSLLSNYFDGSEDLGDTHSILYCAAVAACRVAHVKFTDNERATRPKNAVPAWQCRIERRISEARALIGKLVCFREGNTRPRVMRFVRRAFSGTDVSPREYMSRVTERIDFLKQKVYAWANRIRRYRRRVDRYTQNRLFQSDERWVYRTWERPDQRVSDTRLPDNDVMNTFWRNIWSVPVAHTEGDWMQEVQRACEPIQEMGDIIISPQDVASAVRPMSNWKSPGPDGLHNFWLKWLRSSHARLASQFQSSLESGSLPQFLTTGVTHLLHKSGSTAEPKNYRPITCLPTVYKVLTSILRTKINNHIDNNSIMSASQNGCRNGSRGTKELLLIDMAISQQVRRSRKDLSTCWIDYKKAYDSVPHTWLMRVLELYKVNTTLCAFLTSCMGQWRTVLRYPGCRQIQGIGEPIRIERGIFQGDSLSPLWFCLALNPLSTLLEGSGLGYRLRRGGQVISHLLYMDDLKLFAPNNLRLLELLKVTETFSNSIRMEFGVDKCAVMHVKRGRIMESVGTQLSDSIQLRSLSSTETYKYLGMSEALGVNETDMKQSLKERFFGRLEKVFNSLLSGGNKVRAFNGWVMPVLMYSFGILKWTQTELDALDRRVRSLLTANRMHHPRSSVMRLYIPRKCGGRGFLNAKTLHNREVCSLREYFSQADVGMHRDVVAVDKGFTPLSLAKENWRKPVVLDTNGRREVWRSKELHGRFYRALHGPDVDFLASVAWLRFGDLFGETEGFVCAIMDEVMMTNNYRKYIVKDGTVDICRACHCPGESIRHIVSGCSRLANGEYLHRHNLVARIIHQQLALKYNLVDAEVPYYKYVPDPVLENGHVTLYWDRSIITDRTIVANKPDIVVIDRSERLTMIVDITVPHDENLVKAEKDKEIKYQDLAHEVVAMWDVDSAIVVPIVVTANGLIAKSLDQHLKRLSLGSWIKGLIQRAVLLDTARIVRKFLSLRP

SEQ ID NO: 29604 - protein, 1110 aa, Amphipyra tragopoginis
MKWTQKINENVMRAYYGSTEGGTNLTAYRVRMLTLFQELEPAINVSAQRLSDQVRVIQRNHRLDDAALDRLRLEVQNSHVTPVPSQTAVHQLNISVVPPRSDCVDGDVDDRAVTVSSQYNDQLRSALEDAIREYRANPELRPRLPRLPMHNKNRALVCALDSLLSSYFESSEDLCDTHSILYCAAVAACRVANVKFNNSERATRPKPAVPVWQCRIERRIDEARALIGKLICFREGNTRPRVMRFVRRAFSGTGIRPQEYISRVTERIDFLKQKVYAWASRIRRYKRRVERYTLNRMFQCDQRWVYRAWERPDQGVNDGRLPDDDAMNSFWRSIWSVPVIHTEGDWTRDIERACEPIEEMGEILISPQDVASAVRPLPNWKSPGPDGLHNFWIKWLRSSHARLASQFQSSLESGSLPQFFTTGVTHLLHKSGSTAEPKNYRPITCLPTVYKLLTSILRTKINTHVENNSIMSPSQNGCRNGSRGTKELLLIDMAISQQVRRSRKNLSTCWIDYKKAYDSVPHTWLMRVLELYKINATLRTFLMSCMGQWRTVLRYPGCRTIRGSDEPISIERGIFQGDSLSPLWFCLALNPLSTLLEGSRLGYPLRRGGQVVSHLLYMDDLKLFAPTKLQLVELLKVTETFSNSIRMEFGVDKCAVMHVRRGGIMESEGLQLSDSIHLRSLSANDTYKYLGMSEGLGISEADMKQSLKERFFGRLKKVLKSLLSGGNKVRAFNGWVMPVLMYSFGILKWTQTELDALDRRVRTLLTANRMHHPRSSVMRLYIPRKCGGRGLLNAKTLHNREVCSLREYFLHADAGMHRGVVAVDKGLTPLNLAKENWRKPVVLSTNDRREVWQSKELHGRFYRALHGPDVDFLASVSWLRFGDLFGETEGFVCAIMDEVIMTNNYRKYIVKDGTVDICRACHCPGESLRHIISGCSRLANGEYLHRHNQVARIIHQQLALKYNLVESEVPYYKYVPDPVLENGHITLYWDRSIITDRTIVANKPDIVVIDRSERRTMIVDVTIPHDENLVKAEKDKQIKYLDLAHEVVNMWDVDSATIVPIVVTANGLMAKSLDQHLKRLSLGGWIKGLIQKAVLLDTARIVRRFLSLEP

SEQ ID NO: 29605 - protein, 1110 aa, Amphipyra tragopoginis
MRWTQSINENVMRAYYGATEGGINLAAYRDRMLSLFQVLEPAINVSTQRLSDQVRVIQRNRRLDDTVLERLRSEVQNNRAVTPPVQAAVQAQLPAVPPCPSQGDGEGDGEVIEVSSQCSDELRSALEGAILEYRATPPELRPRLPRLPMHKKNRALVCALDSLLSSYFDGSEDLADTHSILYCAAIAACRVAHVKFTDNERATRPKPAVPAWQYRIERRIGGARALIGKLICFREGNTRPRVMRFVRRAFSGTDISPRDYMSRITERIDFLKQKIYAWANRIRRYKRRVERYTLNRTFQSDQRRVYRAWERPDTCGSDVRLPDDDAMSSFWRSIWSVPVAHTEGGWMRDIERACEPILEMGAIIISPQDVAGAVRPLPNWKSPGPDGLHNFWLKWLRSSHACLASQFQSSLESGSLPQFLTTGATHLLYKSGGTAEPKNYRPITCLPTVYKLLTSILRVKISNHIDSNSILSPSQNGCRSGSRGTKELLLIDMAISQQVRRSRKDLSTCWIDYKKAYDSVPHTWLMRVLELYKINTTLRTFLMSCMRQWRTVLRYPGCREIRGRGEPIRIERGIFQGDSLSPLWFCLALNPLSTLLEGTRQGYRLRGEGQVISHLLYMDDLKLFAPTDLRLMELLKVTENFSSSIRMEFGVDKCAVMHVKRGGIVESEGIQLSNSIQLRSLSPTETYKYLGMSEALGISEADMRQSLRERFFGRLNKVLRSLLSGGNKVRAFNGWVMPVLMYSFGILKWTQTDLDALDRRVRALLTVHRMHHPRSSVMRLYIPRKCGVRGFLNAKTLHNREVCSLREYFLQAEGEMHRDVVAVDKGLTPLALAKENWRKPAVLSTNDREEVWQSKELHGRFYRALHGPEVDFPASVSWLRFGDLFGETEGFVCAIMDEVMMTNNYRKYIVKDGTVDICRACHRPGESIRHIISGCSRLANGEYLHRHNLVARIIHQQLALKYNLVESEVPYYRYVPDPVLENGHVTLYWDRSIITDRTIVANKPDIVVIDRSERRTVIVDITVPHDENLVKAEKDKQIKYLDLAHEVVGMWDVDSAVIVPIVVTANGLIAKSLDQHLKRLSLGGWIKGLIQKAVLLDTARIVRRFLSLEP

SEQ ID NO: 29606 - protein, 1200 aa, Amphipyra tragopoginis
MLTRSKARARDAHPPPPDSSPSSASQQQGLDPASPAAAVASSSSDEYYSPPSSPPPARRRGGTRLPGGLGLRGPLASDRVPAPGGIVPRMKWTQKMNESVMRAYYGATEGGTNLTAYRSRMLSLFQVLEPAVNVSAQRLSDQVRVIQRGHMLDDTVLDRLRSEVQSSPVISPSSQVLEQQQNLAAALPRPNRADEEDDDRVANVSTQCNDELRSALEDAMREYRYTRSDLRPRIPRLPMHRKNRALVCALDSLLSNYFDGSEDLGDTHSILYCAAVAACRVAHVKFTDNERATRPKNAVPAWQCRIERRISEARALIGKLVCFREGNTRPRVMRFVRRAFSGTDVSPREYMSRVTERIDFLKQKVYAWANRIRRYRRRVDRYTQNRLFQSDERWVYRTWERPDQRVSDTRLPDNDVMNTFWRNIWSVPVAHTEGDWMQEVQRACEPIQEMGDIIISPQDVASAVRPMSNWKSPGPDGLHNFWLKWLRSSHARLASQFQSSLESGSLPQFLTTGVTHLLHKSGSTAEPKNYRPITCLPTVYKVLTSILRTKINNHIDNNSIMSASQNGCRNGSRGTKELLLIDMAISQQVRRSRKDLSTCWIDYKKAYDSVPHTWLMRVLELYKVNTTLCAFLTSCMGQWRTVLRYPGCRQIQGIGEPIRIERGIFQGDSLSPLWFCLALNPLSTLLEGSGLGYRLRRGGQVISHLLYMDDLKLFAPNNLRLLELLKVTETFSNSIRMEFGVDKCAVMHVKRGRIMESVGTQLSDSIQLRSLSSTETYKYLGMSEALGVNETDMKQSLKERFFGRLKKVFNSLLSGGNKVRAFNGWVMPVLMYSFGILKWTQTELDALDRRVRSLLTANRMHHPRSLVMRLYIPRKCGGRGFLNAKTLHNREVCSLREYFSQADVGMHRDVVAVDKGFTPLSLAKENWRKPVVLDTNGRREVWRSKELHGRFYRALHGPDVDFLASVAWLRFGDLFGETEGFVCAIMDEVMMTNNYRKYIVKDGTVDICRACHCPGESIRHIVSGCSRLANGEYLHRHNLVARIIHQQLALKYNLVDAEVPYYKYVPDPVLENGHVTLYWDRSIITDRTIVANKPDIVVIDRSERLTMIVDITVPHDENLVKAEKDKEIKYQDLAHEVVAMWDVDSAIIVPIVVTANGLIAKSLDQHLKRLSLGSWIKGLIQKAVLLDTARIVRKFLSLRP

SEQ ID NO: 29607 - protein, 868 aa, Amphipyra tragopoginis
MRFVRRAFSGTGISPREYMSQVTERIDFLKQKVCAWASRIHRYKRRVERYTQNRMFQCDQRWVYRAWERPDQGVSDGRLPDDDAMSSFWRSIWSVPVTHTEGDWTRDIERACEPIEEMGEILISSQDVASAARPLPNWKSAGPDGLHNFWIKWLRSSHARLASQFQSSLESGSLPQFLTTGVTHLLHKSGSTAEPKNYRPITCLPTVYKLLTSILRTKINTHVENHSIMSPSQNGCRNGSRGTKELLLIDMAISQQVRRSRKNLSTCWIDYKKAYDSVPHTWLMRVLELYKINTTLRTFLTSCMRQWRTVLRYPGCRTILGSGEPISIERGIFQGDSLSPLWFCLALNPLSTLLEGSGLGYLLRRGGQVVSHLLYMDDLKLFAPTKLQLVELLKVTETFSNSIRMEFGVDKCAVMHVRRGGIMESEGLQLSDSIHLRSLSANDTYKYLGMSEGLGISEADMKQSLRERFFGRLKKVLKSLLSGGNKVRAFNGWVMPVLMYSFGILKWTQTELDALDRRVRTLLTANRMHHPRSSVMRLYIPRKCGGRGLLNAKTLHNREVCSLREYFLHADAGMHRDVVAVDKGLTPLSLAKENWRKPVVLSTNDRREVWQSRELHGRFYRALHGPDVDFLASVSWLRFGDLFGETEGFVCAIMDEVIMTNNYRKYIVKDGTVDICRACHCPGESLWHIISGCSRLANGEYLHRHNQVARIIHQQLALKYNLVESEVPYYKYVPDPVLENGHITLYWDRSIITDRTIVANKPDIVVIDRSERRTMIVDVTIPHDENLVKAEKDKQIKYLDLAHEVVNMWDVDSATIVPIVVTTNGLMAKSLNQHLKRLSLGGWIKGLIQKAVLLDTARIVRRFLSLEP

SEQ ID NO: 29608 - protein, 1194 aa, Autographa pulchrina
MLTRSRKRKPARPPSPDSSPSSASQLPDHVQAPAPAVASSSSDEYYSPPTSPTPVRRQGRRRPPSSLAPAGQPASNRAPAPGGDVRRMKWTQGINENVMRAYYGATEGGTNLTAYRARMLSLFQVLEPGVSVSAQRLSDQVRVIQRNHRLDDSTLDRLRSEIQSSPATNTLPPAAAPVSGAPHTAPSDGEEDDGAMTVSTQCSELIRSTLEDAIRDYRTSPPDQRPRLPRLPMHNRNKAIMGALDSLLPIYFESSEDLRDTHSILYCAALTACRVANVAICYSNIAARPKPAVPAWQCRIEQRVAEARTLIAKLIAFKQGNSRPRVMRFVRRAFAGTDISSSEYTARVTERIDLFKQKVCAWASRIRRYKRRVERFYLNRMFQKDQRWVYRAWERPASGVDGGCLPDGDATNSFWRCIWSVPVSHSEGGWMREVEQVCEPIQEMGAITISPQDVANAVRPMANWKTPGPDGLQNFWLKWLRSSHGCLASQFQSAVESASLPQFLTTGSTHLLHKTGSATDPKNYRPITCLPTVYKLLTSILRAKINEHVVSFSIMSASQNGCRSGSRGTKELLLIDTAICQQVRRSKKDLSTCWIDYKKSYDSVPHTWLMRVLELYKINATLRAFLVSCMGQWSTVLHYPGCRDIQQGGEPIRIERGIFQGDSLSPLWFCLALNPLSTLLENSRLGYSLRRGSQVISHLLYMDDLKLFANSGLQLMKLLKITESFSNSIRMEFGVDKCAVMHVKRGGVAESQGIQLSDSINLRSLSATETYKYLGMSEALGINAADVKQSLQARFFGRLNKVLKSVLSGGNKVRAFNGWVMPVLMYSFGVLKWTQTELDALDRRVRTLLTANRMHHPRSSVMRLYIPRKCGGRGFLNAKTLHNREVCNLREYFLQVDVGMHQDVVVVDKGLTPLSLGKENWHKPVVLSVKDREVVWQSKELHGRYYRTLHGSDVDFLASVAWLRFGDLFGETEGFVCAIMDEVIMTNNYRKYIIKDGTVDICRACHCLGESLRHIISGCSRLANGEYLHRHNQVARIIHQQLALRYKLVESEVPYYRYVPDPVLENGRVTLYWDRSIITDRTIVANKPDIVVIDRSERRAIIVDITIPHDENLVKAEKEKQLKYLDLAHEVVDMWEVDSAIIVPIVVTANGIIAKSLDQHLKRLSLGAWVKGLMQKAVLLDTARIVRRFLSLKP

SEQ ID NO: 29609 - protein, 1132 aa, Mythimna impura
MLTRAAARRARHPPPGSPLSSASPPPDLESPVSPAAAVASSSSDEYFSPPTSPTPVRRPGRGRPPRSLGSRGQPAPSRVPAAGGCVQRMRWTQSMNENVMRAYYGSTEGGTNLTAYRVRMLSLFQELEPTVNVTTQRLSDQVRVIQRNHRLDDAALDRLRSEVLSNRIISTPIQTQTAAPRATDAILPQSNHVDDEADDRVVTVSSQCNDRLRSALEDALREYRSTPIDLRPRLPRLPMHKKNRALVCALDSLLENVFESSVNLADTHSILYCGAIAACCLANVKLPSCDGATRPKSVAPAWQCRIEKRIDGARALIGKLYCFREGNTRPRVMRYVRRAFSGTGISPPEYLSRVTERIDFLKQKVCAWANRIRRYKRRVDRYSQNRMFQSDERWVYRAWERPEQNVTDVTRPDAVATNAFWRNIWSVPVCHTEDGWMREVERVCEAIPEMEKVIISPTDVARAVRPLPNWKSPGPDGLQNFWLKWYSSSHALLASQFQSSLESGSLPQFLTTGVTHLLHKTGSTAEPKNYRPITCLSTVYKLLTSILRTKINQHIDNNSIMSASQNGCRNGSRGTKELLLIDMTISQQVRRSRKDLSTCWIDYKKAYDSVPHTWLMRVLELYKIDATLRTFLESCMGQWNTVLRYPGCRSIRRDDEPIWIKRGIFQGDSLSPLWFCLALNPLSTLLEESGLGYRLRRDGQVLSHLLYMDDLKLIAPNKLRLMELLKVTETFSNAIRMEFGVDKCAVMYVKRGEIMESEGIQLSDSIHLRSLSSTETYKYLGMSEALGINVADMKQSLKERFFSRLKKVLNSLLSGGNKVRAFNGWVMPVLMYSFGILKWTQTELDALDRRVRTLLTANRMHHPRSSVMRLYIPRKCGGRGFLNTKTLHNREVCSLREYFHKTDVGMHRDVVAVDKGLTPLSMAKENWRKPVVLTTDDRKEVWKSKELHGRFYRALHESDVDFAASVAWLRFSNLFGETEGFICAIMDEVILTNNYRRYIMKDGTIDVCRACHRPGESIRHIISGCSRLANGEYLHRHNQVARIIHQQLALKYNLVYSEVPYYRYVPDPVLENDHVTLYWDRSIITDRTIVANKPDIVVIDRLARRVMIVDVTIPHDENLVKAEKEKQIKYLD

SEQ ID NO: 29610 - protein, 1190 aa, Limenitis camilla
MLTRARAKNVRSPTSPGSSDNSTSQVPEHTEEVVAVVSSSSDEYFSPPTSPLPVRRPGRGRPPRSLGPRGQPASRQVPAIDGYVQRMKWTQCINENVMRAYYGSTEGGTNLTAYRDRMLSLFQKLEPSINVSAQRLSDQVRIILRNHRLNDTVLERIRSEVHDSRVIPSSIQATLPGPSPPSPNQRDEEEDDTTITAGKKYDELLRSALEDAIREYRYTSDEIRPRLPRLPMHKKNRALVCTLDSLLPMYFESSEDLKDTHSILFCAAVAVCRVAHVKLVNTETTRPKPDVAAWQSRIERRIDETRVLIGKLYSFREGNTRPRVMRFVRRAFSGTEICPPEYMARVTERIDTLKQKIYAWANRIRRYRRRVDRYSQNRMFQKDQKWVYRTWERPDQNVDDIHRPDDDDTNKFWRSIWSVSVDHTEGDWMREIRETREPLQAMEHISITCKDVADAVRSVPNWKSPGPDGLHNFWLKWLRSSHACLASQFQSALESGSLPQFLTTGITHLLHKSGSTTEPKNYRPITCLPTVYKLLTSILRDKIDSHITKNAIMSVSQNGCRNRSRGTKELLLIDMTISQQVRRSRKDLSTCWIDYKKAYDSVPHGWLMRVLELYKVDATLCAFLGSCMRQWRTVLRYPGCRPIQGNNEPIRIKRGIFQGDSLSPLWFCLALNPLSTLLENSGLGYRLRRGGQVISHLLYMDDLKLFVPTKLQLIELLKITKTFSNSIRMEFGVDKCAVMHVKRGKIEESEGIQLSDSVNLRSLSADETYKYLGMSEALGIIEIDMKQSVRERFLARLRKVLKSLLSGGNKVRAYNGWVMPILMYSFGILKWTQKELDDLDRKVRALLTTYRMHHPRSSVMRLYIPRKCGGRGFLNAKTLHNREVCNLREYFLQTDVGMHRDVVAMDKGLTPLSLAKENWRKPIVLSTDNRKEVWKSKELHGRFYRALHGDEVDFKASVSWLRFGNLFGETEGFVCAIMDEVIMTRNYRRYIVRDGTVDICRACHSSGESLRHIISGCPRLANGEYLHRHNQVAKIIHQQLALRYGLVESEVPYYRYAPDPVLENGHVTLYWDRTIITDRTIIANKPDIVVIDRSERCTMIVDVTIPHDGNLVKAEKDKQIKYLDLAHEIVDMWDVDSAVVVPIVVTANGLIAKSLDQHLKRLALDGWVKGLMQKAVLLDGSSSLWSPDCR

SEQ ID NO: 29611 - protein, 1111 aa, Cosmia trapezina
MRWTQSMNDNVMRAYYGSTEGGTNLTAYRVRMLSLFQELEPTVNVSAQRLSDQVRVIQRNHTLDDAALDRLRSEILNNRIVSTPAQTAVQASIIDAVPPRSTHVVGEGDDRVATVSSQSNDRLRSALEDAFREYRSTPTELRPRLPRLPMHKKNRALVCALDSQLKDFFESSEDLVDTHSILYCAAVPACRLANVKFPNCDGATRPKPAVPAWQCRIERRIDGARVLIGKLYCFREGNTRPRVMRFVRRAFSGTGISPPEYMSRVTERIDFLKQKVCAWASRIRRYKRRVDRYAQNRIFQSDERWVYRAWERPEQNVTDVCRPDDTITSAFWRSIWSVPVCHAEAGWMQDVERVCETVPEMEAVLITPLDVARAVRPLPNWKSPGPDGLHNFWIKWLISSHTCLASQFQSSLESGSLPQFLTTGVTHLLHKSGSPAEPKNYRPITCLSTIYKLLTSILRAKINMHIENNSIMSASQNGCRNGSRGTKELLLIDMAISQQVRRSRKDLSTCWIDYKKAYDSVPHTWLIRVLELYKIDATLRTFLGSCMGQWRTVLRYPGCRRIQGNDEPVWIKRGIFQGDSLSPLWFCLALNPLSTLLEDSGLGYRLRRGGQVISHLLYMDDLKLFAPNKLRLMELLKVTETFSSAIRMEFGVDKCAVMHVKRGEIMESEGIQLSDSIHLRSLSSSETYKYLGMSEALGINVAHMKQSLKERFFGRLKKVLISLLSGGNKVRAFNGWVMPVLMYSFGVLKWTQTELDALDRRVRTLLTANRMHHPRSSVMRLYIPRKCGGRGFLNAKTLHNREECSLREYFLKADVGMHRDVVAVDKGLTPLSMANENWRKPVVLTTDDRKKVWQSKELHGRFYRALHEPGVDFLASVSWLRFGDLFGETEGFVCAIMDEVILTNNYRRHIMKDGTVDVCRACHRPGESIRHIISGCSRLANGEYLHRHNQVASIIHQQLALKYKLVDSEVPYYKYVPDPVLENDHVTLYWDRSIITDRTIVANKPDIVVIDRLARRAMIVDVTIPHDENLVKAEKEKQIKYLDLAHEVVDMWNVSSAIIVPIVVTANGLMAESLDQHLLRLSLGGWIKGQIQKAVLLDTARIVRRFLSLQP

SEQ ID NO: 29612 - protein, 1170 aa, Noctua fimbriata
MITRSRAKQLQEAHTPSPGSSLSSASQPPRRATSVSTVSPVAAVASSSSDEFFSPPSTPPPSPRRRGRGRPPAGLGPRGQPAPNRVPAAGGNVSHMRWTQSINEQVMRAYYGATEGGTNLTAYRVGMLSLFQVLEPTINVSAQLLSDQVRVIQRNHMLDDAVLDRLRSEVLSNRIVFTPAQTAVQASVIDATPPRFNPAVVEEDDRVAVVSSQCNDRLRSALEDALREYRSTPTELRPRLPRLPMHNKNRALVCALDSQLKNFFESSENLVDTHSILYCGAVAACRLANVKFPNCDVATRPKPAVPAWQRRIECRIDGARVLIGKLHCFREGNTRPRVMRFVRRAFSGTGISPQEYMSRVTERIDFLKQKVYAWANRIRRYKRRVDRYSQNRMFQSDERWVYRAWERPELNMTDVCRPDDAATSSFWRSIWSVPVCHTEADWMRDVERVCEPIPEMEPILITPLDIARAVRPLPNWKSPGPDELHNFWLKWLSSSHTCLASQFQSSLESGSLPQFLTTGVTHLLHKSGSPAEPKNYRPITCLSTVYKLLTSILRAKINTHIDKNSIMSASQNGCRNGSRGTKELLLIDMAISQQVRRSRKDLSTCWIDYKKAYDSVPHTWLMRVLELYKIDATLRAFLESCMGQWRTVLRYPGCRQIQGNDEPVWIKRGIFQGDSLSPLWFCLALNPLSTLLEDSGLGYRLRRGGQVISHLLYMDDLKLFAPNKLRLMELLKVTETFSSAIRMEFGVDKCAVMYVKQGEIMESEGIQLSDSIHLRTLSSTESYKYLGMSEALGINVTDMKQSLKERFFGRLNKVLHSLLSGGNKVRAFNGWVMPVLMYSFGVLKWTQTELDALDRRVRTLLTANRMHHIRSSVMRLYIPRKCGGRGFLNAKSLHNREMCSLREYFLKVEVGMHRDVVAVDKGLTPLSMAKENWRKPEVLTTDDRKEVWQGKELHGRFYRALHGPDVDFLASVSWLRFGDLFGETEGFVCAIMDEVMLTNNYRKYIMKDGTVDVCRACHRPGESIRHIISGCSRLANGEYLHRHNQVARIIHQQLALKYKLVESEVPYYKYVPDPVLEKDHVTLYWDQSIITDRTIVANKPDIVVIDRSARRVMIVDVTIPHDENLVKAEKEKTNKISRLGTRGCRHVACELGYHCADRRDGQWPYSQEPR

SEQ ID NO: 29613 - protein, 1192 aa, Abrostola tripartita
MITRSRAKIAQSTSPDSSPRSASQLPDQQALHSPASAVASSSSDEYFSPPTSPTPVRRQRRGRPPTSLGLRGQLAPNRVPASGGCVQRMKWSQQINENVMRAYYGSTEGGTNLTAYRDRMLALFQDLEPAVNVSAQRLSDQVRVILRNHRLDDATLDRLRSEVHSSPVTCRPVHVVVPPIGPPPCDMEADDRATTVSTQYNDILRSTLEDTIREYRVSPPGLRPRLPRLPMHNKNKAMISALDSLLSSYFEGSEDLCDTHSILYCAAATACRVANVKCFDGSTATRPKPAVPAWQCRIESRITETRTLIGKLTAFREGNIRPRVMRFVRRAFAGVDINPREYATRATERIDFYKQKVYAWASRIRRYKRRVDRFSQNRIFNQDQRWVYRNWERSAQGVSDGHLPDDDVTNAFWRSIWSVPVNHTEGSWMLDVEQSCESIPEMGTITISPQDVASAVRPMSNWKSPGPDGLHNFWIKWLRSSHGCLASQFQSAIEVGSLPQFLTTGSTHLLHKTGSTTDPKNFRPITCLPTIYKLLTSILRAKITKHIDDNNIMSASQNGCKNGSRGTKELLLIDMTICQQVRRSKKDLSTCWIDYKKAYDSVPHTWLMRVLELYKIDTTLRTFLLSCMRQWRTVLHYPGCRDIQQDGEPIRIERGIFQGDSLSPLWFCLALNPLSTLLENSGLGYSLRRRSQVISHLLYMDDLKLFAPSRFQLIKLLKITEAFSNSIRMEFGVDKCAVMHVKRGGIIESQGIQLSDSINLRSLSATETYKYLGMSEALGINVVDMKQSLKERFFGRLNKVLKSLLSGGNKVRAFNGWVMPTLMYSFGILKWTQTELDALDRRVRTLLTSNRMHHPRSSVMRLYIPRKCGGRGFLNAKTLHNREVCSLREYFLRAEVGMHREVVAVDKGLTPLFLAKENWCKPVVLSVNDRRDVWQSKELHGRFYKALHGPNVDLLSSVSWLRFGDLFGETEGFVCAIMDEVIMTNNYRKYILKDGTVDICRACHRPGESLRHIMSGCSRLANGEYLHRHNQVARIIHQQLALKYKLVDSEMPYYRYVPDPVLENDHITLYWDRSIITDRTIVANKPDIVVIDRLERRAMIVDITIPHDENLVKAERDKQIKYLDLAHEVVDMWEVDSAIIVPIVVSANGLMAKSLDQHLKRLTLGGWVKGLMQKAVLLDTARIVRRFLSLEP

SEQ ID NO: 29614 - protein, 1192 aa, Abrostola tripartita
MITRSRAKIAQSTSPDSSPRSASQLPDQQALHSPASAVASSSSDEYFSPPTSPTPVRRQRRGRPPTSLGLRGQLAPNRVPASGGCVQRMKWSQQINENVMRAYYGSTEGGTNLTAYRDRMLALFQDLEPAVNVSAQRLSDQVRVILRNHRLDDATLDRLRSEVHSSPVTCRPVHVVVPPIGPPPCDMEADDRATTVSTQYNDILRSTLEDTIREYRVSPPGLRPRLPRLPMHNKNKAMISALDSLLSSYFEGSEDLCDTHSILYCAAATACRVANVKCFDSSTATRPKPAVPAWQCRIESRITEARTLIGKLTAFREGNIRPRVMRFVRRAFAGVDINPREYATRATERIDFYKQKVYAWASRIRRYKRRVDRFSQNRIFNQDQRWVYRNWERSAQGVSDGHLPDDDVTNAFWRSIWSVPVNHTEGSWMLDVEQSCESIPEMGTITISPQDVASAVRPMSNWKSPGPDGLHNFWIKWLRSSHGCLASQFQSAIEVGSLPQFLTTGSTHLLHKTGSTTDPKNFRPITCLPTIYKLLTSILRAKITKHIDDNNIMSASQNGCKNGSRGTKELLLIDMTICQQVRRSKKDLSTCWIDYKKAYDSVPHTWLMRVLELYKIDTTLRTFLLSCMRQWRTVLHYPGCRDIQQDGEPIRIERGIFQGDSLSPLWFCLALNPLSTLLENSGLGYSLRRRSQVISHLLYMDDLKLFAPSRFQLIKLLKITEAFSNSIRMEFGVDKCAVMHVKRGGIIESQGIQLSDSINLRSLSATETYKYLGMSEALGINVVDMKQSLKERFFGRLNKVLKSLLSGGNKVRAFNGWVMPTLMYSFGILKWTQTELDALDRRVRTLLTSNRMHHPRSSVMRLYIPRKCGGRGFLNAKTLHNREVCSLREYFLRAEVGMHREVVAVDKGLTPLFLAKENWCKPVVLSVNDRRDVWQSKELHGRFYKALHGPNVDLLSSVSWLRFGDLFGETEGFVCAIMDEVIMTNNYRKYILKDGTVDICRACHRPGESLRHIMSGCSRLANGEYLHRHNQVARIIHQQLALKYKLVDSEMPYYRYVPDPVLENDHITLYWDRSIITDRTIVANKPDIVVIDRLERRAMIVDITIPHDENLVKAERDKQIKYLDLAHEVVDMWEVDSAIIVPIVVSANGLMAKSLDQHLKRLTLGGWVKGLMQKAVLLDTARIVRRFLSLEP

SEQ ID NO: 29615 - protein, 1202 aa, Griposia aprilina
MLTRSARTRARPPPPDSSLSSASPPPVSSPIVSAVTTPAAVVASSSSDEYFSPPTSPTPVRRQGRGRPPRSLGLRGHPAPSWVPAAGGCVQRMKWTQSMNENVMRAYYRSTEGGTNFTAYRDRMLSLFQELEPTINVSAQRLSDQVRVIQRSHRLDDAALDRLRSELNNHIISTPAQTAVQASTIDEIQPRSNHGVEVEDDRVASVSSQCNARLKSALEDAFREYRSTPTELRPRLPRLPMHKKNRALVCALDSQLKNVFESSENLIDTHSILYCAAVAACRLANVRFPNCDGATRPKPAVPAWQCRIERRIDGARVLIGKLHCFREGNNRPRVMRFVRRAFSGTGISPREYMSHATERIDFLKQKVCAWASRIRRYKRRVDRYTQNRMFQSDERWVYRAWERPEQNVTDECRPDDATTSTFWRSIWSVPVCHVEADWMRDVGRACETVPEMDAVLITPLDVARAVRPLPNWKSPGPDGLHNFWLKWLISSHACLASQYQSSLESGSLPQFLTTGVTHLLHKSGSPTDPKNYRPITCLSTVYKLLTSILRAKINTHIESNSIMSASQNGCRNGSRGTKELLLIDMAISQQVRRSRRDLSTCWIDYKKAYDSVPHTWLMRVLELYKIDTTLRTFLRSCIGQWRTVLRYPGCRQIQANGEPVWIKRGIFQGDSLSPLWFCLALNPLSTLLEDSGLGYRLRRGGQVISHLLYMDDLKLFAPNKLQLMELLKVTETFSSTIRMEFGVDKCAVMHVKRGEVMEPEGIQLSDSIHLRSLSSSESYKYLGMSEALGINVADMKQSLRERFFGRLKKVLISLLSGGNKVRAFNGWVMPVLMYSFGILKWTQTELDALDRRVRTLLTANRMHHPRSSVMRLYIPRKCGGRGFLNAKTLHNREVCSLREYFLKAEVGMHRDVVAVDKGLTPLSMAKENWRKPVVLTTDDRKEVWQSKELHGRFYRALHEPGVDFLASVSWLRFGDLFGETEGFVCAIMDEVILTNNYRRHIMKDGTVDMCRACHRPGESIRHIISGCSRLANGEYLHRHNQVARIIHQQLALKYKLVDSEVPYYKYVPDPVLENDHITLYWDRSIITDRTIVANKPDIVVIDRLARRTMIIDITIPHDENLVKAEKGKQIKYLDLAHEVVDMWNVSSAVIVPIVVSANGLMAKSLDQHLSRLSLGGWVKGLIQKAVLLDTARIVRRFLSLEP

SEQ ID NO: 29616 - protein, 1140 aa, Sesamia nonagrioides
MLTRSAARQRARPPSPDSLLSSASPPPVSSATVNAVTTPAAAVALSSSDEYFSPPTSPTPVRRQGRGRPPKSLGLRGHPAPSRVPAAGGCVQRMRWSQTMNENVMRAYYGATEGGTNLTAYRERMLSLFQALEPTVNVSAQRLSDQVRVIQRNHRLDDTALDRLRSEVLSNQIAPTLTQTAALASIIDAVPPRSNRVEEEDDRVETVSSQYNDRLRSTLEDAFREYRSTPTDLRPRLPRLPMHKKNRALVSALDSQLKNVFESSEDLIDTHSNLFCAAVAACRLANIKFPNCDEANRPKPAVPAWQHRIERRIDGARVLIGKLYCFREGNTRPRVMRFVRQAFSGTGISPREYLTHVTERIDFLKQKVCAWANRIRRYKRRVDRYTQNRMFQSDERWVYRAWERSELNEADVCRPDVAATSAFWCSIWSVPVCHAEGDWIQNVEQVCEMIPEMDTILITPIDVATAVRSLPNWKSPGPDGLHNFWLKWLSSSHTCLASQFQSSLESGSLPQFLTTGITHLLHKSGSTAEPNNYRPITCLPTVYKVLTSILKAKINKHLDSNSIMSVSQNGCKSGSRGTKELLLIDMAISQQVRRSRKDLSTCWIDYKKAYDSVPHTWLMRVLELYKINATLRTFLRSCMGQWKTVLRYPGSRRIQGNDEPVWIKRGIFQGDSLSPLWFCLALNPLSTLLEDSGLGYRLKRGGQVISHLLYMDDLKLFAPNKLHLMKLLNVTETFSSGIKMEFGVDKCAVMHVERGQIMESEGITLPDSIHLRSLSSFESYKYLGMSEALGINDADMKQSLKERFFGRLKKVLKSLLSGGNKVRAFNGWVMPVLMYSFGILKWTQTELDALDRRVRTLLTANRMHHPRSSVMRLYIPRKCGGRGFLNAKTLHNREVCSLREHFLKTVVGMHHDVVTVDKGLTPLSMAKENWHKPIILTTDDRKMIWQSKELHGRFYRALHGPDVDFLASVSWLRFGDLFGETEGFVCAIMDEVILTNNYRRYIMKDGTIDVCRACHHPGESIRHIISGCSRLANSEYLHRHNQVARIIHQQLALKYKLVDSEVPYYKYVPDPVLENDHVTLYWDRSIITDRTIVANKPDIVVIDRLARLAMIVDVTIPHDGNLVKAEKEKQMKYLDRARGC

SEQ ID NO: 29617 - protein, 868 aa, Eupsilia transversa
MRFVRRAFSGTGISPQEYMSRVTERIDFLKQKVCAWASRIRRYKRRVDRYTQNRMFQSDERWVYRAWERPEQNVTDVCRPDDAATSAFWRSIWSVPVCHAEAGWMHGVERVCETIPEMEAVIITPLDVARAVRPLPNWKSPGPDGLHNFWLKWLISSHTRLASQFQSSLESGSLPQFLTTGVTHLLHKSGNPAEPKNYRPITCLSTVYKLLTSILRAKINSHIDSHSIMSASQNGCRNGSRGTKELLLIDMAISQQVRRSRKDLSTCWIDYKKAYDSVPHTWLMRVLELYKIDATLRTFLMSCMGQWRTVLRYPGCRQIQGNDEPVWIKRGIFQGDSLSPLWFCLALNPLSTLLEDSGLGYRLRRGGQVISHLLYMDDLKLFAHNKLRLMELLKVTETFSSATRMEFGVDKCAVMHVKRGEIMESEGTQLSDSIHLRSLSSTESYKYLGMSEALGINVADMKQTLKERFFGRLKKVLISLLSGGNKVRAFNGWVMPVLMYSFGILKWTQTELDALDRRVRTLLTANRMHHPRSSVMRLYIPRKCGGRGFLNAKTLHNREVCSLREYFFKTEVGMHRDVVAVDKGLTPLSMAKENWRKPVVLTTDDRKEVWQSKELHGRFYRVLHEPGVDFLASVSWLRFGDLFGETEGFVCAIMDEVILTNNYRRHIMKDGTVDVCRACHRPGESIRHIISGCSRLANGEYLHRHNQVARIIHQQLALKYKLVDSEVPYYKYVPDPVLENDHVTLYWDRSIITDRTIVANKPDIVVIDRLARRAMIVDVTIPHDENLVKAEKEKQIKYLDLAHEVVDMWNVSSAIIVPIVVTANGLMAESLDQHLLRLSLGGWIKGLIQKAVLLDTARIVRRFLSLQP

SEQ ID NO: 29618 - protein, 1203 aa, Amphipyra tragopoginis
MLTRARAREKVARPRSPDPSLRSASQPPESSPSVSAVTPAAAVASSSSDEYFSPPSSPPPVRRRGGARPPACLGPQGQPASNRVPAAGGNVSRMRWTQSINENVMRAYYGATEGGINLTAYRDRMLLLFQVLEPAINVSTQRLSDQVRVIQRNRRLDDTVLERLRSEVQNNRAVTPPVQAVVQAQLPAVPPRPSHGDGEGDGEVIEVSNQCSDELRSALEGAILEYRATPPELRPRLPRLPMHKKNRALVCALDSLLSNYFDGSEDLADTHSILYCAAIAACRVAHVKFTDNERATRPKPAVPAWQCRIERRIGGARALIGKLICFREGNTRPRVMRFVRRAFSGTGISPRDYMSRITERIDFLKQKVFAWANRIRRYKRRVERYTLNRTFQSDQRRVYRTWERPDPCGSDVRLPDDEAMSSFWRSIWSVPIAHTEGGWMRDIERACEPIPEMGAIIISPQDVASAARPLPNWKSPGPDGLHNFWLKWLRSSHACLASQFQSSLESGSLPQFLTTGATHLLYKSGSTAEPKNYRPITCLPTVYKLLTSILRVKISNHIDNNSIMSASQNGCRNGSRGTKELLLIDMTISQQVRRSRKDLSTCWIDYKKAYDSVPHTWLMRVLELYKINTTLRAFLMSCMRQWRTVLRYPGCREIRGRGEPVRIERGIFQGDSLSPLWFCLALNPLSTLLEGTRLGYRLRREGQVISHLLYMDDLKLFAPTDLRLMELLKVTENFSSSIRMEFGVDKCAVMHVKRGRIVESEGTQLSNSIQLRSLSPTETYKYLGMSEALGISEADMRQSLRERFFGRLNKVLRSLLSGGNKVRAFNGWVMPVLMYSFGILKWTQTDLDALDRRVRALLTSHRMHHPRSSVMRLYIPRKCGGRGFLNAKTLHNREVCSLREYFLQAEGEMHRGVVAVDKGLTPLALAKENWRKPAVLSTNDREEVWQSKELHGRFYRALHGPDVDFPASVSWLRFGDLFGETEGFVCAIMDEVMMTNNYRRYIVKDGTVDICRACHRPGESIRHIVSGCSRLANGEYLHRHNLVARIIHQQLALKYNLVESEVPYYRYVPDPVLEKGHVTLYWDRSIITDRTIVANKPDIVVIDRSERRTMIVDITVPHDENLVKAEKDKQIKYLDLAHEVVGMWDVDSAVIVPIVVTANGLIAKSLDQHLKRLSLGGWIKGLIQKAVLLDTARIVRRFLSLEP

SEQ ID NO: 29619 - protein, 1199 aa, Amphipyra tragopoginis
MLTRAQARANARPPPPDSSPSSASQQQGLDPASPAAAVASSSSDEYYSPPSSPPPARRRGGTRPPVGLGLRGPLASDRVPAPGGIVPRMKWTRSINENVMRAYYGATEGGTNLTAYRGRMLSLFQVLEPAVNVSAQRLSDQVRVIQRGHMLDDTVLDRIRSEVQGSPVISPSPQVLEQSQNLAATLPRPNRADEEDDDRATNVSTQCNEELRSALEDAMREYRFIRPDLRPRIPRLPMHRKNRALVCALDSLLSNYFDGSEDLSDTHSILYCAAVAACRVAHIKFTDNERATRPKNAVPAWQCRIERRIAEARALIGKLVCFREGNSRPRVMRFVRRAFSGTDVSPREYMSRVTERIDFLKQKVYAWANRIRRYRRRVDRYTQNRLFQSDERWVYRTWERPDQRVSDTRLPDDDVMNAFWRNIWSVPVAHTEGDWMQEVQRACEPIQEMGDIIISPQDVASAVRPMSNWKSPGPDGLHNFWLKWLRSSHARLASQFQSSLESGSLPQFLTTGVTHLLHKSGSTAEPKNYRPITCLPTVYKVLTSILRAKINNHIDNNSIMSASQNGCRNGSRGTKELLLIDMAISQQVRRSRKDLSTCWIDYKKAYDSVPHTWLMRVLELYKVNTTLCAFLTSCMGQWRTVLHYPGCRQIQGMGEPIRIERGIFQGDSLSPLWFCLALNPLSTLLEGSGLGYRLRRGGQVISHLLYMDDLKLFAPNNLRLLELLKVTETFSNSIRMEFGVDKCAVMHVKRGGIMESVGTQLSDSIHLRSLSSTETYKYLGMSEALGINETDMKQSLRERFYGRLKKVLNSLLSGGNKVRAFNGWVMPVLMYSFGILKWTQTELDALDRRVRSLLTANRMHHPRSSVMRLYIPRKCGGRGFLNAKTLHNREVCSLREYFSQADVGMHRDVVAVDKGLTPLSLAKENWRKPVVLDTNGRREVWRSKELHGRFYPALHGPDVDFLASVAWLRFGDLFGETEGFVCAIMDEVMMTNNYRKYIVKDGTVDICRACHCPGEFIRHIVSGCSRLANGEYLHRHNLVARIIHQQLALKYNLVDAEVPYYKYVPDPVLENGHVTLYWDRSIITDRTIVANKPDIVVIDRSERLTMIVDITVPHDENLVKAEKDKEIKYQDLAHEVVAMWDVDSAIIVPIVVTANGLIAKSLDQHLKRLSLGSWIKGLIQKAVLLDTARIVRKFLSLRP

SEQ ID NO: 29620 - protein, 1202 aa, Amphipyra tragopoginis
MLTRSRARARDNQAHLPPPDSSPSSASQQQGLNPASPAAAVASSSSDEYYSPPSSPPPARRRGGTRPPVGLGLRGPLASDRVPAPGGIVPRMKWTQKMNESVMRAYYGATEGGTNLTAYRGRMLSLFQVLEPAVNVSAQRLSDQVRVIQRGHMLDDTVLDRLRSEVQSSPVISPSSQVLEQQQNLAAALPRPNRADEEDDDRVANVSTQCNDELRSALEDAMREYRYTRSDLRPRIPRLPMHRKNRALVCALDSLLSNYFDGSEDLGDTHSILYCAAVAACRVAHVKFTDNERATRPKNAVPAWQCRIERRISEARALIGKLVCFREGNTRPRVMRFVRRAFSGTDVSPREYMSRVTERIDFLKQKVYAWANRIRRYRRRVDRYTQNRLFQSDERWVYRTWERPDQRVSDTRLPDNDVMNTFWRNIWSVPVAHTEGDWMQEVQRACEPIQEMGDIIISPQDVASAVRPMSNWKSPGPDGLHNFWLKWLRSSHARLASQFQSSLESGSLPQFLTTGVTHLLHKSGSTAEPKNYRPITCLPTVYKVLTSILRTKINNHIDNNSIMSASQNGCRNGSRGTKELLLIDMAISQQVRRSRKDLSTCWIDYKKAYDSVPHTWLMRVLELYKVNTTLCAFLTSCMGQWRTVLRYPGCRQIQGIGEPIRIERGIFQGDSLSPLWFCLALNPLSTLLEGSGLGYRLRRGGQVISHLLYMDDLKLFAPNNLRLLELLKVTETFSNSIRMEFGVDKCAVMHVKRGRIMESVGTQLSDSIQLRSLSSTETYKYLGMSEALGVNETDMKQSLKERFFGRLKKVFNSLLSGGNKVRAFNGWVMPVLMYSFGILKWTQTELDALDRRVRSLLTANRMHHPRSSVMRLYIPRKCGGRGFLNAKTLHNREVCSLREYFSQADVGMHRDVVAVDKGFTPLSLAKENWRKPVVLDTNGRREVWRSKELHGRFYRALHGPDVDFLASVAWLRFGDLFGETEGFVCAIMDEVMMTNNYRKYIVKDGTVDICRACHCPGESIRHIVSGCSRLANGEYLHRHNLVARIIHQQLALKYNLVDAEVPYYKYVPDPVLENGHVTLYWDRSIITDRTIVANKPDIVVIDRSERLTMIVDITVPHDENLVKAEKDKEIKYQDLAHEVVAMWDVDSAIIVPIVVTANGLIAKSLDQHLKRLSLGSWIKGLIQKAVLLDTARIVRKFLSLRP

SEQ ID NO: 29621 - protein, 1202 aa, Amphipyra tragopoginis
MLTRSRARARDNQAHLPPPDSSPSSASQQQGLNPASPAAAVASSSSDEYYSPPSSPPPARRRGGTRPPVGLGLRGPLASDRVPAPGGIVPRMKWTQKMNESVMRAYYGATEGGTNLTAYRSRMLSLFQVLEPAVNVSAQRLSDQVRVIQRGHMLDDTVLDRLRSEVQSSPVISPSSQVLEQQQNLAAALPRPNRADEEDDDRAANVSTQCNDELRSALEDAMREYRYTRSDLRPRIPRLPMHRKNRALVCALDSLLSNYFDGSEDLGDTHSILYCAAVAACRVAHVKFTDNERATRPKNAVPAWQCRIERRISEARALIGKLVCFREGNTRPRVMRFVRRAFSGTDVSPREYMSRVTERIDFLKQKVYAWANRIRRYRRRVDRYTQNRLFQSDERWVYRTWERPDQRVGDTRLPDNDVMNTFWRNIWSVPVAHTEGDWMQEVQRACEPIQEMGDIIISPQDVASAVRPMPNWKSPGPDGLHNFWLKWLRSSHARLASQFQSSLESGSLPQFLTTGVTHLLHKSGSTAEPKNYRPITCLPTVYKVLTSILRTKINNHIDNNSIMSASQNGCRNGSRGTKELLLIDMAISQQVRRSRKDLSTCWIDYKKAYDSVPHTWLMRVLELYKVNTTLCAFLTSCMGQWRTVLRYPGCRQIQGIGEPIRIERGIFQGDSLSPLWFCLALNPLSTLLEGSGLGYRLRRGGQVISHLLYMDDLKLFAPNNLRLLELLKVTETFSNSIRMEFGVDKCAVMHVKRGRIMESVGTQLSDSIQLRSLSSTETYKYLGMSEALGVNETDMKQSLKERFFGRLKKVFNSLLSGGNKVRAFNGWVMPVLMYSFGILKWTQTELDALDRRVRSLLTANRMHHPRSSVMRLYIPRKCGGRGFLNAKTLHNREVCSLREYFSQADVGMHRDVVAVDKGFTPLSLAKENWRKPVVLDTNGRREVWRSKELHGRFYRALHGPDVDFLASVAWLRFGDLFGETEGFVCAIMDEVMMTNNYRKYIVKDGTVDICRACHCPGESIRHIVSGCSRLANGEYLHRHNLVARIIHQQLALKYNLVDAEVPYYKYVPDPVLENGHVTLYWDRSIITDRTIVANKPDIVVIDRSERLTMIVDITVPHDENLVKAEKDKEIKYQDLAHEVVAMWDVDSAIIVPIVVTANGLIAKSLDQHLKRLSLGSWIKGLIQKAVLLDTARIVRKFLSLRP

SEQ ID NO: 29622 - protein, 1194 aa, Autographa pulchrina
MLTRSRKRKPARPPSPDSSPSSASQLPDHVQAPAPAVASSSSDEYYSPPTSPTPVRRQGRRRPPSSLAPAGQPASNRAPAPGGDVRRMKWTQGINENVMRAYYGATEGGTNLTAYRARMLSLIQVLEPGVSVSAQRLSDQVRVIQRNHRLDDSTLDRLRSEIQSSPATNTLPPAAAPVSGAPHTAPSDGEEDDGAMTVSTQFSELIRSTLEDAIRDYRTSPPDQRPRLPRLPMHNRNKAIMGALDSLLPIYFESSEDLRDTHSILYCAALTACRVANVAICYSNIAARPKPAVPAWQCRIEQRVAEARTLIAKLIAFKQGNSRPRVMRFVRRAFAGTDISSSEYTARVTERIDLFKQKVCAWASRIRRYKRRVERFYLNRMFQKDQRWVYRAWERPASGVDGGCLPDGDATNSFWRSIWSVPVSHSEGGWMREVEQVCEPIQEMGAITISPQDVTNAVRPMANWKTPGPDGLQNFWLKWLRSSHGCLASQFQSAVESASLPQFLTTGSTHLLHKTGSAADPKNYRPITCLPTVYKLLTSILRAKINEHVVSFSIMSASQNGCRSGSRGTKELLLIDTAICQQVRRSKKDLSTCWIDYKKAYDSVPHTWLMRVLELYKINATLRAFLVSCMGQWSTVLHYPGCRDIQQGGEPIRIERGIFQGDSLSPLWFCLALNPLSTLLENSRLGYSLRRGSQVISHLLYMDDLKLFANSGLQLMKLLKITESFSNSIRMEFGVDKCAVMHVKRGGVVESQGIQLSDSINLRSLSATETYKYLGMSEALGINAADVKQSLQARFFGRLNKVLKSVLSGGNKVRAFNGWVMPVLMYSFGVLKWTQTELDALDRRVRTLLTANRMHHPRSSVMRLYIPRKCGGRGFLNAKTLHNREVCNLREYFLQVDVGMHRDVVVVDKGLTPLSLGKENWHKPVVLSVKDREVVWQSKELHGRYYRTLHGSDVDFLASVAWLRFGDLFGETEGFVCAIMDEVIMTNNYRKYIIKDGTVDICRACHCPGESLRHIISGCSRLANGEYLHRHNQVARIIHQQLALRYKLVESEVPYYRYVPDPVLENGRVTLYWDRSIITDRTIVANKPDIVVIDRSERRAIIVDITIPHDENLVKAEKEKQLKYLDLAHEVVDMWEVDSAIIVPIVVTANGIIAKSLDQHLKRLSLGAWVKGLMQKAVLLDTARIVRRFLSLEP

SEQ ID NO: 29623 - protein, 1194 aa, Autographa pulchrina
MLTRSRKRKPARPPSPDSSPSSASQLPDHVQAPAPAVASSSSDEYYSPPTSPTPVRRQGRRRPPSSLAPAGQPASNRAPAPGGDVRRMKWTQGINENVMRAYYGATEGGTNLTAYRARMLSLFQVLEPGVSVSAQRLSDQVRVIQRNHRLDDSTLDRLRSEIQSSPATNTLPPAAAPVSGAPHTAPSDGEEDDGAMTVSTQCSELIRSTLEDAIRDYRTSPPDQRPRLPRLPMHNRNKAIMGALDSLLPIYFESSEDLRDTHSILYCAALTACRVANVAICYSNIAARPKPAVPAWQYRIEQRVAEARTLIAKLIAFKQGNSRPRVMRFVRRAFAGTDISSSEYTARVTERIDLFKQKVGAWASRIRRYKRRVERFYLNRMFQKDQRWVYRAWERPASGVDGGCLPDGDATNSFWRSIWSVPVSHSEGGWMREVEQVCEPIQEMGAITISPQDVANAVRPMANWKTPGPDGLQNFWLKWLRSSHGCLASQFQSAVESASLPQFLTTGSTHLLHKTGSATDPKNYRPITCLPTVYKLLTSILRAKINEHVVSFSIMSASQNGCRSGSRGTKELLLIDTAICQQVRRSKKDLSTCWIDYKKAYDSVPHTWLMRVLELYKINATLRAFLVSCMGQWSTVLHYPGCRDIQQGGEPIRIERGIFQGDSLSPLWFCLALNPLSTLLENSRLGYSLRRGSQVISHLLYMDDLKLFANSGLQLMKLLKITESFSNSIRMEFGVDKCAVMHVKRGGVVESQGIQLSDSINLRSLSATETYKYLGMSEALGINAADVKQSLQARFFGRLNKVLKSVLSGGNKVRAFNGWVMPVLMYSFGVLKWTQTELDALDRRVRTLLTANRMHHPRSSVMRLYIPRKCGGRGFLNVKTLHNREVCNLREYFLQVDVGMHRDVVVVDKGLTPLSLGKENWHKPVVLSVKDREVVWQSKELHGRYYRTLHGSDVDFLASVAWLRFGDLFGETEGFVCAIMDEVIMTNNYRKYIIKDGTVDICRACHCPGESLRHIISGCSRLANGEYLHRHNQVARIIHQQLALRYKLVESEVPYYRYVPDPVLENGRVTLYWDRSIITDRTIVANKPDIVVIDRSERRAIIVDITIPHDENLVKAEKEKQLKYLDLAHEVVDMWEVDSAIIVPIVVTANGIIAKSLDQHLKRLSLGAWVKGLIQKAVLLDTARIVRRFLSLEP

SEQ ID NO: 29624 - protein, 1200 aa, Mythimna impura
MLTRAAARRARHPPPGSPLSSASPPPDLESPVSPAAAVASSSSDEYFSPPTSPTPVRRQRRGRPPKSLGSRGQPAPSRVPAAGGCVQRMRWTQSMNENVMRAYYGSTEGGTNLTAYRDRMLSLFQDLEPTVNVSAQRLSDQVRVIQRNHRLDDATLDRLRSEVLSNQIVSTSIQTQTAATPTTNAISPRSNPNNDDADDRVVTVSSQCNDELRSALEDALREYRTTPTELRPRLPRLPMHKKNRALVCTLDSLLKNNFESSENLVDTHSILYCGAVAACRLANINFPNIDGTIRPKPAVPAWQYRIERRIDGARVLIGKLHCFREGNTRPRVMRFVRRAFLGTGISPQEYMSRVTERIDFLKQKVCAWARRIRRYKRRVDRYSQNRMFQSDERWVYRAWERPEQNVIDGRRPDDFATITFWRNIWSVPVSHTEGDWMRDVERVCEAIPEMEKVVITPADVAKAVRPLPNWKSPGPDGLQNFWLKWFSNSHAPLASQFQSTLESGSLPEYLTTGVTHLLHKTGNPVEPKNYRPITCLSTVYKLLTSILRAKINRHIENNLIMSASQNGCRNGSRGTKELLLIDMAISQQARRSRKDLSTCWIDYKKAYDSVPHTWLMRVLELYKVDMTLRTFLESCMRQWKTVLRYPGCRPIQGNDEPIRIKRGIFQGDSLSPLWFCLALNPLSTLLEESGLGYRLRRGGEAISHLLYMDDLKLFAPSNLQLMELLKVTETFSSAIRMEFGVDKCAAMHVKRGEIMESEGIQLPDSIHLRSLSSTETYRYLGMSEALGINNADMKQSLKERFFGRLKKVLNSLLSGGNKVRAFNGWVMPVLMYSFGILKWTQTELDALDRRVRTLQTANRMHHPRSSVMRLYISRKCGGRGFLNAKTLHNREVCSLREYFLKTDVGMHRDVVAVDKGLTPLSMAKEDWRKPVILTTDDRKEIWKGKELHGRFYRALHEPDVDFLASVAWLRFSDLFGETEGFICAIMDEVILTNNYRRYIMKDGTVDVCRACHRPGESIRHIISGCSRLANGEYLHRHNQVARIIHQQLALKYNLVDSEVPYYKYVPDPVLENDHVTLYWDRSIITDRTIVANKPDIVVIDRLARRAVIVDVTIPHDENLVKAEKEKQIKYLDLAHEVVDMWNVDSAVIVPMVVTANGLIAKSFDDHLSKLSLRGWIKGLIQKAVLLDTARIVRRFLSLEP

SEQ ID NO: 29625 - protein, 961 aa, Limenitis camilla
MHKKNRALVCTLDSLLPMYFESSEDLKDTHSILFCAAVAVCRVAHVKLVNTETTRPKPDVAAWQSRIERRIDETRVLIGKLYSFREGNTRPRVMRFVRRAFSGTEICPPEYMARVTERIDTLKQKIYAWANRIRRYRRRVDRYSQNRMFQKDQKWVYRTWERPDQNVDDIHRPDDDDTNKFWRSIWSVSVDHTEGDWMREIRQTREPLQAMEHISITCKDVADALRSVPNWKSPGPDGLHNFWLKWLRSSHACLASQFQSALESGSLPQFLTTGITHLLHKSGSTTEPKNYRPITCLPTVYKLLTSILRDKIDSHITKNAIMSVSQNGCRNRSRGTKELLLIDMTISQQVRRSRKDLSTCWIDYKKAYDSVPHGWLMRVLELYKVDATLCAFLGSCMRQWRTVLRYPGCRPIQGNNEPIRIKRGIFQGDSLSPLWFCLALNPLSTLLENSGLGYRLRRGGQVISHLLYMDDLKLFVPTKLQLIELLKITKIFSNSIRMEFGVDKCAVMHVKRGKIEESEGIQLSDSVNLRSLSADETYKYLGMSEALGIIEIDMKQSLRERFLARLRKVLKSLLSGGNKVRAYNGWVMPILMYSFGILKWTQKELDDLDRKVRALLTTYRMHHPRSSVMRLYIPRKCGGRGFLNAKTLHNREVCNLREYFLQTDVGMHRDVVAMDKGLTPLSLAKENWRKPIVLSTDNRKEVWKSKELHGRFYRALHGDEVDFKASVSWLRFGNLFGETEGFVCAIMDEVIMTRNYRRYIVRDGTVDICRACHSSGESLRHIISGCPRLANGEYLHRHNQVAKIIHQQLALRYGLVESEVPYYRYAPDPVLENGHVTLYWDRTIITDRTIIANKPDIVVIDRSERCTMIVDVTIPHDGNLVKAEKDKQMKYLDLAHEIVDMWDVDSAVVVPIVVTANGLIAKSLDQHLKRLALDGWVKGLMQKAVLLDTARIVRKFLSLEP

SEQ ID NO: 29626 - protein, 1192 aa, Abrostola tripartita
MITRSRAKIAQSTSPDSSPRSASQLPDQQALHSPASAVASSSSDEYFSPPTSPTPVRRQRRGRPPTSLGLRGQLAPNRVPASGGCVQRMKWSQQINENVMRAYYGSTEGGTNLTAYRDRMLALFQDLEPAVNVSAQRLSDQVRVILRNHRLDDATLDRLRSEVHSSPVTCRPVHVVVPPIGPPPCDMEADDRATTVSTQYNDILRSTLEDTIREYRVSPPGLRPRLPRLPMHNKNKAMISALDSLLSSYFEGSEDLCDTHSILYCAAATACRVANVKCFDSSTATRPKPAVPAWQCRIESRIAEARTLIGKLTAFREGNIRPRVMHFVRRAFAGVDINPREYATRATERIDFYKQKVYAWASRIRRYKRRVDRFSQNRIFNQDQRWVYRNWERSAQGVSDGHLPDDDVTNAFWRSIWSVPVNHTEGSWMLDVEQSCESIPEMGTITISPQDVASAVRPMSNWKSPGPDGLHNFWIKWLRSSHGCLASQFQSAIEVGSLPQFLTTGSTHLLHKTGSTTDPKNFRPITCLPTIYKLLTSILRAKITKHIDDNNIMSASQNGCKNGSRGTKELLLIDMTICQQVRRSKKDLSTCWIDYKKAYDSVPHTWLMRVLELYKIDTTLRTFLLSCMRQWRTVLHYPGCRDIQQDGEPIRIERGIFQGDSLSPLWFCLALNPLSTLLENSGLGYSLRRRSQVISHLLYMDDLKLFAPSRFQLIKLLKITEAFSNSIRMEFGVDKCAVMHVKRGGIIESQGIQLSDSINLRSLSATETYKYLGMSEALGINVVDMKQSLKERFFGRLNKVLKSLLSGGNKVRAFNGWVMPTLMYSFGILKWTQTELDALDRRVRTLLTSNRMHHPRSSVMRLYIPRKCGGRGFLNAKTLHNREVCSLREYFLRAEVGMHREVVAVDKGLTPLFLAKENWCKPVVLSVNDRRDVWQSKELHGRFYKALHGPNVDLLSSVSWLRFGDLFGETEGFVCAIMDEVIMTNNYRKYILKDGTVDICRACHRPGESLRHIMSGCSRLANGEYLHRHNQVARIIHQQLALKYKLVDSEMPYYRYVPDPVLENDHITLYWDRSIITDRTIVANKPDIVVIDRLERRAMIVDITIPHDENLVKAERDKQIKYLDLAHEVVDMWEVDSAIIVPIVVSANGLMAKSLDQHLKRLTLGGWVKGLMQKAVLLDTARIVRRFLSLEP

SEQ ID NO: 29627 - protein, 1194 aa, Abrostola tripartita
MITRSRAKIAQSTSPDSSPRSASQLPDQQALHSPASAVASSSSDEYFSPPTSPTPVRRQRRGRPPTSLGLRGQLAPNRVPASGGYVQRMKWSQQINENVMRAYYGSTEGGTNLTAYRDRMLALFQDLEPAVNVSAQRLSDQVRVILRNHRLDDATLDRLRSEVHSSPVTCRPVHVVVPPIGPPQPSCDMEADDRATTVSTQYNDVLRSTLEDTIREYRASPFGLRPRLPRLPMHNKNKAMIGALDSLLSTYFEGSEDLCDTHSILYCAAATACRVANVKCFDSSTATRSKPAVPAWQCRIERRIAEARALIGKLIAFREGNTRPRVMRFVRRAFAGVDINPREYAARATERIDFYKQKVYAWASRIRRYKRRVDRFTQNRIFNQDQRWVYRNWERSAQGVSDGHLPDDDVTNAFWRSIWSVPVNHTEGSWMLDVEQSCESIPEMGTITISPQDVASAVRPMSNWKSPGPDGLHNFWIKWLRSSHGCLASQFQSALEVGSLPQFLTTGSTHLLHKTGSTTDPKNFRPITCLPTIYKLLTSILRAKITKHIDDNNIMSASQNGCKNGSRGTKELLLIDMTICQQVRRSKKDLSTCWIDYKKAYDSVPHTWLMRVLELYKIDTTLRTFLLSCMRQWRTVLHYPGCRDIQQDGEPIRIERGIFQGDSLSPLWFCLALNPLSTLLENSGLGYSLRRRSQVISHLLYMDDLKLFAPSRFQLIKLLKITEAFSNSIRMEFGVDKCAVMHVKRGGIIESQGIQLSDSINLRSLSATETYKYLGMSEALGINVVDMKQSLKERFFGRLNKVLKSLLSGGNKVRAFNGWVMPTLMYSFGILKWTQTELDALDRRVRTLLTSNRMHHPRSSVMSLYIPRKCGGRGFLNAKTLHNREVCSLREYFLRAEVGMHREVVAVDKGLTPLFLAKENWCKPVVLSVNDRRDVWQSKELHGRFYKALHGPNVDFLSSVSWLRFGDLFGETEGFVCAIMDEVIMTNNYRKYILKDGTVDICRACHRPGESLRHIMSGCSRLANGEYLHRHNQVARIIHQQLALKYKLVDSEMPYYKYVPDPVLENDHITLYWDRSIITDRTIVANKPDIVVIDRLERRAMIVDITIPHDENLVKAERDKQIKYLDLAHEVVDMWEVDSAIIVPIVVSANGLMAKSLDQHLKRLTLGGWVKGLMQKAVLLDTARIVRRFLSLEP

SEQ ID NO: 29628 - protein, 931 aa, Mesoligia furuncula
MHYASIGPLQPNLGPVYHGYLCKKKIGRWCVLWTRSSRISSRDSILYCAAVAACRLANVKFPSCDGATRPKPAVPAWQRRIERRIDGARVLIGKLYCFREGNTRPRVMRFVRRAFSGTGISPREYMSRLTERIDFLKQKVCAWASRIRRYKRRVDRYTQNRMFQSDERWVYRAWERPEQNVTDVCRPDDAATSAFWCSIWSVPVCHTEAGWMQDVERVCESIPQMEKVLITPSDVARAVRPLPNWKSLGPDGLHNFWLKWLISSHTCLVSQFQSSLESGSLPQFLTTGVTHLLHKSGSPAEPKNYRPITCLSTVYKLLTSILRAKINTHIESNSIMSASQKGCRNGSRGTKELLLIDMAISQQVRRSCKELSTCWIDYKKAYDSVPHTWLMRVLELYKIDATLRTFLESCMGQWKTVLRYSGCRQIQGNDEPVWIKWGIFQGDSLSTLWFCLALNPLSTLLEDSGLGYRLRRGGQVLSHLLYMDDLKLFAPNKLRLMELLKVTETFSSAIRMEFGVDKCAVMHVKRGEIMESEGIQLSDSISLRSLSSSESYKYLGMSEALGINDADMKQSLKERFFCRLNKVLISLLSGGNKVRAFNGWVMPVLMYSFGILKWTQTELDALDRRVRTLLTANRMHHPRSSVMRLYIPRKCGGRGFLNAKTLHNREVCSLSEFFLKAEVGMHRDVVAVDKGLTPLSMAKENWRKPVVLSTDDRKKVWQSKELHGRFYRALHEPGVDFLASVSWLRFGDLFGETEGFVCAIMDEVILTNNYRRHIMKDGTVDVCRACPRPGESIRHIIISGCSRLANGEYLHRHNQVARIIHQQLALKYKLVDSEIPYYKYLPDPVLENDHVTLYWDRSIITDRTIVANKPDIVVIDRLARRTMIVDVTIPHDGNLVKAEKEKEIKYLMCKKKTCKMQKLEAAQSQAFLSSI

SEQ ID NO: 29629 - protein, 1169 aa, Noctua janthe
MLTRSRAKHQAHPPSPDSSLSSASQPPGRASIVSAVSPIAAVASSSSDEFFSPPSTPSPPRRRGRGRPPAGLGPRGQQAPNRVPAAGGNVSRMRWTQSINENVMRAYYGATEGGSNLTAYRGRMLSLFQVLEPGVSVSAQRLSDQVRVIQRNHMLDDTVLERLRFDSRSNLVIPASPMIAVQLQNVSSAPPRSEHDGEEDDDEVISVSTQCNAQLRSALEGAFREYRSTPPELRPRLPRLPMHKKNKALVCALDSQLSNCFDSSKDLTDTHSILYCGAVAACRVAHVKFPNNDRATRPKFAVPAWQCRIERRIGEARALIGKLICFREGNTRPRVMRFVKRAFSGTDVNFRDYLARVTERIDFLKQKICAWASRIRRYKRRVERYTQNRTFRSDERWVYRAWERPDQGVTDTRLPDDDAMCSFWRNIWSVPVSHTEGDWTREVERACDSIPEMGAIIISPQDVARAVRPLPNWKSPGPDGLHNFWIKWFQRSHVRLASQFQSALESGSLPQFLTTGITHLLHKSGSTAEPKNYRPITCLPTVYKVLTSILRAKINHHIDSNSIMSASQNGCRNGSRGTKELLLIDMAISQQVRRSRRDLSTCWIDYKKAYDSVPHTWLMKVLELYKVDATLRTFLMSCMGHWRTVLRYPGCRQIQGNSEPIKIERGIFQGDSLSPLWFCLALNPLSTLLEGSGLGYRLRRGGQVISHLLYMDDLKLFAPNNLQLMKLLKVTETFSSAIRMEFGVDKCAVMHVKRGEIMESVGTQLSDSIHLRSLSSTETYKYLGMSEALGINTADMKQSLRDRFFGRLNKVLSSLLSGGNKVRAFNGWVMPVLMYSFGILKWTQTELDALDRRVRALLTANRMHHPRSSVMRLYIPRKCGGRGFLNAKTLHNREICSLREYFLEVDEGMHRDVVSVDKGLTPLSLANENWRKPRVLDTNDRKEVWQGKELHGRFYRALHGPDVDFLASVSWLRFGDLFGETEGFVCAIMDEVMMTNNYRKYIVKDGTVDICRACHRPGESIRHIISGCSRLANGEYLHRHNLVARIIHQQLALKYNLVESEVPYYKYAPDPVLDNGNITLYWDRSIITDRTIVANKPDIVVIDRLERRAMIVDITVPHDENLVKAEKDKQFKYLDLAREVVDMWDVSKAVIVPIVVSANGLIANSLENI

SEQ ID NO: 29630 - protein, 962 aa, Eupsilia transversa
MHKKNRALVCALDSQLKNFFESSEDLIDTHSILYCAAVAACRLANVKFPNCDAATRPKPAVPAWQCRIERRIDGARVLIGKLYCFREGNTRPRVMRFVRRAFSGTGISPQEYMSRVTERIDFLKQKVCAWASRIRRYKRRVDRYTQNRMFQSDERWVYRAWERPEQNVADVCRPDDAATSAFWRSIWSVPVCHAEAGWMHGVERVCEAIPEMEAVIITPLDVARAVRPLPNWKSPGPDGLHNFWLKWLISSHTRLASQFQSSLESGSLPQFLTTGVTHLLHKSGSPAEPKNYRPITCLSTVYKLLTSILRAKINSHIDSHSIMSASQNGCRNGSRGTKELLLIDMAISQQVRRSRKDLSTCWIDYKKAYDSVPHTWLMRVLELYKIDATLRTFLMSCMGQWRTVLRYPGCRQIQGNDEPVWIKRGIFQGDSLSPLWFCLALNPLSTLLEESGLGYRLRRGGQVISHLLYMDDLKLFAHNKLRLMELLKVTETFSSAIRMEFGVDKCAVMHVKRGEIMESEGTQLSDSIHLRSLSSTESYKYLGMSEALGINVADMKQALKERFFGRLKKVLISLLSGGNKVRAFNGWVMPVLMYSFGILKWTQTELDALDRRVRTLLTANRMHHPRSSVMRLYIPRKCGGRGFLNAKTLHNREVCSLREYFLKTEEGMHRDVVAVDKGLTPLSMAKENWRKPVVLTTDDRKEVWQSKELHGRFYRVLHEPGVDFLASVSWLRFGDLFGETEGFVCAIMDEVILTNNYRRHIMKDGTVDVCRACHRPGESIRHIISGCSRLANGEYLHRHNQVARIIHQQLALKYKLADSEVPYYKYVPDPVLENDHVTLYWDRSIITDRTIVANKPDIVVIDRLARRAMIVDVTIPHDENLVKAEKEKQIKYLDLAHEVVDMWNVSSAIIVPIVVTANGLMAESLDQHLLRLSLGGWIKGLIQKAVLLDTARIVRRFLSLQP

SEQ ID NO: 29631 - protein, 1019 aa, Amphipyra tragopoginis
MALTRYNNNNNNVDGDMDDRAVTVSSQYNDQLRSALEDAIREYRANPELRPRLPRLPMHNKNRALVCALDSLLSSYFESSEDLGDTHSILYCAAVAACRVANVKFNNSERATRPKPAVPAWQCRIERRIDGARALIGKLICFREGNTRPRVMRFVRRAFSGTGISPREYMSQVTERIDFLKQKVCAWASRIRRYKRRVERYTQNRMFQCDQRWVYRAWERPDQGVSDGRLPDDDAMNSFWRSIWSVPVIHTEGDWMRDIERACEPIEEMGEILISPQDVASAARPLPNWKSPGPDGLHNFWIKWLRSSHARLATQFQSSLESGSLPQFFTTGVTHLLHKSGSTAEPKNYRPITCLPTVYKLLTSILRSKINTHIENNSVMSSAQNGCRNGSRGTKELLLIDMAISQQVRRSRKNLSTCWIDYKKAYDSVPHAWLMRVLELYKINATLRTFLMSCMGQWRTVLRYPGCRPIRESGEPIRIERGIFQGDSLSPLWFCLALNPLSTLLEGSGLGYPLRRGGQVVSHLLYMDDLKLFAPTKLQLVELLKVTETFSNSIRMEFGVDKCAVMHVRRGGIMESEGLQLSDSIHLRPLSANDTYKYLGMSEGLGISGADMKQSLRERFFGRLKKVLKSLLSGGNKVRAFNGWVMPVLMYSFGILKWTQTELDALDRRVRSLLTANRMHHPRSSVMRLYIPRKCGGRGLLNAKTLHNREVCSLREYFLHADAGMHRDVVAVDKGLTPLNLAKENWRKPVVLSTNDRREIWQSKELHGRFYRALHGPDVDFQASVSWLRFGDLFGETEGFVCAIMDEVIMTNNYRKYIVKDGTVDICRACHCPGESLRHIISGCSRLANGEYLHRHNQVARIIHQQLALKYNLVESEVPYYKYVPDPVLENGHITLYWDRSIITDRTIVANKPDIVVIDRSERRTVIVDVTIPHDENLVKAEKDKQIKYLDLAHEVVNMWDVDSATIVPIVVTANGLMAKSLDQHLKRLSLGGWIKGLIQKAVLLDTARIVRRFLSLEP

SEQ ID NO: 29632 - protein, 981 aa, Amphipyra tragopoginis
MREYRYTQSDLRPRIPRLPMHRKNRALVCALDSLLSNYFDGSEDLGDTHSILYCAAVAACRVAHVKFTDSERATRPKNAVPAWQCRIERRISEARALIGKLVCFREGNTRPRVMRFVRRAFSGTDVSPREYMSRVTERIDFLKQKVYAWANRIRRYRRRVDRYTQNRLFQSDERWVYRTWERPDQRVSDTRLPDNDVMNTFWRNIWSVPVAHTEGDWMQEVQRACEPIQEMGDIIISPQDVASAVRPMSNWKSPGPDGLHNFWLKWLRSSHARLASQFQSSLESGSLPQFLTTGVTHLLHKSGSTAEPKNYRPITCLPTVYKVLTSILRTKINNHIDNNSIMSASQNGCRNGSRGTKELLLIDMAISQQVRRSRRDLSTCWIDYKKAYDSVPHAWLMRVLELYKVNTTLCAFLTSCMGQWRTVLRYPGCRQIQGIGEPIRIERGIFQGDSLSPLWFCLALNPLSTLLEGSGLGYRLRRGGQVISHLLYMDDLKLFAPNNLRLLELLKVTETFSNSIRMEFGVDKCAVMHVKRGRIMESVGTQLSDSIQLRSLSSTETYKYLGMSEALGVNETDMKQSLKERFFGRLKKVFNSLLSGGNKVRAFNGWVMPVLMYSFGILKWTQTELDALDRRVRSLLTANRMHHPRSSVMRLYIPRKCGGRGFLNAKTLHNREVCSLREYFSQADVGMHRDVVAVDKGFTPLSLAKENWRKPVVLDTNGRREVWRSKELHGRFYRALHGPDVDFLASVAWLRFGDLFGETEGFVCAIMDEVMMTNNYRKYIVKDGTVDICRACHCPGESIRHIVSGCSRLANGEYLHRHNLVARIIHQQLALKYNLVNAEVPYYKYVPDPVLENGHVTLYWDRSIITDRTIVANKPDIVVIDRSERLTMIVDITVPHDENLVKAEKDKEIKYQDLAHEVVAMWDVDSAIIVPIVVTANGLIAKSLDQHLKRLSLGSWIKGLIQKAVLLDTARIVRRFLSLRP

SEQ ID NO: 29633 - protein, 1079 aa, Amphipyra tragopoginis
MLTLFQELEPAINVSAQRLSDQVRVIQRNHRLDDAALDRLRLEVQNSRVTPFPSQTAVHEVNINIVPPRSDYVDGDMDDRAVTVSSQYNDQLRSALEDAIREYRANPELRPRLPRLPMHNKNRALVCALDSLLSSYFESSEDLGDTHSILYCAAVAACRVANVKFNNSERATRPKPAVPAWQCRIERRIDGARALIGKLICFREGNTRPRVMRFVRRAFSGTGISPREYMSQVTERIDFLKQKVCAWASRIRRYKRRVERYTQNRMFQCDQRWVYRAWERPDQGVSDGRLPDDDAMNSFWRSIWSVPVIHTEGDWMRDIERACEPIEEMGEILISPQDVASAARPLPNWKSPGPDGLHNFWIKWLRSSHARLATQFQSSLESGSLPQFFTTGVTHLLHKSGSTAEPKNYRPITCLPTVYKLLTSILRSKINTHIENNSVMSSAQNGCGNGSRGTKELLLIDMAISQQVRRSRKNLSTCWIDYKKAYDSVPHAWLMRVLELYKINATLRTFLMSCMGQWRTVLRYPGCRPIRESGEPIRIERGIFQGDSLSPLWFCLALNPLSTLLEGSGLGYPLRRGGQVVSHLLYMDDLKLFAPTKLQLVELLKVTETFSNSIRMEFGVDKCAVMHVRRGGIMESEGLQLSDSIHLRPLSANDTYKYLGMSEGLGISEADMKQSLRERFFGRLKKVLKSLLSGGNRVRAFNGWVMPVLMYSFGILKWTQTELDALDRRVRSLLTANRMHHPRSSVMRLYIPRKCGGRGLLNAKTLHNRELCSLREYFLHADAGMHRDVVAVDKGLTPLNLAKENWRKPVVLSTNDRREIWQSKELHGRFYRALHGPDVDFQASVSWLRFGDLFGETEGFVCAIMDEVIMTNNYRKYIVKDGTVDICRACHCPGESLRHIVSGCSRLANGEYLHRHNQVARIIHQQLALKYNLVESEVPYYKYVPDPVLENGHITLYWDRSIITDRTIVANKPDIVVIDRSERRTMIVDVTIPHDENLVKAEKDKQIKYLDLAHEVVNMWDVDSATIVPIVVTANGLMAKSLDQHLKRLSLGGWIKGLIQKAVLLDTARIVGRFLSLEP

SEQ ID NO: 29634 - protein, 1198 aa, Amphipyra tragopoginis
MLTRARSKAARPPPPDSPLSSASQPPELGPPVTPAAAAASSSSDEYFSPPTSPRPVRRQGRHRPPTSLGPRGPPAPSRVLATGGCVQRMKWTQSINENVMRAYYGSTEGGTNLTAYRVRMLTLFRELEPAINVSAQRLSDQVRVIQRNHRLDDAALDRLRLEVQNSRVTPFPSQTAVHEVNINIVPPRSDYVDGDMDDRAVTVSSQYNDQLRSALEDAIREYRANPELRPRLPRLPMHNKNRALVCALDSLLSSYFESSEDLGDTHSILYCAAVAACRVANVKFNNSERATRPKPAVPAWQCRIERRIDGARALIGKLICFREGNTRPRVMRFVRRAFSGTGISPREYMSQVTERIDFLKQKVCAWASRIRRYKRRVERYTQNRMFQCDQRWVYRAWERPDQGVSDGRLPDDDAMNSFWRSIWSVPVIHTEGDWMRDIERACEPVEEMGEILISPQDVASAARPLPNWKSPGPDGLHNFWIKWLRSSHARLATQFQSSLESGSLPQFFTTGVTHLLHKSGSTAEPKNYRPITCLPTVYKLLTSILRSKINTHIENNSVMSSAQNGCRNGSRGTKELLLIDMAISQQVRHSRKNLSTCWIDYKKAYDSVPHTWLMRVLELYKINATLRTFLMSCMGQWRTVLRYPGCRPIRESGEPIRIERGIFQGDSLSPLWFCLALNPLSTLLEGSGLGYPLRRGGQVVSHLLYMDDLKLFAPTKLQLVKLLKVTETFSNSIRMEFGVDKCAVMHVRRGGIMESEGLQLSDSIHLRPLSANDTYKYLGMSEGLGISEADMKQALRERFFGRLKKVLKSLLSGGNRVRAFNGWVMPVLMYSFGILKWTQTELDALDRRVRSLLTANRMHHPRSSVMRLYIPRKCGGRGLLNAKTLHNRELCSLREYFLHADAGMHRDVVAVDKGLTPLNLAKENWRKPVVLSTNDRRVVWQSKELHGRFYRALHGPDVDFQASVSWLRFGDLFGETEGFVCAIMDEVIMTNNYRKYIVKDGTVDICRACHCPGESLRHIISGCSRLANGEYLHRHNQVARIIHQQLALKYNLVESEVPYYKYVPDPVLENGHITLYWDRSIITDRTIVANKPDIVVIDRSERRTMIVDVTIPHDENLVKAEKDKQIKYLDLAHEVVNMWDVDSATIVPIVVTANGLMAKSLDQHLKRLSLGGWIKGLIQKAVLLDTARIVRRFLSLEP

SEQ ID NO: 29635 - protein, 962 aa, Autographa pulchrina
MHNRNKAIMGALDSLLPIYFESSEDLRDTHSILYCAALTACRVANVAICYSNIAARPKPAVPAWQCRIEQRVAEARTLIAKLIAFKQGNSRPRVMRFVRRAFAGTDISSSEYTARVTERIDLLKQKVCAWASRIRRYKRRVERFYLNRMFQKDQRWVYRAWERPASGVDGGCLPDGDATNSFWRSIWSVPVSHSEGGWMREVEQVCEPIQEMGAITISPQDVANAVRPMANWKTPGPDGLQNFWLKWLRSSHGCLASQFQSAVESASLPQFLTTGSTHLLHKTGSATDPKNYRPITCLPTVYKLLTSILRAKINEHVVSFSIMSASQNGCRSGSRGTKELLLIDTAICQQVRRSKKDLSTCWIDYKKAYDSVPHTWLMRVLELYKINATLRAFLVSCMGQWSTVLHYPGCRDIQQGGEPIRIERGIFQGDSLSPLWFCLALNPLSTLLENSRLGYSLRRGSQVISHLLYMDDLKLFANSGLQLMKLLKITESFSNSIRMEFGVDKCAVMHVKRGGVVESQGIQLSDSINLRSLSATETYKYLGMSEALGINAADVKQSLQARFFGRLNKVLKSVLSDGNKVRAFNGWVMPVLMYSFGVLKWTQTELDALDRRVRTLLTANRMHHPRSSVMRLYIPRKCGGRGFLNAKTLHNREVCNLREYFLQVDVGMHRDVVVVDKGLTPLSLGKENWHKPVVLSVKDREVVWQSKELHGRYYRTLHGSDVDFLASVAWLRFGDLFGETEGFVCAIMDEVIMTNNYRKYIIKDGTVDICRACHCPGESLRHIISGCSRLANGEYLHRHNQVARIIHQQLALRYKLVESEVPYYRYVPDPVLENGRVTLYWDRSIITDRTIVANKPDIVVIDRSERRAIIVDITIPHDENLVKAEKEKQLKYLDLAHEVVDMWEVDSAIIVPIVVTANGIIAKSLDQHLKRLSLGAWVKGLMQKAVLLDTARIVRRFLSLEP

SEQ ID NO: 29636 - protein, 1194 aa, Autographa pulchrina
MLTRSRKRKPARPPSPDSSPSSASQLPDHVQAPAPAVASSSSDEYYSPPTSPTPVRRQGRRRPPSSLAPAGQPASNRAPAPGGDVRRMKWTQGINENVMRAYYGATEGGTNLTAYRARMLSLFQVLEPGVSVSAQRLSDQVRVIQRNHRLDDSTLDRLRSEVQSSPATNTLPPAAAPVSGASHTAPSDGEEDDGAMTVSTQCSELIRSTLEDAIRDYRTSPPDQRPRLPRLPMHNRNKAIMGALDSLLPIYFESSEDLRDTHSILYCAALTACRVANVAICYSNIAARPKPAVPAWQCRIEQRVAEARTLIAKLIAFKQGNSRPRVMRFVRRAFAGTDISSSEYTARVTERIDLLKQKVCAWASRIRRYKRRVERFYLNRMFQKDQRWVYRAWERPASGVDGGCLPDGDATNSFWRSIWSVPVSHSEGGWMREVEQVCEPIQEMGAITISPQDVANAVRPMANWKTPGPDGLQNFWLKWLRSSHGCLASQFQSAVESASLPQFLTTGSTHLLHKTGSATDPKNYRPITCLPTVYKLLTSILRAKINEHVVSFSIMSASQNGCRSGSRGTKELLLIDTAICQQVRRSKKDLSTCWIDYKKAYDSVPHTWLMRVLELYKINATLRAFLVSCMGQWSTVLHYPGCRDIQQGGEPIRIERGIFQGDSLSPLWFCLALNPLSTLLENSRLGYSLRRGSQVISHLLYMDDLKLFANSGLQLMKLLKITESFSNSIRMEFGVDKCAVMHVKRGGVVESQGIQLSDSINLRSLSATETYKYLGMSEALGINAADVKQSLQARFFGRLNKVLKSVLSGGNKVRAFNGWVMPVLMYSFGVLKWTQTELDALDRRVRTLLTANRMHHPRSSVMRLYIPRKCGGRGFLNAKTLHNREVCNLREYFLQVDVGMHRDVVVVDKGLTPLSLGKENWHKPVVLSVKDREVVWQSKELHGRYYRTLHGSDVDFLASVAWLRFGDLFGETEGFVCAIMDEVIMTNNYRKYIIKDGTVDICRACHCPGESLRHIISGCSRLANGEYLHRHNQVARIIHQQLALRYKLVESEVPYYRYVPDPVLENGRVTLYWDRSIITDRTIVANKPDIVVIDRSERRAIIVDITIPHDENLVKAEKEKQLKYLDLAHEVVDMWEVDSAIIVPIVVTANGIIAKSLDQHLKRLSLGAWVKGLMQKAVLLDTARIVRRFLSLEP

SEQ ID NO: 29637 - protein, 1200 aa, Mythimna impura
MLTRAAARRARHPPPGSPLSSASPPPDLESPVSPAAAVASSSSDEYFSPPTSPTPVRRQRRGRPPKSLGSRGQPAPSRVPAAGGCVQRMRWTQSMNENVMRAYYGSTEGGTNLTAYRDRMLSLFQDLEPTVNVSAQRLSDQVRVIQRNHRLDDATLDRLRSEVLSNQIVSTSIQTQTAATPTTNAISPRSNPNNDDADDRVVTVSSQCNDELRSALEDALREYRTTPTELRPRLPRLPMHKKNRALVCTLDSLLKNNFESSENLVDTHSILYCGAVAACRLANINFPNIDGTIRPKPAVPAWQYRIERRIDGARVLIGKLHCFREGNTRPRVMRFVRRAFLGTGISPQEYMSRVTERIDFLKQKVCAWASRIRRYKRRVDRYSQNRMFQSDERWVYRAWERPEQNVIDGRRPDDFATITFWRNIWSVPVSHTEGDWMRDVERVCEAIPEMEKIVITPADVAKAVRPLPNWKSPGPDGLQNFWLKWFSNSHAPLASQFQSTLESGSLPEYLTTGVTHLLHKTGNPVEPKNYRPITCLSTVYKLLTSILRAKINRHIENNLIMSASQNGCRNGSRGTKELLLIDMAISQQARRSRKDLSTCWIDYKKAYDSVPHTWLMRVLELYKVDMTLRTFLESCMRQWKTVLRYPGCRPIQGNDEPIRIKRGIFQGDSLSPLWFCLALNPLSTLLEESGLGYRLRRGGQAISHLLYMDDLKLFAPSNLQLMELLKVTETFSSAIRMEFGVDKCAAMHVKRGEIMESEGIQLPDSIHLRSLSSTETYRYLGMSEALGINNADMKQSLKERFFGRLKKVLNSLLSGGNKVRAFNGWVMPVLMYSFGILKWTQTELDALDRRVRTLLTANRMHHPRSSVMRLYISRKCGGRGFLNAKTLHNRELCSLREYFLKTDVGMHRDVVAVDKGLTPLSMAKEDWRKPVILTTDDRKEIWKGKELHGRFYRALHEPDVDFLASVAWLRFSDLFGETEGFICAIMDEVILTNNYRRYIMKDGTVDVCRACHRPGESIRHIISGCSRLANGEYLHRHNQVARIIHQQLALKYNLVDSEVPYYKYVPDPVLENDHVTLYWDRSIITDRTIVANKPDIVVIDRLARRAVIVDVTIPHDENLVKAEKEKQIKYLDLAHEVVDMWNVDSAVIVPMVVTANGLIAKSFDDHLSKLSLRGWIKGLIQKAVLLDTARIVRRFLSLEP

SEQ ID NO: 29638 - protein, 962 aa, Mythimna impura
MHKKNRALVCTLDSLLKNNFESSENLVDTHSILYCGAVAACRLANINFPNIDGTIRPKPAVPAWQYRIEWRIDGARVLIGKLHSFREGNTRPRVMRFVRRAFLGTGISPQEYMSRVTERIDFLKQKVCAWASRIRRYKRRVDRYSQNRMFQSDERWVYRAWERPEQNVIDGRRPDDFATITFWRNIWSVPVSHTEGDWMRDVERVCEAIPEMEKVVITPADVAKAVRPLPNWKSPGPDGLQNFWLKWFSNSHAPLASQFQSTLESGSLPEYLTTGVTHLLHKTGNPVEPKNYRPITCLSTVYKLLTSILRAKINRHIENNLIMSASQNGCRNGSRGTKELLLIDMAISQQARRSRKDLSTCWIDYKKAYDSVPHTWLMRVLELYKVDMTLRTFLESCMRQWKTVLRYPGCRPIQGNDEPIRIKGGIFQGDSLSPLWFCLALNPLSTLLEESGLGYRLRRGGQAISHLLYMDDLKLFAPSNLQLMELLKVTETFSSAIRMEFGVDKCAAMHVKRGEIMESEGIQLPDSIHLRSLSSTETYRYLGMSEALGINNADMKQSLKERFFGRLKKVLNSLLSGGNKVRAFNGWVMPVLMYSFGILKWTQTELDALDRRVRTLLTANRMHHPRSSVMRLYISRKCGGRGFLNAKTLHNREVCSLREYFLKTDVGMHRDVVAVDKGLTPLSMAKEDWRKPVILTTDDRKEIWKGKELHGRFYRALHEPDVDFLASVAWLRFSDLFGETEGFICAIMDEVILTNNYRRYIMKDGTVDVCRACHRPGESIRHIISGCSRLANGEYLHRHNQVARIIHQQLALKYNLVDSEVPYYKYVPDPVLENDHVTLYWDRSIITDRTIVANKPDIVVIDRLARRAVIVGVTIPHDENLVKAEKEKQIKYLDLAHEVVDMWNVDSAVIVPMVVTANGLIAKSFDDHLSKLSLRGWVKGLIQKAVLLDTARIVRRFLSLEP

SEQ ID NO: 29639 - protein, 1195 aa, Notodonta dromedarius
MLTRLQARLRPPGLLPRSASQPLGLIQDETLTTAAASSESDEYFSPPSSPPPVRRRRGRPPGNLGTLGHPALNRILVPGGVVRRMRWTSSINENVMRAYYEATEGGTNLTAYRGRMLSLFQILEPAVNVSAQRLSDQVRVIQRGHMLADSLLDQLRSEALSSRVVPVASSQPVSLPVTTVESWPAVSGDTDRNDTASEVSTQYDGILRSTLEDVVREYRFVPPHVRPRLPRLPMHNKNRALVCSTNMLLSSYFESSENLMDTHSLLYCTAIAVCRVARVKFPDTDVATRPKSAVPAWQCRIERRINEARIFIGKLSCFRAGNTRPRVMRFVRRIFSGTNVGPQEYLNHVTERIDFLKQKVYAWANRIRRYKARVDRYYQNFMFQRDQRWVYRSWEQSSQRDGEVHRPDDDDMIKFWRNIWSVPMTHSEGGWIGDVEQVCEPIQEMDNITIEAKDVANAVRSLPNWKAPGPDGLHNFWLKWLRSSHACLASQFQSALESRLLPEFITTGVTHLLHKSGSTTDPKNYRPITCLPTIYKTLTSVLREKICRHIDDNSIMSASQNGCRSGARGTKELLLIDMAICQQVRRNRKDLSTCWIDYKKAYDSVPHTWLMRVLELYKVNATLRAFLATCMGQWRTVLLYPGSRRILGNGDPIRIERGIFQGDSLSPLWFCLAMNPLSTLLGGSGLGFRLRRGGQVISHLLYMDDLKLFAPTELQLTGLLKVTETFSKSIRMEFGVDKCAVMHVKKGRMVESRCIRLSDSIQLRSLSGTETYRYLGMSQALGICETDMKQSVRERFLGRLKKVLKSVLSGGNKVRAYNGWVMPVLIYSFGILKWSQTELDTLDRTVRTLLTAHRMHHPRSSVMRLYIPRKCGGRGFLNAKTLHNREVFNLREYFLHAVGEMHADVVTVDNALTPLSLGKDNWRRPVVLTTDDRMAVWQGKELHGRYYRALHGPDVDLAASVAWLQFGDLFGETEGFVCAIMDEVVMTNNYRRFIIRDGTIDICRACHRPGESLRHIISGCSRLANGEYLHRHNQVARIVHQQLALKYRLVASEVPYYRYVPEPVLEDGHITLYWDRSIITDRTIVANRPDIVLIDRQERHAVLVDVTVPHDGNLVKAEKDKECKYLDLVHEVVDMWDIDTAIIVPIVVSAHGLIGKSLDKHLKRLSLGSWIKGQIQKAVLLETARIVRKFLSLEP

SEQ ID NO: 29640 - protein, 1203 aa, Atethmia centrago
MLTRSATRTRPPPPDPSLSSASPPPVPSATVSAMSTPTVAVASSSSDEYFSPPSSPTPVRRQGRSRPPKSLGLRGHPAPNRVPAAGGCVQRMKWTQSMNENVMRAYYGSTEGGTNLTAYRVKMLSLFQELEPAVNVSAQRLSDQVRVIQRNRRLDDAALDRLRSEVLSNHIISTPAQTAVHTPIIDVIPPRSNHGVEEEDDRAATVSSQCNVRLRSALEDAFREYRSTPTELRPRLPRLPMHKKNRALMCALDSQLKVFFESSEDLVDTHSILYCAAVAACRLANVKFPNSDGATRPKPAVPAWQCRIERRIDGARVLIGKLYCFREGNTRPRVMRFVRRAFSGTGISPREYMSHITERIDFLKQKVCAWASRIRRYKRRVDRYTQNRMFQSDERWVYRAWERPKQNETDVCRPDDATTTAFWRSIWSVPVCHVEADWMRDVERVCETIPEMEVVIITPSDIARAVRPLPNWKSPGPDGLHNFWLKWLTSSHTCLASQFQSSLESGSLPQFMTTGITHLLHKSGSPAEPKNYRPITCLSTVYKLLTSILRAKINTHIDSNSIMSASQNGCRNGSRGTKEVLLIDMAISQQVRRSRQILLSTCWIDYKKAYDSVPHTWLMRVLELYKIDMTLRTFLESCMGQWRTVLRYPGCRQIQGNDESVWIKRGIFQGDSLSPLWFCLALNPLSMQLEDSGLGYRLRRGGQVISHLLYMDDLKIFAPNKLQLMELLKVTETFSSAIRMEFGVDKCAVMHVKRGEIMESEGIRLSDSIHLRSLSSPESYKYLGMSEALGINVTDMKQSLKERFFGRLKKVLISLLSGGNKVRAFNGWVMPVLMYSFGILKWTQTELDALDRRVRTLLTANRMHHPRSSVMRLYIPRKCGGRGFLNAKTLHNREICSLREYFLKTEVDMHRDVVAVDKGLTPLSMAKENWCKPVVLTTDDRKEIWQNKELHGRFYRALHEPDVDFLASVSWLRFGDLFGETEGFVCAIMDEVILTNNYRRHIMKDGTVDVCRACHRPGESIRHIISGCSRLANGEYLHRHNQVARIIHQQLALKYKLVNSEVPYYKYVPDPVLENDHVTLYWDRSIITDRTIVANKPDIVVIDRLARRAMIVDVTIPHDDNLVKAEKEKQIKYLDLAHEVVDMWNVNSAVIVPIVVTANGLMARSLNHHLSRLTLDGWIKGLIQKAVLLDTARIVRRFLSLES

SEQ ID NO: 29641 - protein, 1075 aa, Abrostola tripartita
MLALFQDLEPAVNVSAQRLSDQVRVILRNHRLDDATLDRLRSEVHSSPVTCRPVHVVVPPIGPPQPSCDMEADDRATTVSTQYNDVLRSTLEDTIREYRASPSGLRPRLPRLPMHNKNKAMISALDSLLSTYFEGSEDLCDTHSILYCAAATACRVANVKCFDSSTATRPKPAVPAWQCRIERRIAEARALIGKLIAFREGNTRPRVMRFVRRAFAGVDINPREYAARATERIDFYKQKVYAWASRIRRYKRRVDRFTQNRIFNQDQRWVYRNWERSAQGVSDGHLPDDDVTNAFWRSIWSVPVNHTEGSWMLDVEQSCESIPEMGTITISPQDVASAVRPMSNWKSPGPDGLHNFWIKWLRSSHGCLASQFQSALEVGSLPQFLTTGSTHLLHKTGSTTDPKNFRPITCLPTIYKLLTSILRAKITKHIDDNNIMSASQNGCKNGSRGTKELLLIDMTICQQVRRSKKDLSTCWIDYKKAYDSVPHTWLMRVLELYKIDTTLRTFLLSCMRQWRTVLHYPGCRDIQQDGEPIRIERGIFQGDSLSPLWFCLALNPLSTLLENSGLGYSLRRRSQVISHLLYMDDLKLFAPSRFQLIKLLKITEAFSNSIRMEFGVDKCAVMHVKRGGIIESQGIQLSDSINLRSLSATETYKYLGISEALGINVVDMKQSLKERFFGRLNKVLKSLLSGGNKVRAFNGWVMPTLMYSFGILKWTQTELDALDRRVRTLLTSNRMHHPRSSVMRLYIPRKCGGRGFLNAKTLHNREVCSLREYFLRTEVGMHREVVAVDKGLTPLFLAKENWCKPVVLSVNDRRDVWQSKELHGRFYKALHGPNVDLLSSVSWLRFGDLFGETEGFVCAIMDEVIMTNNYRKYILKDGTVDICRACHRPGESLRHIMSGCSRLANGEYLHRHNQVARIIHQQLALKYKLVDSEMPYYRYVPDPVLENDHITLYWDRSIITDRTIVANKPDIVVIDRLERRAMIVDITIPHDENLVKAERDKQIKYLDLAHEVVDMWEVDSAIIVPIVVSANGLMAKSLDQHLKRLTLGGWVKGLMQKAVLLDTARIVRRFLSLEP

SEQ ID NO: 29642 - protein, 1201 aa, Mesoligia furuncula
MLTRLAARRARLPPPDSSLSSAPPPPESSPIVSAVTPAVAVASSSSDEYFSPPTSPTPVRRQGRGRPPNSLGLRGHPAPSRVPATGGCVQRMRWTQSMNENVMRAYYRSTEGGINLTAYRDRMLSLFQELEPTVNVSAQRLSDQVRVIQRNHRLDDIALDRLRSEVLSNHIVSTSAQTAAQASTVDAIPPRSNHVEEEDDRIDTVSSQCNVRLRSALEDALCEYRSTPTELRPRLPRLPMHKKNRALVCALDSQLKNFFESSEDLVDTHSILYCAAVAACRLANVKFPSCDGATRPKPAVPAWQRRIERRIDGTRVLIGKLYCFREGNTRPRVMRFVRRAFSGTGISSREYISRVTERIDFLKQKVCAWASRIRRYKRRVDRYTQNRMFQSDERWVYRAWERPEQNVTDVYRPDDATTSAFWCSIWSVPVCHTEAGWMRDVERVCESVPEMETVLITPSDVAKAVRPLPNWKSPGPDGLHNFWLKWLISSHTCLASQFQSSLESGSLPQFLTTGVTHLLHKSGSPAEPKNYRPITCLSTVYKLLTSILRAKINTHIESNSIMSASQNGCRNGSRGTKELLLIDMVISQQVRRSRKDLSTCWIDYKKAYDSVPHTWLMKVLELYKIDATLRTFLESCMRQWKTVLRYPGCRQIQGNDEPVWIKRGIFQGDSLSPLWFCLALNPLSTLLEDSGLGYRLRRDGQVISHLLYMDDLKLFAPNKLRLMELLKVTETFSSAIRMEFGVDKCAVMHVKRGEIMESEGIQLSDSISLRSLSSSESYKYLGMSETLGINDADMKQSLKERFFCRLKKVLISLLSGGNKVRAFNGWVMPVLMYSFGILKWTQTELDALDRRVRTLLTANRMHHPRSSVMRLYIPRKSGGRGFLNAKTLHNREVCSLREYFLKAEVGMHRDVVAVDKGLTPLSMAKENWRKPVVLSTDDRKKVWQSKELHGRFYRALHEPGVDFLASISWLRFGDLFGETEGFVCAIMDEVILTNNYRRHIMRDGTVDVCRACHRPGESIRHIISGCSRLANGEYLHRHNQVARIIHQQLALKYKLVDSEVPYYKYVPDPVLENDHVTLYWDRSIITDRTIVANKPDIVVIDRLARRTMIVDVTIPHDGNLVKAEKEKQIKYLDLAHEVVDMWNVSSAIIVPIVVSANGLMAESLDQHLSRLSLGGWIKGLIQKAVLLDTARIMRRFLSLEP

SEQ ID NO: 29643 - protein, 1112 aa, Busseola fusca
MLTRSAAARRAQPPPPDSSLSSASSPPVPSLTASAVTTPAAAVASSSSDEYFSPPTTPPPARRRGRRRPPDGFGPRGPPASDRVPAPGGSVQRMRWTRSINENVMRSYYGATEGGNNLTAYRVRMLSLFQVLEPAVNVSAQRLSDQVRVIQRNHMLDDTVLDRLRNEMQSSRVITHQSQTAAVPSQSISYADEGSNDRATNVSTQCNEELRNALETAIREYRSMSPELRPRLPRLPMHNKNRALVAALDAQLSNHFDACENLTDTHSILYCAAVAACRVAHVKFANNSRATRPKPAVPAWQRRIERRIGGARALIGKLICFREGNTRPRVMRFVRRAFSGTNISPQDYMSRVTERIDFLKQKVYAWANRIRRYKRRVERYTQNCRFQSDERWVYRDWERPDQGLADTCLPDDDAMCAFWRNIWSVPVSHTEGEWARDVERTCDLIPEMGAITICPQDVARAVRPLPNWKSPGPDGLHNFWIKWFSRSHARLASQFQIALDSGSLPQFLTTGVTHLLHKSGSTAEPKNYRPITCLPTVYKVFTSILRAKINKHIDTNSIMSASQNGCRNGSRGTKELLLIDMAISQQVRRSRKDLSTCWIDYKKAYDSVPHTWLMRVLELYKVDATLRTFLMTCMGQWRTVLRYPGCRNIQRNSEPIRIERGIFQGDSLSPLWFCLALNPLSTLLEDSGLGYRLRRGGQVISHLLYMDDLKLFAPNNLQLMALLKITETFSSAIRMEFGVDKCAVMHVKRGEIVESVGTQLSGSTNLRALSASETYKYLGMSEALGINVTDMKQSLKERFFGRLKKVLNSLLSGGNKVRAFNGWVMPVLMYSFGILKWTQTELDALDRRVRTLLTANRLHHPRSSVMRLYVPRKCGGRGFLNAKTLHNREICSLREYFIETDVGMHRDVVAVDKGLTPLSLAKENWRKPVVLDTNDRLEVWQSKELHGRFYRALHGPDVDLLASVAWLRFGNLFGETEGFVCAIMDEVMMTNNYRRYIVKDGTVDICRACHRPGESIRHIISGCSRLANGEYLHRHNLVARIIHQQLALKYNLVESEVPYYRYVPDPVLENGNITLYWDRSIITDRTIVANKPDIVMVDRSERRAMIVDITIP

SEQ ID NO: 29644 - protein, 1220 aa, Sesamia nonagrioides
MSNREILEKIENNIEDVDKICRSPCTLTTSGLVAQLRLAAAGLQPHCERCDDPGRGSCVELERRVFLSADDATTCSPTRRGGRRPPDCLGPRGPPASDRAPATGGNVQRMKWTQSINGNVMRAYFGATEGGSNLTAYRGRMLSLFQVLEPAVNVSAQRLSDQVRVIQHNHMLDDVVLDRLRLESRNSHVTPASSLVAVQLNSVPSRPNLVDEEDDDEAISVTPQCNEKVRSALEDAFREYRSTPPELRPRLPRLPMHKKNKALVCALDSQLSNYLKDSKDLADTHSILYCGAVAICRVAHVKFPDSDRATRQKPAVPAWQCRIERRIGETRALIGKLISFREGNTRPRVMRFVRRAFSGTDVSTRDYLLRVTERIDFLKQKIYAWANRIRRYRRRVERYSQNRNFQSDERWVYRAWERSDQGVTDTCLPDDDATRSFWRNIWSVPVSHTEGGWTRDVERACDPVPEMGAITICPQDVARAVRPLPNWKSPGPDGLHNFWIKWFSGSHACLASQFQTALESGSLPQFLTTGITHLLHKSGSTAEPKNYRPITCLPTVYKVLTSILKAKINTHIDSNSIMSASQNGCRNGSRGTKELLLIDMAISQQVRRSRKDLSTCWIDYKKAYDSVPHTWLMRVLELYKVDATLRTFLMTCMSQWRTVLRYPGCRNIQRNSEPIRIERGIFQGDSLSPLWFCLALNPLSTLLEDSGLGYQLRRGGQVISHLLYMDDLKLFAHTNSQLKELLKITETFSSAIRMEFGVDKCAVMHVQRGEIVESVGTQLTGSINLRSLSASETYKYLGMSEALGINVTDMKQSLKERFFGRLKKVLNSLLSGGNKVRAFNGWVMPVLMYSFSILKWTQTELDALDQRVRTLLTANRLHHPRSSVMRLYIPRKCGGRGFLNAKTLHNRELCSLREYFLKTDVGMHRDVVAVDKGLTPLSLAKENWRKPVVLETNDRMEVWQSKGLHGRFFRALRGPDVDFQASVAWLRYGDLFGETEGFVCAIMDEVMMTNNYRKFIVKDGTVDICRACHRPGESIRHIISGCSRLANGEYLHRHNLVARIIHQQLALKYNLVESEVPYYRYMPDPVLENGHITLYWDRSIITDRTIVANKPDIVMVDRSEGRAVIVDITIPHDENLVKAEKDKQIKYLDLAHEVVDMWEVDSAIIVPIVVTANGLIAKSLDQHLRRLSLGGWIKGLIQKADCWTRLALSGSSSLWSPDRR

SEQ ID NO: 29645 - protein, 1110 aa, Amphipyra berbera
MLTRSRSKLQDPKTRPRPSASSLSSASQPPDSSIVSDVTPAAAVASSSSDEYFSPPSSPPPPRRRGRGRPPACMGPRGPPASDRVPAPGGSVQRMRWTQSMNENCMRAYFGATEGGTNLTAYRGRMLSLFQVLEPAVNVSAQRLSDQVRVIQRDHRLTDAALDRLRSEVQSNRIISPQSQTAAQPQAPTVVLPPPIHADEESDDRVTNVSTQCNERLRSALELAIQEYRFTPPNLRPRIPRLPMNKKNRALMCALDSLLSSYFDNSESLEDTHSILYCAAVAACRVAHVKFDNNDRATRPKPVAPAWQCRIERRINEARALIGKLICFREGNTRPRVMRFVRRAFSGTEINPRDYMSCVTERIDFLKQKVFAWANRIRRYKRRVERYTQNRMFYSDERLVYRTWERPDECVSDTHLPDSDAMNTFWRNIWSMPVTHTEGDWMQEVQRACEPIEEMGDITIVPQDVTCAVRPMSNWKSPGPDGLHNFWLKWLRSSHARLASQFQSSLESGSLPEFLTTGVTHLLHISGSTTEPKNYRPITCLPTVYKLLTSILRAKINSHIINNSIMSVSQNGCKNGSRGTKELLLIDMAISQQVRRSRKDLATCWIDYKKAYDSVPHTWLMRVLELYKVNTTLCAFLTSCMGQWRTVLHYPGCRQIQGRGEPIRIERGIFQGDSLSPLWFCLALNPLSTLLEGSGLGYRLRRGGQVISHLLYMDDLKLFAPNNLQLMKLLKVTETFSNSIRMEFGVDKCAVMHVKRGGIMESVGTQLSDSIQLRSLSSTETYKYLGMSEALGINETDMKQSLRERFYGRLKKVLKSLLSGGNKVRAFNGWVMPVLMYSFGILKWTQTELDALDRRVRTLLTAYRMHHPRSSVMRLYIPRKCGGRGFLNAKTLYNREVCSLREYFLQADVGMHRDVVAVDKGFTPLSLAKENWRKPVVLDTNGRREVWQSKELHGRFYRALHGPDVDFLASVAWLRFGDLFGETEGFVCAIMDEVMMTNNYRKYIVKDGTVDICRACHCPGESIRHIISGCSRLANGEYLHRHNLVARIIHQQLALKYNLVDAEVPYYKYVPDPVLENGHITLYWDRSVITDRTIVANKPDIVVIEQSVSQ

SEQ ID NO: 29646 - protein, 1203 aa, Noctua janthe
MLTRSRAKHQAHPPSPDSSLSSASQPPGRASIVSAVSPIAAVASSSSDEFFSPPSTPSPPRRRGRGRPPAGLGPRGQQAPNRVPAAGGNVSRMRWTQSINENVMRAYYGATEGGSNLTAYRGRMLSLFQVLEPGVSVSAQRLSDQVRVIQRNHMLDDTVLERLRFDSRSNLVIPASPMIAVQLQNVSSAPPRSEHDGEEDDDEVISVSTQCNAQLRSALEGAFREYRSTPPELRPRLPRLPMHKKNKALVCALDSQLSNCFDSSKDLADTHSILYCGAVAACRVAHVKFPNNDRATRPKFAVPAWQCRIERRIGKARALIGKLICFREGNTRPRVLRFVKRAFSGTDVSFRDYLARVTERIDFLKQKICAWASRIRRYKRRVERYTQNRTFRSDERWVYRAWERPDQGVTDTRLPDDDAMCSFWRNIWSVPVSHTEGDWTREVERACDSIPEMGAIIISPQDVARAVRPLPNWKSPGPDGLHNFWIKWFQRSHVRLASQFQSALESGSLPQFLTTGITHLLHKSGSTAEPKNYRPITCLPTVYKVLTSILRAKINHHIDSNSIMSASQNGCRNGSRGTKELLLIDMAISQQVRRSRRDLSTCWIDYKKAYDSVPHTWLMKVLELYKVDATLRTFLMSCMGHWRTVLRYPGCRQIQGNSEPIKIERGIFQGDSLSPLWFCLALNPLSTLLEGSGLGYRLRRGGQVISHLLYMDDLKLFAPNNLQLMKLLKVTETFSSAIRMEFGVDKCAVMHVKRGEIMESVGTQLSDSIHLRSLSSTETYKYLGMSEALGINTADMKQSLRDRFFGRLNKVLSSLLSGGNKVRAFNGWVMPVLMYSFGILKWTQTELDALDRRVRAMLTANRMHHPRSSVMRLYIPRKCGGRGFLNAKTLHNREICSLREYFLEVDEGMHRDVVSVDKGLTPLSLANENWRKPRVLDTNDRKEVWQGKELHGRFYRALHGPDVDFLASVSWLRFGDLFGETEGFVCAIMDEVMMTNNYRKYIVKDGTVDICRACHRPGESIRHIISGCSRLANGEYLHRHNLVARIIHQQLALKYNLVESEVPYYKYAPDPVLDNGNITLYWDRSIITDRTIVANKPDIVVIDRLERRAMIVDITVPHDENLVKAEKDKQFKYLDLAREVVDMWDVSTAVIVPIVVSANGLIANSLDKHLKRLSVGSWIKGLIQKAVLLDTARIVRRFLSQEP

SEQ ID NO: 29647 - protein, 960 aa, Mythimna ferrago
MHKRNRALVCALDSQLSICFDSSEDLADTHSILYCAAVAACRVAHVKFPNCNRATRPAVPAWQCRIERRIGEARALIGKLICFREGNTRPRVMRFVRRAFSGTDISPRDYLPCVTERIDFLKQKVYAWANRIRRYKRRVERYTQNRTFQSNERWVYRAWERPDQGVTDTRLPDDDAMCSFWRSIWSAPVSHTEGDWIREVERACDLLPEMGAITINPQDVARAVRPLPNWKSPGPDGLHNFWLKWFQRSHARLASQFQSALESGSLPLFLTTGITHLLHKSGSTAEPKNYRPITCLPTVYKVLTSILRAKINSHIETNSIMSVSQNGCRNGSRGTKELLLIDIAISQQVRRSRKNLSACWIDYKKAYDSVPHTWLMRVLELYKVDATLCTFLMSCMGQWRTVLHYPGCRQIWENSEPIRIERGIFQGDSLSPLWFCLALNPLSTLLEGSGLGYRLKRGGQVISHLLYMDDLKLFAPNNLQLMELLKVTETFSSAIRMDFGVDKCAVIHVKRGEIMESEGIQLSDSIHLRSLSSTETYKYLGMSEALGINTDDVKQSLKERFFGRLNKVLNSLLSGGNKVRAFNGWVMPVLMYSFGILKWTQTELDALDRRVRTLLTANRMHHPRSSVMRLYIPRKCGGRGFLNAKSLHNREVCSLREYFLAVDVGMHRDVVAVDKGLTPLSLANENWRKPLVLDTNDRREVWQGKELHGRFYRALHGPDVDLLASVSWLRFGDLFGETEGFVFAIMDEVMMTNNYRKYIVKDGTVDICRACHRPGESIRHIISGCSRLANGDYLHRHNLVARIIHQQLALKYNLVESEVPYYRYVPDPVLDNGSITLNWDRSIITDRTIVANKPDIVVIDRLERRTMIVDIAVPHDENLVKAEKDKQIKYLDLAREVVDMWEVDRAIIVPIVVSANGLIAKSLEQHLRRLSLGSWIKGLIQKAVLLDTARIVRRFLSQEP

SEQ ID NO: 29648 - protein, 1200 aa, Mythimna ferrago
MLTRSRARRLETHPTTSGSPLNSASQPPGPAPAVSPLIPEAAVASSSSDEYFSPPTTPPPARRRGRGRPPASLGPRGPPASDRVPAVGGSVQRMRWTSSINENVMRSYFGATEGGINLTAYRGRMLSLFQVLEPAVNVSVQRLSDQVRVIQRNRMLDDAVLDRLRLESQSSRVSAATPSAAAQRQPSAAPRPDHVSDADDDAAISVSTQCNERLRGALEDAFREYRSIPPELRPRLPRLPMHKRNRALVCALDSQLSICFDSSEDLADTHSILYCAAVAACRVAHVKFPNCNRATRPAVPAWQCRIERRIGEARALIGKLICFREGNTRPRVMRFVRRAFSGTDISPRDYLPCVTERIDFLKQKIYAWANRIRRYKRRVERYTQNRTFQSNERWVYRAWERPDQGVTDTRLPDDDAMCSFWRSIWSAPVSHTEGDWIREVERACDLLPEMGAITISPQDVARAVRPLPNWKSPGPDGLHNFWLKWFQGSHARLASQFQSALESGSLPQFLTTGITHLLHKSGSTAEPKNYRPITCLPTVYKVLTSILRAKINSHIETNSIMSVSQNGCRNGSRGTKELLLIDIAISQQVRRSRKNLSACWIDYKKAYDSVPHTWLMRVLELYKVDATLRTFLMSCMGQWRTVLHYPGCRQIWENSEPIRIERGIFQGDSLSPLWFCLALNPLSTLLEGSGLGYRLKRGGQVISHLLYMDDLKLFAPNNLQLMELLKVTETFSSAIRMDFGVDKCAVIHVKRGEIMESEGIQLSDSIHLRSLSSTETYKYLGMSEALGINTDDVKQSLKERFFGRLNKVLNSLLSGGNKVRAFNGWVMPVLMYSFGILKWTQTELDALDRRVRTLLTANRMHHPRSSVIRLYIPRKCGGRGFLNAKSLHNREVCSLREYFLAVDVGMHRDVVAVDKGLTPLSLANENWRKPLVLDTNDRREVWQGKELHGRFYRALHGPDVDLLASVSWLRFGDLFGETEGFVFAIMDEVMMTNNYRKYIVKDGTVDICRACHRPGESIRHIISGCSRLANGDYLHRHNLVARIIHQQLALKYNLVESEVPYYRYVPDPVLDNGSITLYWDRSIITDRTIVANKPDIVVIDRLERRTMIVDIAVPHDENLVKAEKDKQIKYLDLAREVVDMWEVDRAIIVPIVVTANGLIAKSLEQHLRRLSLGSWIKGLIQKAVLLDTARIVRRFLSQEP

SEQ ID NO: 29649 - protein, 1197 aa, Eilema sororculum
MLTRAKAKQATNYAQPTPSDSSCSSASQPPESTSPRPATVEASSSDEYFSPPTSPTPVRRPGRGRPPSSLGSRGPPASNRAPAAGGNVRRMRWTSSMNENVMRAYFVATGGGTNLTAYRDRMLILFQDLEPTVNVSAQRLSDQVRAIQRCHLLDSSVLERLRSDLQNNDIIPPLPQAVMQEVPQETQPVHTDCELDNIATSVSTQYIDQIRNALECAVRDYRSMNYQIRPRLPRLPVHKRNIALVCALDSLLPNYLDNSEHLGDTHSILYCAAYAACRVAGVKFPECNTAIRPKSGKPRWQCRIERRIAETRALIGKLICFRSGNTRPRVMRFVNRVFSGTGVSPSDYTSRVTERIDFLKQKVYAWANRIKRYKKRCDRYTLNRTFQRDERWVYRNWERADSVGDEHFPDVAATNTFWRNIWSVPVAHTEGDWVREVKRSCEAIETMEPIIISEDDIACVVRSLPNWKAAGPDGLHNFWLKWLRSSHARLASQFQSALESGSLPSFMTTGITHLLYKSGCAMNPKNYRPITCLPTVYKLLTSVLRVKITSHITRNSILSYSQNGCRSGARGTKELLIIDTAVNQQVRRNRRDMATCWIDYKKAYDSVPHTWLLRVLELYKVDTTLCTFLKACMGQWSTALRYPGCRHIPNDGELIKIERGIFQGDSLSPLWFCLALNPLSTMLEDSGLGYCLRRGSQVISHLLYMDDLKLFAPNNRQLMELLKITETFSTSIRMEFGVDKCAVMHVKKGEIVESEGIELSDSTKLRSLSVNNNYKYLGMSQALGVNESGMKQSLRERFFCRLKKVLKSLLSGGNKVRAYNDWVIPVLTYSFGILRWTQTELEALDRRVRTLLTAYRMHHPRSSVMRLYIPRKFGGRGFLNIKTLHNREICNLREYFLKVNVDVHRDVVAVDRGLTPLALAKENWRKPAILSINDRKEVWKSKELHGRFHRALYGPDVDLKASVSWLRFGDLFGETEGFVCAITDEVVMTNNYRRYILKDGTVDICRACHRPGESLRHIISGCSRLANGEYLHRHNQVARIVHQQLALKYKLVDSEVPYYRYVPDPVLDDGRVTLYWDRSIITDRTIIANKPDIVVIDRLERRAIIIDVTIPHDENLVKAEKDKQIKYLDLAHEVVDMWNVDSAIIVPIVVSVHGLIAKSLDQHLKRLALDSWVKGLMQKAVILDTARIVRRFLSLEP

SEQ ID NO: 29650 - protein, 1203 aa, Agrochola circellaris
MLTRSAAHRARLPPPDSPLSSASPPPVPSPIVSAASTPTAVVASSSSDEYFSPPTSPIPVRRQGRGRPPRSLGLRGQPAPSRVPAAGGCVQRMRWTQSMNENVMRAYYGSTEGGTNLTAYRVRMLSLFQELEPTANVSAQRLSDQVRVIQRNHRLDDAALDRLRSEVLSNHIVSTPAQTEAQASSIDAIPPRSNHGVAEDNDRAATVSSQCNVRLRSALEDAFREYRYTPTELRPRLPRLPMHKKNRALVCALDSQLRNYFENSEDLIDTHSILYCAAVAACRLANVKFPNYDGVTRPKPAVPAWQCRIEQRIDGARALIGKLYCFREGNTRPRVMRFVRRAFSGTGISPREYMPRVTERIDFLKQKVCAWASRIRRYKRRVERYTQNRMFQSDERWVYRAWERPEQNVADVCRPDDAATSAFWRSIWSVPVCHAEADWMQDVERVCETIPEMDKIEITPLDIAKAVRPLPNWKSPGPDGLHNFWLKWLISSHTCLASQFQSSLESGSLPQFLTTGVTHLLHKSGSPAEPKNYRPITCLSTVYKLLTSILRAKINTHIDNNSIMSASQNGCRNGSRGTKELLLIDMAISQQVRRSRKDLSTCWIDYKKAYDSVPHTWLMRVLELYKIDATLRTFLMSCMGQWRTVLRYPGCRQIQGNDEPVWIKRGIFQGDSLSPLWFCLALNPLSTLLEDSGLGYRLRRGGQVISHLLYMDDLKLFAPNKLRLMELLKVTETFSSAIRMEFGVDKCAVMHVKRGEIMESEGTQLSESIHLRSLSSSESYKYLGMSEALGINVADMKQSLKERFFGRLKKVLISLLSGGNKVKAFNGWVMPVLMYSFGILKWTQTELDALDRRVRTLLTANRMHHPRSSVMRLYIPRKCGGRGFLNAKTLHNREVCNLREYFLKAEVGMHRDVVAVDKGLTPLSMAKENWHKPVVLTTDDRKEVWQSKELHGRFYRALHEPGVDFLASVSWLRFGDLFGETEGFVCAIMDEVILTNNYRRYIMKDGTVDVCRACHRPGESIRHIISGCSRLANGEYLHRHNQVARIIHQQLALKYKLVVSEVPYYKYVPDPVLENDHVTMYWDRSIITDRTIVANKPDIVVIDRLARRAMIVDVTIPHDGNLVKAEKEKQIKYLDLAHEVVDMWNVSSAIIVPIVVTANGLMAESLDQHLSRLSLGGWIKGLIQKAVLLDTARIVRRFLSLQP

SEQ ID NO: 29651 - protein, 1203 aa, Eupsilia transversa
MLTRSAVRRARLPPPDSPLSSASPPPVPSPIVSAVSTPAAVVASSSSDEYFSPPTSPTPVRRQGRGRPPKSLGLRGQPAPSRVPAAGGCVQRMRWTQSMNENVMRAYYGSTEGGINLTAYRVRMLSLFQELEPTVNVSAQRLSDQVRVIQRNHRLDDAELDRLRSEVLSNHIIPSPAQTAELATPSNVIPPRSNRGLEQEDDRVATVSSQCNDRLRNALEDAFREYRYTPTELRPRLPRLPMHKKNRALVCALDSQLKNFFESSEDLIDTHSILYCAAVAACRLANVKFPNCDAATRPKPAVPAWQCRIERRVDGARVLIGKLYCFREGNTRPRVMRFVRRAFSGTGISPQEYMSRVTERIDFLKQKVCAWASRIRRYKRRVDRYTQNRMFQSDERWVYRAWERPEQNVADVCRPDDAATSAFWRSIWSVPVCHAEAGWMHGVERVCEAIPEMEAVIITPLDVAKAVRPLPNWKSPGPDGLHNFWLKWLISSHTRLASQFQSSLESGSLPQFLTTGVTHLLHKSGSPAEPKNYRPITCLSTVYKLLTSILRAKINSHIDSHSIMSASQNGCRNGSRGTKELLLIDMAISQQVRRSRKDLSTCWIDYKKAYDSVPHTWLMRVLELYKIDATLRTFLMSCMGQWRTVLRYPGCRQIQGNDEPVWIKRGIFQGDSLSPLWFCLALNPLSTLLEESGLGYRLRRGGQVISHLLYMDDLKLFAHNKLRLMELLKVTETFSSAIRMEFGVDKCAVMHVKRGEIMESEGTQLSDSIHLRSLSSTESYKYLGMSEALGINVADMKQALKERFFGRLKKVLISLLSGGNKVRAFNGWVMPVLMYSFGILKWTQTELDALDRRVRTLLTANRMHHPRSSVMRLYIPRKCGGRGFLNAKTLHNREVCSLREYFLKTEEGMHRDVVAVDKGLTPLSMAKENWRKPVVLTTDDRKEVWQSKELHGRFYRVLHEPGVDFLASVSWLRFGDLFGETEGFVCAIMDEVILTNNYRRHIMKDGTVDVCRACHRPGESIRHIISGCSRLANGEYLHRHNQVARIIHQQLALKYKLADSEVPYYKYVPDPVLENDHVTLYWDRSIITDRTIVANKPDIVVIDRLARRAMIVDVTIPHDENLVKAEKEKQIKYLDLAHEVVDMWNVSSAIIVPIVVTANGLMAESLDQHLLRLSLGGWIKGLIQKAVLLDTARIVRRFLSLQP

SEQ ID NO: 29652 - protein, 1201 aa, Amphipyra tragopoginis
MLTRARTREARPPPPDSPLSSASQPPESSPTVSAVTPAAAVASSSSDEYFSPPTSPTPVRRQGRRRPPNSLGPRGPPAPSRVLATGGCVQRMKWTQSINENVMRAYYGSTEGGTNLTAYRVRMLTLFQELEPAINVSAQRLSDQVRVIQRNHRLDDAALDRLRLEVQNSRVTPVPSQTAVHHININVVPPRSDCVDGNVDDRAVTVSSQYNDRLRSALEDAIREYRANPELRPRLPRLPMHNKNRALVCALDSLLSSYFESSEDLVDTHSILYCAAVAACRVANVKFNNSERATRPKPAIPAWQCRIERRIDGARALIGKLICFREGNTRPRVMRFVRRAFSGTGISPREYMSQVTERIDFLKQKVCAWASRIRRYKRRVERYAQNRMFQCDQRWVYRAWERPDQGVSDGRLPDDDAMSSFWRSIWSVPVTHTEGDWTRDIERACEPIEEMGEILISPQDVASAARPLPNWKSPGPDGLHNFWIKWLRSSHARLASQFQSSLESGSLPQFLTTGVTHLLHKSGSTAEPKNYRPITCLPTVYKLLTSILRTKINTHVENNSIMSPSQNGCRNASRGTKELLLIDMAISQQVRRSRKNLSTCWIDYKKAYDSVPHTWLMRVLELYKINTTLRTFLTSCMRQWRTVLRYPGCRPILGSGEPISIERGIFQGDSLSPLWFCLALNPLSTLLEGSGLGYPLRRGGQVVSHLLYMDDLKLFAPTKLQLVELLKVTETFSNSIRMEFGVDKCAVMHVRRGGIMESEGLQLSDSIHLRSLSANDTYKYLGMSEGLGISEADMKQSLRERFFGRLEKVLKSLLSGGNKVRAFNGWVMPVLMYSFGILKWTQTELDALDRRVRTLLTANRMHHPRSSVMRLYIPRKCGGRGLLNAKTLHNREVCSLREYFLHADAGMHRDVVAVDKGLTPLNLAKENWRKPVVLSTNDRREVWQSKELHGRFYRALHGPDVDFLASVSWLRFGDLFGETEGFVCAIMDEVIMTNNYRKYIVKDGTVDICRACHCPGESLRHIISGCSRLANGEYLHRHNQVARIIHQQLALRYNLVESEVPYYKYVPDPVLENGHITLYWDRSIITDRTIVANKPDIVVIDRSERRTVIVDVTIPHDENLVKAEKDKQIKYLDLAHEVVNMWDVDSATIVPIVVTANGLMAKSLDQHLKRLSLGGWIKGLIQKAVLLDTARIVRRFLSLEP

SEQ ID NO: 29653 - protein, 1110 aa, Amphipyra tragopoginis
MKWTQKINENVMRAYYGSTEGGTNLTAYRVRMLTLFQELEPAINVSAQRLSDQVRVIQRNHRLDDAALDRLRLEVQNSHVTPVPSQTAVHQLNISVVPPRSDCVDGDVDDRAVTVSSQYNDQLRSALEDAIREYRANPELRPRLPRLPMHNKNRALVCALDSLLSSYFESSEDLCDTHSILYCAAVAACRVANVKFNNSERATRPKPAVPVWQCRIERRIDEARALIGKLICFREGNTRPRVMRFVRRAFSGTGIRPREYISRVTERIDFLKQKVYAWASRIRRYKRRVERYTLNRMFQCDQRWVYRAWERPDQGVNEGRLPDDDAMNSFWRSIWSVPVIHTEGDWTRDIERACEPIEEMGEIFISPQDVASAVRPLPNWKSPGPDGLHNFWIKWLRSSHARLASQFQSSLESGSLPQLFTTGVTHLLHKSGSTAEPKNYRPITCLPTVYKLLTSILRTKINTHVENNSIMSPSQNGCRNGSRGTKELLLIDMAISQQVRRSRKNLSTCWIDYKKAYDSVPHTWLMRVLELYKINATLRTFLMSCMGQWRTVLRYPGCRTIRGSDEPISIERGIFQGDSLSPLWFCLALNPLSTLLEGSRLGYPLRRGGQVVSHLLYMDDLKLFAPTKLQLVELLKVTETFSNSIRMEFGVDKCAVMHVRRGGIMESEGLQLSDSIHLRSLSANDTYKYLGMSEGLGISEADMKQSLKERFFGRLKKVLKSLLSGGNKVRAFNGWVMPVLMYSFGILKWTQTELDALDRRVRTLLTANRMHHPRSSVMRLYIPRKCGGRGLLNAKTLHNREVCSLREYFLHADAGMHRDVVAVDKGLTPLNLAKENWRKPVVLSTNDRREVWQSKELHGRFYRALHGPDVDFLASVSWLRFGDLFGETEGFVCAIMDEVIMTNNYRKYIVKDGTVDICRACHCPGESLRHIISGCSRLANGEYLHRHNQVARIIHQQLALKYNLVESEVPYYKYVPDPVLENGHITLYWDRSIITDRTIVANKPDIVVIDRSERRTMIVDVTIPHDENLVKAEKDKQIKYLDLAHEVVNMWDVDSATIVPIVVTANGLMAKSLDQHLKRLSLGGWIKGLIQKAVLLDTARIVRRFLSLEP

SEQ ID NO: 29654 - protein, 1200 aa, Amphipyra tragopoginis
MLTRSKARARDAHPPPPDSSPSSASQQQGLDPASPAAAVASSSSDEYYSPPSSPPPARRRGGTRPPGGLGLRGPLASDRVPAPGGIVPRMKWTQKMNESVMRAYYGATEGGTNLTAYRSRMLSLFQVLEPAVNVSAQRLSDQVRVIQRGHMLDDTVLDRLRSEVQSSPVISPSSQVLEQQQNLAAALPRPNRADEEDDDRVANVSTQCNDELRSALEDAMREYRYTRSDLRPRIPRLPMHRKNRALVCALDSLLSNYFDGSEDLGDTHSILYCAAVAACRVAHVKFTDNERATRPKNSVPAWQCRIERRISEARALIGKLVCFREGNTRPRVMRFVRRAFSGTDVSPREYMSRVTERIDFLKQKVYAWANRIRRYRRRVDRYTQNRLFQSDERWVYRTWERPDQRVGDTRLPDNDVMNTFWCNIWSVPVAHTEGDWMQEVQRACEPIQEMGDIIISPQDVASAVRPMSNWKSPGPDGLHNFWLKWLRSSHARLASQFQSSLESGSLPQFLTTGVTHLLHKSGSTAEPKNYRPITCLPTVYKVLTSILRTKINNHIDNNSIMSASQNGCRNGSRGTKELLLIDMAISQQVRRSRKDLSTCWIDYKKAYDSVPHTWLMRVLELYKVNTTLCAFLTSCMGQWRTVLRYPGCRQIQGIGEPIRIERGIFQGDSLSPLWFCLALNPLSTLLEGSGLGYRLRRGGQVISHLLYMDDLKLFAPNNLRLLELLKVTETFSNSIRMEFGVDKCAVMHVKRGRIMESVGTQLSDSIQLRSLSSTETYKYLGMPEALGVNETDMKQSLKERFFGRLKKVFNSLLSGGNKVRAFNGWVMPVLMYSFGILKWTQTELDALDRRVRSLLTANRMHHPRSSVMRLYIPRKCGGRGFLNAKTLHNREVCSLREYFSQADVGMHRDVVAVDKGFTPLSLAKENWRKPVVLDTNGRREVWRSKELHGRFYRALHGPDVDFLASVAWLRFGDLFGETEGFVCAIMDEVMMTNNYRKYIVKDGTVDICRACHCPGESIRHIVSGCSRLANGEYLHRHNLVARIIHQQLALKYNLVDAEVPYYRYVPDPVLENGHVTLYWDRSIITDRTIVANKPDIVVIDRSERLTMIVDITVPHDENLVKAEKDKEIKYQDLAHEVVAMWDVDSAIIVPIVVTANGLIAKSLDQHLKRLSLGSWIKGLIQKAVLLDTARIVRKFLSLRP

SEQ ID NO: 29655 - protein, 868 aa, Amphipyra tragopoginis
MRFVRRAFSGTGIRPREYISRVTERIDFLKQKVYAWASRIRRYKRRVERYTQNRMFQCDQRWVYRAWERPDQGVSDGRLPDDDAMNSFWRSIWSVPVIYTEGDWTRDIERACEPIEEMGEILISPQDVASAVRPLPNWKSPGPDGLHNFWIKWLRSSHARLASQFQSSLESGSLPQFFTTGVTHLLHKSGSTAEPKNYRPITCLPTVYKLLTSILRTKINTHVENNSIMSPSQNGCRNGSRGTKELLLIDMAISQQVRRSRKNLSTCWIDYKKAYDSVPHTWLMRVLELYKINATLRTFLMSCMGQWRTVLRYPGCRPIRGSDEPISIERGISQGDSLSPLWFCLALNPLSTLLEGSRLGYPLRRGGQVVSHLLYMDDLKLFAPTKLQLVELLKVTDTFSNSIRMEFGVDKCAVMHVRRGGIMESEGLQLSDSIHLRSLSANDTYKYLGMSEGLGISEADMKQSLKERFFGRLKKVLKSLLSGGNKVRAFNGWVMPVLMYSFGILKWTQTELDALDRRVRTLLTANRMHHPRSSVMRLYIPRKCGGRGLLNAKTLHNREVCSLREYFLHADAGMHRDVVAVDKGLTPLNLAKENWRKPVVLSTNDRREVWQSKELHGRFYRALHGPDVDFLASVSWLRFGDLFGETEGFVCAIMDEVIMTNNYRKYIVKDGTVDICRACHCPGESFRHIISGCSRLANGEYLHRHNQVARIIHQQLALKYNLVESEVPYYKYVPDPVLENGHITLYWDRSIITDRTIVANKPDIVVIDQSERRTMIVDVTIPHDGNLVKAEKDKQIKYLDLAHEVVNMWDVDSATIVPIVVTANGLMAKSLDQHLKRLSLGGWIKGLIQKAVLLDTARIVRRFLSLEP

SEQ ID NO: 29656 - protein, 1202 aa, Amphipyra tragopoginis
MLTRSRARARDNQAHLPPPDSSPSSASQQQGLNPASPAAAVASSSSDEYYSPPSSPPPARRRGGTRPPVGLGLRGPLASDRVPAPGGIVPRMKWTQKMNESVMRAYYGATEGGTNLTAYRSRMLSLFQVLEPAVNVSAQRLSDQVRVIQRGHMLDDTVLDRLRSEVQSSPVISPSSQVLEQQQNLAAALPRPNRADEEDDDRAANVSTQCNDELRSALEDAMREYRYTRSDLRPRIPRLPMHRKNRALVCALDSLLSNYFDGSEDLGDTHSILYCAAVAACRVAHVKFTDNERATRPKNAVPAWQCRIERRISEARALIGKLVCFREGNTRPRVMRFVRRAFSGTDVSPREYMSRVTERIDFLKQKVYAWANRIRRYRRRVDRYTQNRLFQSDERWVYRTWERPDQRVGDTRLPDNDVMNTFWRNIWSVPVAHTEGDWMQEVQRACEPIQEMGDIIISPQDVASAVRPMSNWKSPGPDGLHNFWLKWLRSSHARLASQFQSSLESGSLPQFLTTGVTHLLHKSGSTAEPKNYRPITCLPTVYKVLISILRTKINNHIDNNSIMSASQNGCRNGSRGTKELLLIDMAISQQVRRSRKDLSTCWIDYKKAYDSVPHTWLMRVLELYKVNTTLCAFLTSCMGQWRTVLRYPGCRQIQGIGEPIRIERGIFQGDSLSPLWFCLALNPLSTLLEGSGLGYRLRRGGQVISHLLYMDDLKLFAPNNLRLLELLKVTETFSNSIRMEFGVDKCAVMHVKRGRIMESVGTQLSDSIQLRSLSSTETYKYLGMSEALGVNETDMKQSLKERFFGRLKKVFNSLLSGGNKVRAFNGWVMPVLMYSFGILKWTQTELDALDRRVRSLLTANRMHHPRSSVMRLYIPRKCGGRGFLNAKTLHNREVCSLREYFSQADVGMHRDVVAVDKGFTPLSLAKENWRKPVVLDTNGRREVWRSKELHGRFYRALHGPDVDFLASVAWLRFGDLFGETEGFVCAIMDEVMMTNNYRKYVVKDGTVDICRACHCPGESIRHIVSGCSRLANGEYLHRHNLVARIIHQQLALKYNLVDAEVPYYKYVPDPVLENGHVTLYWDRSIITDRTIVANKPDIVVIDRSERLTMIVDITVPHDENLVKAEKDKEIKYQDLAHEVVAMWDVDSAIIVPIVVTANGLIAKSLDQHLKRLSLGSWIKGLIQKAVLLDTARIVRKFLSLRP

SEQ ID NO: 29657 - protein, 1200 aa, Mythimna impura
MLTRAAARRARHPPPGSPLSSASLPLDLGSPVSPVAAVASSSSDEYFSPPTSPTPVRRPGRGRPPKSLGPGGQPAPSRVPAAGGCVQRMRWTQSMNENVMRAYYGSTEGGTNLTAYRDRMLSLFQDLEPTVNVSAQRLSDQVRVIQRNHRLDDATLDRLRSEVLSNQIVSTSIQTQTAATPTTNAISPRSNPNNDDTDDRVVTVSSQCNDELRSALEDALREYRTTPTELRPRLPRLPMHKKNRALVCTLDSLLKNNFESSENLVDTHSILYCGAVAACRLANINFPNIDGTIRPKPAVPAWQYRIERRIDGARVLIGKLHCFREGNTRPRVMRFVRRAFLGTGISPQEYMSRVTERIDFLKQKVCAWASRIRRYKRRVDRYSQNRMFQSDERWVYRAWERPEQNVIDGRRPDDFATITFWRNIWSVPVSHTEGDWMRDVERVCEAIPEMEKVVITPADVAKAVRPLPNWKSPGPDGLQNFWLKWFSNSHAPLASQFQSTLESGSLPEYLTTGITHLFHKTGNPVEPKNYRPITCLSTVYKLLTSILRAKINRHIENNLIMSASQNGCRNGSRGTKELLLIDMAISQQARRSRKDLSTCWIDYKKAYDSVPHTWLMRVLELYKVDMTLRTFLESCMRQWKTVLRYPGCRPIQGNDEPIRIKRGIFQGDSLSPLWFCLALNPLSTLLEESGLGYRLRRGGQAISHLLYMDDLKLFAPSNLQLMELLKVTETFSSAIRMEFGVDKCAAMHVKRGEIMESEGIQLPDSIHLRSLSSTETYRYLGMSEALGINNADMKQSLKERFFGRLKKVLKSLLSGGNKVRAFNGWVMPVLMYSFGILKWTQTKLDALDRRVRTLLTANRMHHPRSSVMRLYISRKCGGRGFLNAKTLHNREVCSLREYFLKTDVGMHRDVVAVDKGLTPLSMAKEDWRKPVILTTDDRKEIWKGKELHGRFYRALHEPDVDFLASVAWLRFSDLFGETEGFICAIMDEVILTNNYRRYIMKDGTVDVCRACHRPGESIRHIISGCSRLANGEYLHRHNQVARIIHQQLALKYNLVDSEVPYYKYVPDPVLENDHVTLYWDRSIITDRTIVANKPDIVVIDRLARRAVIVDVTIPHDENLVKAEKEKQIKYLDLAHEVVDMWNVDSAVIVPMVVTANGLIAKSFDDHLSKLSLRGWIKGLIQKAVLLDTACIVRRFLSLEP

SEQ ID NO: 29658 - protein, 1195 aa, Notodonta dromedarius
MLTRLQARLRPPGLLPRSASQPLGLIQDETLTTAAASSESDEYFSPPSSLPPVRRRRGRPPGNLGTLGQPALNRILVPGGVVRRMRWTSSINENVMRAYYEATEGGTNLTAYRGRMLSLFQILEPAVNVSAQRLSDQVRVIQRGQMLADSLLDQLRSEALSSRVVPVASSQPVSLPVTTVESWPTVGGDTDRNDTASEVSTQYDGILRSTLEDVVREYRFVPPHVRPRLPRLPMHNKNRALVCSTNMLLSSYFESSENLMDTHSLLYCTAIAVCRVARVKFPDTDVATRPKPAVPAWQCRIERRINEARIFIGKLSCFRAGNTRPRVMRFVRRIFSGTNVGPQEYLNHVTERIDFLKQKVYAWANRIRRYKARVDRYYQNSMFQRDQRWVYRSWEQSSQRDGEVHRPDDDDMIKFWRNIWSVPMTHSEGGWIGDVEQVCEPIQEMDKITIEAKDVANAVRSLPNWKAPGPDGLHNFWLKWLRSSHACLASQFQSALESRLLPEFITTGVTHLLHKSGSTTDPKSYRPITCLPTIYKTLTSVLREKICRHIDDNSIMSASQNGCRSGAHGTKELLLIDMAICQQVRRNRKDLSTCWIDYKKAYDSVPHTWLMRVLELYKVNSTLRAFLATCMGQWRTVLLYPGSRRILGNGDPIRIERGIFQGDSLSPLWFCLAMNPLSTLLGGSGLGFRLRRGGQVISHLLYMDDLKLFAPTELQLTGLLKVTETFSKSIRMEFGVDKCAVMHVKKGRMVESRCIRLSDSIQLRSLSGTETYRYLGMSQALGICETDMKQSVRERFLGRLKKVLKSVLSGGNKVRAYNGWVMPVLIYSFGILKWSQTELDTLDRTVRTLLTAHRMHHPRSSVMRLYIPRKCGGRGFLNAKTLHNREVFNLREYFLHAVGEMHADVVTVDNGLTPLSLGKENWRRPVVLTTDDRMAVWQGKELHGRYYRALHGPDVDLAASVAWLQFGDLFGETEGFVCAIMDEVVMTNNYRRFIIRDGTIDICRACHRPGESLRHIISGCSRLANGEYLHRHNQVARIVHQQLALKYRLVASEVPYYRYVPEPVLEDGHITLYWDRSIITDRTIVANRPDIVLIDRQERHAMLVDVTVPHDGNLVKAEKDKECIYLDLVHEVVDMWDIDTAIIVPIVVSAHGLIGKSLDKHLKRLSLGTWIKGQIQKAVLLETARIVRKFLSLEP

SEQ ID NO: 29659 - protein, 1050 aa, Xestia xanthographa
MLDDTVLDRLRSESRSNLVTPASPMIAVQQQNIPSAPPRSDYDGEEDRDEVISVSTQCNAQLRSALEGAFREYRSTPPELRPRLPRLPMHNKNKALMCALDSQLSNCFDSSKDLTDTHSILYCGAVAACRVAHVKFPNNDRATRPKLAVPAWQCRIERRIGEARALIGKLICFREGNTRPRVMRFVRRAFSGTDISFRDYLARVTERIDSLKQKICAWASRFRRYKRRVERYTQNRTFQSDERWVYRAWERPDQGVTDTRLPDDSAMYSFWRNLWSVPVSHTEGDWTREVEQACDPIPQMGAIIISPQDVARAVRPLPNWKSPGPDGLHNFWIKWFQRSHARLASQFQSALESGSLPQFLTTGITHLLHKSGSAAEPKNYRPITCLPTVYKVLTSILRAKINQHIDSNSIMSASQNGCRNGSRGTKELLLIDMAISQQVRRSRKNLSTCWIDYKKAYDSVPHTWLMRVLELYKIDATLRTFLMSCMGHWRTVFRYPGCRQIQGNSESIRIERGIFQGDSLSPLWFCLALNPLSTLLERSCLGYLLRRDGQVISHLLYMDDLKLFAPNNLQLIKLLKVTETFSSAIRMEFGVDKCAVMHVKRGEIMESEGTQLSDSIHLRSLSSTETYKYLGMSEALGINTADMKQSLRERFFGRLNKVLGSLLSGGNKVRAFNGWVMPVLMYSFGMLKWTQTELDALDRRVRTLLTANRMHHPRSSVMRLYIPRKCGGRGFLNAKTLHNREVYSLREYFLEAEGEMHRDVVSVDKGLTPLSLANENWRKPKVLDTNDRKVEWQGKELHGRFYRALHGPDVDFLASVSWLRFGDLFGETEGFICAIMDEVMMTNNYRKYIVKDGTVDICRACHRPGESIRHIISGCSSLANGEYLHRHNLVARIIHQQLALKYNLVESEVPYYKYAPDPVLDNGHITLYWDRPITTDRTVVANRPDIVVIDRLERRAMIVYITIPHDENLVKAEKDKQFKYLDLAREVVDMWDVNTAVIVPIVVSANGLIAKSLDQHLRRLSLGSWIKGLIQKAVLLDTARIVRRFLSQEP

SEQ ID NO: 29660 - protein, 904 aa, Noctua fimbriata
MIRVAVVSSQCNDRLRSALEDALREYRSTPTELRPRLPRLPMHNKNRALVCALDSQLENIFESSENLVDTHSILYCGAVAACRLANVKFPNCDVATRPEPAVPAWQRRIERRIDGARVLIGKLHCFREGNTRPRVMRFVRRAFSGTGISPQEYMSRVTERIDFLKQKVYAWANRIRRYKRRVDRYSQNRMFQSDERWVYRAWERPELNMTDVCRPDDAAATSSFWRSIWSVPVCHTEADWMRDVERVCEPIPEMEPILITRLDIARAVRPLPNWKSPGPDGLHNFWLKWLSSSHTCLASQFQSSLESGSLPQFLTTGVTHLLHKSGSPAEPKNYRPITCLSTVYKLLTSILRAKINTHIDKNSIMSASQNGCRSGSRGTKELLLIDMAISQQVRRSRKDLSTCWIDYKKAYDSVPHTWLMRVLELYKIDATLRAFLESCMGQWRTVLRYPGCGQIQGNDEPVWIKRGIFQGDSLSPLWFCLALNPLSTLLEDSGLGYRLRRGGQVISHLLYMDDLKLFAPNKLQLMELLKVTETFSSAIRMEFGVDKCAVMYVKQGEIMESEGIQLSDSIHLRTLSSTESYKYLGMSEALGINVTDMKQSLKERFFGRLNKVLHSLLSGGNKVRAFNGWVMPVLMYSFGVLKWTQTELDALDRRVRTLLTANRMHHPRSSVMRLYIPRKCGGRGFLNAKSLHNREMCSLREYFLKVEVGMHRDVVAVDKGLTPLSMAKENWRKPEVLTTDDRKEVWQGKELHGRFYRALHGPDVDFLASVSWLRFGDLFGETEGFVCAIMDEVMLTNNYRKYIMKDGTVDVCRACHRPGESIRHIISGCSRLANGEYLHRHNQVARIIHQQLAMKYKLVESEVPYYKYVPDPVLEKDHVTLYWDQSIITDRTIVANKPDIVVID

SEQ ID NO: 29661 - protein, 1108 aa, Omphaloscelis lunosa
MRWTQLMNENVMRAYYGSTEGGTNLTAYRVRMLSLFQELEPTVNVSAQRLSHQVRVIQRNHRLDDTALDRLRSEVLSNHIVSTRAQTAAQESNIDPTPPRFNHGVEEDDRVATVSSQCNDRLRSALEDAFREYRYTPTELRPRLPRLPMHKKNRALVCALDSQLTNFFESSEDLIDTHSILYCAAVAACRLANVKFPNYDGATRPKPVVPAWQCRIERRIDGARVLIGKLYCFREGNTRPRVMRFVRRAFLGTGISPQEYMSRVTERIDFLKQKVCAWASRIRRYKRRVDRYTQNRMFQSDERWVYRAWERPEQNVTDVCRPDDAATRAFWRSIWSVPVCHTEAGWMQDVERVCETIPEMDAVFITPLDVARAVRPLPNWKSPGPDGLHNFWLKWLSSSHTRLASQFQSSLESGLLPQLTGVTHLLHKSGNPAEPKNYRPITCLPTVYKLLTSILRTKINTHIDSNSIMSASQNGCRNGSRGTKELLLIDMAISQQVRRSRKDLSTCWIDYKKAYDSVPHTWLMRVLELYKVHTTLRTFLMSCMGQWRTVLRYPGCRQTQGNDEPVWIKRGIFQGDSLSPLWFCLALNPLSTLLEGSGLGYRLRRGGQVISHLLYMDDLKLFAPNKLRLMELLKVTETFSGAIRMEFGVDKCAVMHVKRGEIMESEGTQLSDSIHLRSLSSAENYRYLGMSESLGINVADMKQSLKERFFGRLKKVLISFLSGGNKVRAFNGWVMPVLMYSFGILKWTQTELDVLDRRVRTLLTANRMHHPHSSVMRLYIPRKCGGQGFLNAKTLHNREVCSLREYFFKADVGMHRDVVAVDNGLIPLSMAKENWRKPVVLTTDDRKEVWQSKALHGRFYRALHEPGVDFLASVSWLRFGDLFGETEGFICAIMDEVILTNNYRRHIMKDGTVDVCRACHRPGESIRHIISGCSRLANGEYLHRHNQVARIIHQQLALKYKLVDSEVPYHKYVPDPVLENDHVTLYWDRSIITDRTIIANKPDIVVIDRLVRRAMIVDVTIPHDENLVKAEKEKQIKYLDLAHEVVDMWNVSLAIIVPIVVTANGLMAESLDQHLSRLSLGGWIKRLIQKAVLLDTARIVRRFLSLQP

SEQ ID NO: 29662 - protein, 868 aa, Amphipyra berbera
MRFVRRAFSGTGISPREYTSRATERIDFLKQKVCAWASRIRRYKRRVVRYTQNRMFQCDQRWVYRAWERPDQSVSGGRLPDDDAMSSFWRSIWSVPVIHTEGDWMRDIERTCESIEEMGEIVISPQDVADAVRPLPNWKSPGPDGLHNFWIKWLRSSHARLASQFQSSLESGSLPQFLTTGVTHLLHKSGSTAEPKNYRPITCLPTVYKLLTSILRSKINTHIGNNSVLSSSQNGCRNGSRGTKELLLIDTAISQQVRRSQKNLSTCWIDYKKAYDSVPHTWLMRVLELYKINTTLRTFLRSCMGQWRTALRYPGCQPIRGSGEPIRIERGIFQGDSLSPLWFCLTLNPLSTLLEGSGLGYPLRRGGQVVSHLLYMDDLKLFAPTKLQLVDLLKVTETFSNSIRMEFGVDKCAVMHVRRGRIMESEGLQLSDSIHLRPLSTNDTYKYLGMSEGLGISEADMKQSLRERFFGRLKKVLKSLLSGGNKVRAFNGWVMPVLMYSFGILKWTQTELDALDRRVRTLLTANRMHHPRSSVMRLYIPRKCGGRGLLNAKTLHNREVCSLREFFLHADAGMHRDVVAVDKGLTPLSLARENWRKPVVLSTNDRREIWQSKELHGRFYRALHGPDVDFLASVSWLRFGDLFGETEGFVCAIMDEVIMTNNYRKYIVKDGTVDICRACHCPGESLRHIISGCSRLANGEYLHRHNQVARIIHQQLALKYNLVESEVPYYRYVPDPVLENGRITLYWDRSIITDRTIVANKPDIVVIDRSERRTMIVDVTIPHDGNLVKAEKDKQIKYLDLAHEVVNMWDVESATIVPIVVSANGLMAKSLDKHLMRLSLGGWIKGLIQKAVLLDTARIVRRFLSLEP

SEQ ID NO: 29663 - protein, 1073 aa, Mythimna ferrago
MLSLFRVLEPAVNVSVQRLSDQVRVIQRNRMLDDAVLDRLRLESQSSRATPSAAAQRQPSAAPRPDHVGDADDDAAISVSTQCNERLRGALEDAFREYRSIPPELRPRLPRLPMHKRNRALVCALDSQLSICFDSSEDLADTHSILYCAAVAACRVAHVKFPNCNRATRLAVPAWQCRIERRIGEARALIGKLICFREGNTRPRVMRFVRRAFSGTDISPRDYLPCVTERIDFLKQKIYAWANRIRRYKRRVERYTQNRTFQSNERWVYRAWERPDQGVTDTRLPDDDAMCSFWRSIWSAPVSHTEGDWIREVERACDLLPEMGAITISPQDVARAVRPLPNWKSPGPDGLHNFWLKWFQGSHARLASQFQSALESGSLPLFLTTGITHLLHKSGSTAEPKNYRPITCLPTVYKVLTSILRAKINSHIETNSIMSVSQNGCRNGSRGTKELLLIDIAISQQVRRSRKNLSACWIDYKKAYDSVPHTWLMRVLELYKVDATLRTFLMSCMGQWRTVLHYPGCRQIWENSEPIRIERGIFQGDSLSPLWFCLALNPLSTLLEGSGLGYRLKRGGQVISHLLYMDDLKLFAPNNLQLMELLKVTETFSSAIRMDFGVDKCAVIHVKRGEIMESEGIQLSDSIHLRSLSSTENYKYLGMSEALGINTDDVKQSLKERFFGRLNKVLNSLLSGGNKVRAFNGWVMPVLMYSFGILKWTQTELDALDRRVRTLLTANRMHHPRSSVMRLYIPRKCGGRGFLNAKSLHNREVCSLREYFLAVDVGMHRDVVAVDKGLTPLSLANENWRKPLVLDTNDRREVWQGKELHGRFYRALHGPDVDLLASVSWLRFGDLFGETEGFVFAIMDEVMMTNNYRKYIVKDGTVDICRACRRPGESIRHIISGCSRLANGDYLHRHNLVARIIHQQLALKYNLVESEVPYYRYVPDPVLDNGSITLYWDRSIITDRTIVANKPDIVVIDRLERRTMIVDIAVPHDENLVKAEKDKQIKYLDLAREVVDMWEVDRAIIVPIVVTANGLIAKSLEQHLRRLSLGSWIKGLIQKAVLLDTARIVRRFLSQEP

SEQ ID NO: 29664 - protein, 868 aa, Eupsilia transversa
MRFVRRAFSGTGISPQEYMSRVTERIDFLKQKVCAWASRIRRYKRRVDRYTQNRMFQSDERWVYRAWERPEQNVADVCRPDDAATSAFWRSIWSVPVCHAEAGWMHGVERVCETIPEMEAVIITPLDVARAVRPLPNWKSPGPDGLHNFWLKWLISSHTRLASQFQSSLESGSLPQFLTTGVTHLLHKSGNPAEPKNYRPITCLSTVYKLLTSILRAKINSHIDSHSIMSASQNGCRNGSRGTKELLLIDMAISQQVRRSRKDLSTCWIDYKKAYDSVPHTWLMRVLELYKIDATLRTFLMSCMGQWRTVLRYPGCRQIQGNDEPVWIKRGIFQGDSLSPLWFCLALNPLSTLLEDSGLGYRLRRGGQVISHLLYMDDLKLFAHNKLRLMELLKVTETFSSAIRMEFGVDKCAVMHVKRGEIMESEGTQLSDSIHLRSLSSTESYKYLGMSEALGINVADMKQTLKERFFGRLKKVLISLLSGGNKVRAFNGWVMPVLMYSFGILKWTQTELDALDRRVRTLLTANRMHHPRSSVMRLYIPRKCGGRGFLNAKSLHNREVCSLREYFFKTEVGMHRDVVAVDKGLTPLSMAKENWRKPVVLTTDDRKEVWQSKELHGRFYRVLHEPGVDFLASVSWLRFGDLFGETEGFVCAIMDEVILTNNYRRHIMKDGTVDVCRACHRPGESIRHIISGCSRLANGEYLHRHNQVARIIHQQLALKYKLVDSEVPYYKYVPDPVLENDHVTLYWDRSIITDRTIVANKPDIVVIDRLARRAMIVDVTIPHDENLVKAEKEKQIKYLDLAHEVVDMWNVSSAIIVPIVVTANGLMAESLDQHLLRLSLGGWIKGLIQKAVLLDTARSVRRFLSLQP

SEQ ID NO: 29665 - protein, 962 aa, Amphipyra tragopoginis
MHNKNRALVCALDSLLSSYFESSEDLCDTHSIHYCAAVAACRVANVKFNNSERATRPKPAVPVWQCRIERRVDEARALIGKLICFREGNTRPRVMRFVRRAFSGTGIRPREYISRVTERIDFLKQKVCAWASRIRRYKRRVERYTQNRMFQCDQRWVYRAWERPDQGVSDGRLPDDDAMNSFWRSIWSVPVIHTEGDWTRDIERACEPIEEMGEILISPQDVASAVRPLPNWKSPGPDGLHNFWIKWLRSSHARLASQFQSSLESGSLPQFFTTGVTHLLHKSGSTAEPKNYRPITCLPTVYKLLTSILRTKINTHVENNSIMSPSQNGCRNGSRGTKELLLIDMAISQQVRRSRKNLSTCWIDYKKAYDSVPHTWLMRVLELYKINATLRTFLMSCMGQWRTVLRYPGCRPIRGSDEPISIERGIFQGDSLSPLWFCLALNPLSTLLEGSRLGYPLRRGGQVVSHLLYMDDLKLFAPTKLRLVELLKVTETFSNSIRMEFGVDKCAVMHVRRGGIMESEGLQLSDSIHLRSLSANDTYKYLGMSEGLGISEADMKQSLKERFFGRLKKVLKSLLSGGNKVRAFNGWVMPVLMYSFGILKWTQTELDALDRRVRTLLTANRMHHPRSSVMRLYIPRKCGGRGLLNAKTLHNREVCSLREYFLHADAGMHRDVVAVDKGLTPLNLAKENWRKPVVLSTNDRREVWQSKELHGRFYRALHGPDVDFLASVSWLRFGDLFGETEGFVCAIMDEVIMTNNYRKYIVRDGTVDICRACHCPGESLRHIISGCSRLANGEYLHRHNQVARIIHQQLALKYNLVESEVPYYKYVPDPVLENGHITLYWDRSIITDKTIVANKPDIVVIDRSERRTMIVDVTIPHDENLVKAEKDKQIKYLDLAHEVVNMWDVDSATIVPIVVTANGLMAKSLDQHLKRLSLGGWIKGLIQKAVLLDTVRIVRRFLSLEP

SEQ ID NO: 29666 - protein, 1110 aa, Amphipyra tragopoginis
MRWTQSINENVMRAYYGATEGGINLTAYRDRMLSLFQVLEPAINVSTQRLSDQVRVIQRNRRLDDTVLERLRSEVQNNRTVTTPLQAAEQPQLPAVSPRPIHVDEAGDGEVIVVSNQCSDELRSALEGAILEYRATPPELKPRLPRLPMHKKNRALVCALDSLLSNYFDGSKDLGDTHSILYCAAIAACRVANVKLTENERATRPKPAVPAWQYRIERRIDGARALIGKLICFREGNTRPRVMRFVRRAFSGTDISPRDYMSRVTERIDFLKQKVYAWANRIRRYKRRVERYTRNRTFQSDQRRVYRTWERSVPGVGDMRLPDDDAMSSFWRSIWSVPVAHAEGDWTRDIERACEPIPEMGEITISPQDVATAARPLPNWKSPGPDGLHNFWLKWLRSSHARLASQFQSSLESGSLPQFLTTGVTHLLYKSGSAAEPKNYRPITCLPTVYKLLTSILRVKISDHTDNNSILSPSQNGCRNGSRGTKELLLIDMTISQQVRRSRKDVSTCWIDYKKAYDSVPHTWLMRVLELYKINTTLRTFLMSCMGQWRTGLRYPGCRQIRGRGEPIRIERGIFQGDSLSPLWFCLALNPLSTLLEGTGLGYRLRREGQVISHLLYMDDLKLFAPTNLQLMELLKVTENFSNSIRMEFGVDKCAVMHVKRGRIMESEGIQLSNSIQLRSLSPTETYKYLGMSEALGIREADMRQSLMERFFGRLNKVLKSLLSGGNKVRAFNGWVMPVLKYSFGILKWTQTDLDALDRRVRALLTTHRMHHPRSSVMRLYIPRKCGGRGFLNAKTLHNREVCSLREYFLQAEGEMHRDVVAVDGGLTPLALAKENWRKPTVLSTNDREEVWQSKELHGRFYRALHGPDVDFSASVSWLRFGDLFGETEGFVCAIMDEVMMTNNYRKYIVKDGTVDICRACHRPGESIRHIISGCSRLANGEYLHRHNLVARIIHQQLALKYNLVESEVPYYRYVPDPVLENGHATLYWDRSIITDMTIVANKPDIVVIDRAERRTMIVDITVPHDENLVKAEKEKQIKYLDLAHEVVSMWDVDSAVIVPIVVTANGLIAKSLDQHLMRLSLGGWIKGLIQKAVLLDTARIVRRFLSLEP

SEQ ID NO: 29667 - protein, 1202 aa, Amphipyra tragopoginis
MLTRSRARARDNQAHLPPPDSSPCSASQQQGLNPASPAAAVASSSSDEYYSPPSSPPPARRRGGTRPPVGLGLRGPLASDRVPAPGGIVPRMKWTQKMNESVMRAYYGATEGGTNLTAYRSRMLSLFQVLEPAVNVSAQRLSDQVRVIQRGLMLDDTVLDRLRSEVQSSPVISPSSQVLEQQQNLAAALPRPNRADEEDDDRAANVSTQCNDELRSALEDAMREYRYTRSDLRPRIPRLPMHRKNRALVCALDSLLSNYFDGSEDLGDTHSILYCAAVAACRVAHVKFTDNERATRPKNAVPAWQCRIERRISEARALIGKLVCFREGNTRPRVMRFVRRAFSGTDVSPREYMSRVTERIDFLKQKVYAWANRIRRYRRRVDRYTQNRLFQSDERWVYRTWERPDQRVSDTRLPDNDVMNTFWRNIWSVPVAHTEGDWMQEVQRACEPIQEMGDIIISPQDVASAVRPMSNWKSPGPDGLHNFWLKWLRSSHARLASQFQSSLESGSLPQFLTTGVTHLLHKSGSTAEPKNYRPITCLPTVYKVLTSILRTKINNHIDNNSIMSASQNGCRNGSRGTKELLLIDMAISQQVRRSRKDLSTCWIDYKKAYDSVPHTWLMRVLELYKVNTTLCAFLTSCMGQWRTVLRYPGCRQIQGIGEPIRIERGIFQGDSLSPLWFCLALNPLSTLLEGSGLGYRLRRGGQVISHLLYMDDLKLFAPNNLRLLELLKVTETFSNSIRMEFGVDKCAVMHVKRGRIMESMGTQLSDSIQLRSLSSTETYKYLGMSEALGVNETDMKQSLKERFFGRLKKVFNSLLSGGNKVRAFNGWVMPVLMYSFGILKWTQTELDALDRRVRSLLTANRMHHPRSSVMRLYIPRKCGGRGFLNAKTLHNREVCSLREYFSQADVGMHRDVVAVDKGFTPLSLAKENWRKPVVLDTNGRREVWRSKELHGRFYRALHGPDVDFLASVAWLRFGDLFGETEGFVCAIMDEVMMTNNYRKYIVKDGTVDICRACHCPGESIRHIVSGCSRLANGEYLHRHNLVARIIHQQLALKYNLVDAEVPYYKYVPDPVLENGHVTLYWDRSIITDRTIVANKPDIVVIDRSERLTMIVDITVPHDENLVKAEKDKEIKYQDLAHEVVAMWDVDSAIIVPIVVTANGLIAKSLDQHLKRLSLGSWIKGLIQKAVLLDTARIVRRFLSLRP

SEQ ID NO: 29668 - protein, 1199 aa, Amphipyra tragopoginis
MLTRAQARANARPPPPDSSPSSASQQQGLDPASPAAAVASSSSDEYYSPPSSPPPARRRGGTRPPVGLGLRGPLASDGVPAPGGIVPRMKWTRSINENVMRAYYGATEGGTNLTAYRGRMLSLFQVLEPAVNVSAQRLSDQVRVIQRGHMLDDTVLDRIRSEVQGSPVISPSPQVLEQSQNLAATLPRPNRADEEDDDRATNVSTQCNEELRSALEDAMREYRFIRPDLRPRIPRLPMHRKNRALVCALDSLLSNYFDGSEDLSDTHSILYCAAVAACRVAHIKFTDNERATRPKNAVPAWQCRIERRIAEARALIGKLVCFREGNSRPRVMRFVRRAFSGTDVSPREYMSRVTERIDFLKQKVYAWANRIRRYRRRVDRYTQNRLFQSDERWVYRTWERPDQRVSDTRLPDDDVMNAFWRNIWSVPVAHTEGDWMQEVQRACEPIQEMGDIIISPQDVASAVRPMSNWKSPGPDGLHNFWLKWLRSSHACLASQFQSSLESGSLPQFLTTGVTHLLHKSGSTAEPKNYRPITCLPTVYKVLTSILRAKINNHIDNNSIMSASQNGCRNGSRGTKELLLIDMAISQQVRRSRKDLSTCWIDYKKAYDSVPHTWLMRVLELYKVNATLCAFLTSCMGQWRTVLHYPGCRQIQGMGEPIRIERGIFQGDSLSPLWFCLALNPLSTLLEGSGLGYRLRRGGQVISHLLYMDDLKLFAPNNLRLLELLKVTETFSNSIRMEFGVDKCAVMHVKRGRIMESVGTQLSDSIHLRSLSSTETYKYLGMSEASGINETDMKQSLRERFYGRLKKVLNSLLSGGNKVRAFNGWVMPVLMYSFGILKWTQTELDALDRRVRSLLTANRMHHPRSSVMRLYIPRKCGGRGFLNAKTLHNREVCSLREYFSQADVGMHRDVVAVDKGFTPLSLAKENWRKPVIFDTNGRREVWRSKELHGRFYRALHGPDVDFLASVAWLRFGDLFGETEGFVCAIMDEVMMTNNYRKYIVKDGTVDICRACHCPGESIRHIVSGCSRLANGEYLHRHNLVARIIHQQLALKYNLVDAEVPYYKYVPDPVLENGHVTLYWDRSIITDRTIVANKPDIVVIDRSERLTMIVDITVPHDENLVKAEKDKEIKYQDLAHEVVAMWDVDSAIIVPIVVTANGLIAKSLDQHLKRLSLGSWIKGLIQKAVLLDTARIVRKFLSLRP

SEQ ID NO: 29669 - protein, 1102 aa, Noctua pronuba
MLTRAAARRARLSPPDSSLSSASPLPESSPIVSAVTPAVAVASSSSDEYFSPPTSPTPVRRQGRGRPPTSLGLRGHPAPSRVPATGGCVQRMRWTHPINENVMRAYYGSTEGGTNLTAYRVRMLSLFQVLEPTVNVSAQRLSDQVRVIQRNHMLDDAVLDRLRSEVLSNRIVLTPSQTVVQTTAIDVSPPRSNPAVVEEDDRVATVSSQCNDRLRSALEDALREYRYTPTELRPRLPRLPMHKKNRALVCALDSQLKNLFESSEDLVDTHSILYCGAVAACRLAKLKFTNSDAATRPKPAVPAWQCRIERRIDGARVLIGKLHCFREGNTRPRVMRFVRRAFSGTGISPQEYMSRVTERIDFLKQKVYAWANRIRRYKRRVDRYSQNRMFQSDERWVYRAWERPEQNMTDVCRPDDATTSSFWSSIWSVPVCHTEGDWMRAVERVCEPIPEMEAILITSLDVARSVRPLPNWKSPGPDGLHNFWLKWLSSSHTCLASQFQSSLESGALPQFLTTGVTHLLHKSGNPAEPKNYRPITCLSTVYKLLTSILRAKINTHIDKNSIMSASQNGCRNGSRGTKELLLIDMAISQQVRRSRKDLSTCWIDYKKAYDSVPHTWLMRVLELYKIDATLRTFLESCMGQWRTVLRYPGCRQIQGNDEPVWIKRGIFQGDSLSPLWFCLALNPLSTLLEDSGLGYRLRRGGQVISHLLYMDDLKLFAPNKLRLMELLKVTETFSSAIRMEFGVDKCAVMYVKRGEIMESEGIQLSDSIHLRSLSSSESYKYLGMSEALGINVTDMKQSLRERFFGRLKKVLNSLLSGGNKVRAFNGWVMPVLMYSFGILKWTQTELDALDRRVRTLLTANRMHHPRSSVMRLYIPRKCGGRGFLNAKTLHNRELCSLREYFLKAEVGMHRDVVAVDKGLTPLSMAKENWRKPVVLTTDDRKEVWQGKELHGRFYRALHGPDVDFLASVSWLRFGDLFGETEGFVCAIMDEVMLTNNYRKYIMKDGTVDVCRACHRPGESIRHIISGCSRLANGEYLHRHNLVARIIHQQLALQYNLVGTEVPYYKYVPDPVLEKNHVTLYWDRSIITDRTIVANKPDIVVID

SEQ ID NO: 29670 - protein, 1196 aa, Mythimna impura
MLTRTAARRGRHPPPGSPLSSASPPPVLGSPMSPVAAVASSSSDEYFSPPTSPTPVRRPGRGRPPKSLGPRGQQAPSRVPAAGGCVQRMRWTQSMNENVMRAYYGSTEGGTNLTAYRVRMLSLFQELEPTVNVTTQRLSDQVRVIQRNHRLDDAALDRLRSEVLSNRIISTPIQTQTAAPRATDATLPQSNHVDDEADDRVVTVSSQCNDRLRSALEDALREYRSTPIALRPRLPRLPMHKKNRALVCALDSLLENVFESSVNLADTHSILYCGAIAACRLANVKLPSCDGTTRPKPAAPAWQCRIERRIDVARALIGKLYCFREGNTRPRVIRYVRRAFSGTGISPREYLSSVTERIDFLKQKVCAWANRIRRYKRRVDRYSQNRMFQSDERWVYRAWERPEQNVTDVTRPDAVATNTFWRNIWSVPVCHTEDGWMREVERVCEAIPEMEKVIISPTDVARAVRPLPNWKSPGPDGLQNFWLKWYSSSHALMASQFQSSLESGSLPQFLTTGVTHLLHKTGSTAEPKNYRPITCLSTVYKLVTSILRTKINQHIDNNSIMSASQNGCRNGSRGTKELLLIDMAISQQVRRSRKDLSTCWIDYKKAYDSVPHTWLMRVLELYKIDATLRTFLESCMGQWNTVLRYPGCRSIRRDDEPIWIKRGIFQGDSLSPLWFCLALNPLSTLLEESGLGYRLRRGGQVLSHLLYMDDLKLIAPNKLRLMELLKVTETFSSAIRMEFGVDKCAVMHVKRGEIMESEGIQLSDSIYLKSLSSTETYKYLGMSEALGINAADMKQSLKERFFDRLKKVLNSLLSGGNKVRAFNGWVMPVLMYSFGILKWTQTELDALDRRVRTLLTANRMHHPRSSVMRLYIPRKCGGRGFLNAKTLHNREVCSLREYFHKTDVGMHRDVVAVDKGLTPLSMAKENWRKPVILTTDDRREVWKSKELHGRFYRALHDSDVDFAASVAWLRFSNLFGETEGFICAIMDEVILTNNYRRYIMKDGTVDVCRACHRPGESIRHIVSGCSRLANGEYLHRHNQVARIIHQQLALKYNLVYSEVPVPDPVLENDHVTLYWDRSIITDRTIVANKPDIVVIDRLARRAMIVDVTIPHDENLVKAEKEKQIKYLDLAHEVVDMWNVDSAIIVPIVVTANGLMAKSLDVHLSKLSLRGWIKGLIQKAVLLDTARIVRRFLSLQP

SEQ ID NO: 29671 - protein, 1080 aa, Xestia xanthographa
MLSLFQVLEPGVSASAQRLSDQVRVIQRNHMLDDTVLDRLRSESRSNLVTPASPLIAVQVQNVSSAPPRSDRDGEEDDSEVISVSTQCNAQLRSALESAFREYRSTPPELRPRLPRLPMHNKNKALMCALDSQLSNCFDSSKDLTDTHSILYCGAVAACRVAHVKFPNNDGATRPKLAVPAWQCRIERRIGEARALIGKLICFREGNTRPRVMRFVRRAFSGTDISFRDYLARVTERIDSLKQKICAWASRIRRYKRRVERYTQNRTFQSDERWVYRAWERPDQGVTDTRLPDDSAMYSFWRNIWSVPVSHTEGDWTREVEQACDPIPEMGAIIISPQDVARAVRLLPNWKSPGPDGLHNFWIKWFQRSHARLASQFQSALESGSLPQFLTTGITHLLHKSGSAAEPKNYRPITCLPTVYKVLTSILRAKINQHIDSNSIMSASQNGCRNGSRGTKELLLIDMAISQQVRRSRKNLSTCWIDYKKAYDSVPHTWLMRVLELYKIDATLRTFLMSCMGHWRTVLRYPGCGQIQGNSEPIRIERGIFQGDSLSPLWFCLALNPLSTLLERSGLGYLLRRDGQVISQLLYMDDLKLFAPNNFQLMKLLKVTETFSSAIRMEFGVDKCAVMHVKRGEIMESEGTQLSDSIHLRSLSSTETYKYLGMSEALGINTADMKQSLRERFFGRLNKVLGSLLSGGNKVRAFNGWVMPVLMYSFGILKWTQTELDALDRRVRTLLTANRMHHPRSSVMRLYISRKCGGRGFLSAKTLHNREVYSLREYFLEAEGEMHRDVVSVDKGLTPLSLANGNWRKPKVLDTNDRKVEWQGKELHGRFYRALHGPDVDFLASVSWLRFGDLFGETEGFICAIMDEVMMTNNYRKYIVKDGTVDICRACHRPGESIRHIISGCSSLANGEYLHRHNLVARIIHQQLALKYNLVESEVPYYKYAPDPVLDNGHITLYWDRPITTDRTVVANRPDIVVIDRLERRTMIVDITIPHDENLVKAEKDKQFKYLDLAREVVDMWDVGTAVIVPIVVSANGLIAKSLDQHLRRLSLGSWIKGLIQKAVLLDTARIVRRFLSQEP

SEQ ID NO: 29672 - protein, 1196 aa, Autographa gamma
MLTRSRARKPARPPSPDPSPSSASQLPDHVPAPAPAVASSSSDEYYSPPTSPTPVRRQGRRRPPCSLAPSGQPASNRAPAPGGDVRRMKWTLSINENVMRAYYGATEGGTNLTAYRARMLSLFQALEPGVSVSAQRLSDQVRVIQRNHRLDDSTLDRLRSEIQHSPATSTSPPVAAPVSGAPLTAPSDGEEEDGAITVSTQCNELIRSTLEDAIRVYRRSPPDQRPRLPRLPMHNRNKAIMGALDSLLPVYFESSEDLRDTHSILYCAALTACRVANVAMCHNNITIATRPKPAVPAWQCRIEQRVAEARTLIAKLKAFKQGNSRPRVMRFVRRAYAGTDISPSEFIARVTERIDLFRQRVCAWANRIRRYKRRAERFHLNRMFQKDQRWVHRLWERPVSAMDGGCLPDGDATNSFWRSIWSVPVTHSEGGWMREVEQVCEPIQEMGAITISPQDVANAVRPMANWKTPGPDGLQNFWLKWLRSSHSCLASQFQSAVESASLPQFLTTGSTHLLHKTGSATDPKNYRPITCLPTVYKLLTSILRAKINEHIVNFSIMSASQNGCRSGSRGTKELLLIDTAICQQVRRSKKDLSTCWIDYKKAYDSVPHTWLMRVLELYKINTTLRAFLMSCMGQWSTVLHYPGCRDIQQGGEPIRIERGIFQGDSLSPLWFCLALNPLSTLLENSGLGYSLRRGGQVISHLLYMDDLKLFATSGFQLMELLKITESFSNSISMEFGVDKCAVMHVKRGGIVESQGIQLSDSINLRSLSATDTYKYLGMSEALGINVADVKQSLQARFFGRLNKVLKSVLSGGNRVRAFNGWVMPVLMYSFGVLKWTQTELDALDRRVRTLLTANRMHHPRSSVMRLYIPRKCGGRGFLNAKTLHNREVCNLREYFLQVDVGMHRDVVVVDKGFTPLSLGKENWHKPVVLSVKDREDVWQSKELHGRYYRTLHGPDVDFLASVAWLRFGDLFGETEGFVCAIMDEVIMTNNYRKYIIKDGTVDICRACHCPGESLRHIISGCSRLANGEYLHRHNQVARIIHQQLALRYKLVESEVPYYRYVPDPVLENGRVTLYWDRSIITDRTIVANKPDIVVIDRSERRAIIVDVTIPHDENLVKAEKEKQLKYLDLVHEVVDMWEVDSAMIVPIVVTANGIIAKSLDQHLKRLSLGTWVKGLIQKAVLLDTARIVRRFLSLES

SEQ ID NO: 29673 - protein, 962 aa, Mesoligia furuncula
MHKKNRALVCALDSQLKNFFESSEDLVDTHSILYCAAVAACRLANVKFPSCDGATRPKPAVPAWQRRIERRIDGARVLIGKLYCFREGNTRPRVMRFVRRAFSGTGISPREYMSRLTERIDFLKQKVCAWASRIRRYKRRVDRYTQNRMFQSDERWVYRAWERPEQNVTDVCRPDDAATSAFWCSIWSVPVCHTEAGWMQDVERVCESIPQMEKVLITPSDVARAVRPLPNWKSPGPDGLHNFWLKWLISSHTCLASQFQSSLESGSLPQFLTTGVTHLLHKSGSPAEPKNYRPITCLSTVYKLLTSILRAKINMHIESNSIMSASQNGCRNGSRGTKELLLIDMAISQQVRRSRKDLSTCWIDYKKAYDSVPHTWLMRVLELYKIDATLRTFLESCMRQWKTVLRYPGCRQIQGNDEPVWIKRGIFQGDSLSPLWFCLALNPLSTLLEDSGLGYRLRRGGQVISHLLYMDDLKLFAPNKLRLMELLKVTETFSSAIRMQFGVDKCAVMHVKRGEIKESEGIQLSDSISLRSLSSSESYKYLGMSEALGINDADMKQSLKERFFCRLKKVLISLLSGGNKVRAFNGWVMPVLMYSFGILKWTQTELDALDRRVRTLLTANRMHHPRSSVMRLYIPRKCGGRGFLNAKTLHNREVCSLREYFLKAEVGMHRDVVAVDKGLTPLSMAKENWRKPVVLSTDDRKKVWQSKELHGRFYRALHEPGVDFIASVSWLRFGDLFGETEGFVCAIMDEVILTNNYRRHIMKGGTVDVCRACHRPGESIRHIISGCSRLANGEYLHRHNQVARIIHQQLALKYKLVDSEVPYYKYVPDPVLENDHVTLYWDRSIITDRTIVANKPDIVVIDRLARRTMIVDVTIPHDGNLVKAEKEKEIKYQDLAHEVVDMWNVSSAIIVPIVVSANGLMAESLDQHLSKLSLGGWIKGLIQKAVLLDAARIVRRFLSLEP

SEQ ID NO: 29674 - protein, 962 aa, Sesamia nonagrioides
MHKKNRALVCALDLQLKNFFESSEDLIDTHSILYCAAVAACRLANVKFPNCDEATRPKLAVPAWQRRIERRIDGTRVLIGKLYCFREGNTRPRVMRFVRQAFSGTGISPREYINNVTERIDFLKQKVCAWASRIRRYKKRVDRYTQNRMFQSDERWVYRAWERPEQNEADVCRPDDATTSAFWRGIWSVSVCHTEGDWTQDVEQVCEAIPEMDNILITPLDVATAVRSLPNWKSPGPDGPHNFWLKWLSSSHTCLASQFQSSLESGSLPQFLTTGITHLLHKSGSTAEPKNYRPITCLPTVYKVLTSILKAKINNHLDSNSIMSVSQNGCRSGSRGTKELLLIDMAISQQVRRSRKDLSTCWIDYKKAYDSVPHTWLMRVLELYKINATLRTFLRSCMGQWKTVLRYPGSRQIQGNDEPVWIKRGIFQGDSLSPLWFCLALNPLSTLLEDSGLGYRLKRGGQVISHLLYMDDLKLFAPNKFHLMKLLNVTETFSSGIKMEFGVDKCAVMHVKRGQIMESEGITLPDSIHLRSLSSFESYKYLGMSEALGINDADMKQSLKERFVGRLKKVLNSLLSGGNKVRAFNGWVMPVLMYSFGILKWTQTELDALDRRVRTLLTANRMHHPRSSVMRLYIPRKCGGRGFLNAKTLHNREVCSLREYFLKTVVGMHHDVVTVDKGLTPLSMAKENWHKPIILTTDDRKMVWQSKELHGRFYRALHGPDVDFLASVSWLRFGDLFGETEGFVCAIMDEVILTNNYRRYIMKDGTIDVCRACHHPGESIRHIISGCSRLANSEYLHRHNQVARIIHQQLALKYKLVDSEVPYYKYVPDPVLENDHVTLYWDRSIITDRTIVANKPDIVVIDRLARLAMIVDVTIPHDGNLVKAEKEKQMKYLDLAHEVVDMWNVNSAVIVPIVVSANGLIAKSLDQHLLRLSLGSWIKGLIQKAVLLDTARIVRRFLSLEP

SEQ ID NO: 29675 - protein, 1107 aa, Amphipyra berbera
MLTRSRTRTTEQRSARPPPPDSPLSSASQPPELGLPVTPAAAASSSSSDEYFSPPTSPRPVRRQGRGRPPNSLGPRGPPAPSRVLAAGGYVQRMKWTQSINENVMRAYYGSTEGGTNLTAYRVRMLTLFQELEPAINVSAQRLSDQVRVIQRNHRLDDAALDRLRLEVQNSRAIPVPLQTAVHQLINVAPPRSDRVDGDEDDGAVTVSSQYNDRLRSALEDAIRECRANPESRPRLPRLLMHNKNRALVCALDSLLASYFESSEDLGDTHSILYCAAVAACRVANVKFNNSERATRPKLAVPAWQCRIERRIDETRALIGKLICFREGNTRPRVMRFVRRAFSGTGISPREYTSRATERIDFLKQKVCAWASRIRRYKRRVERYTQNRMFQCDQRWVYRAWERPDQSVSGGRLPDDDAMSSFWRSIWSVPVIHTEGDWMRDIERTCESIEEMGEIVISPQDVAGAVRPLPNWKSPGPDGLHNFWIKWLRSSHARLASQFQSSLESGSLPQFLTTGVTHLLHKSGSTAEPKNYRPITCLPTVYKLLTSILRSKINTHIGNNSVLSSSQNGCRNGSRGTKELLLIDTAISQQVRRSQKSLSTCWIDYKKAYDSVPHTWLMRVLELYKINTTLRTFLRSCMGQWRTVLRYPGCQPIRGSGEPIRIERGIFQGDSLSPLWFCLALNPLSTLLEGSGLGYPLRRGGQVVSHLLYMDDLKLFAPTKLQLVDLLKVTETFSNSIRMEFGVDKCAVMHVRRGRIMEPEGLQLSDSIHLSPLSANDTYKYLGMSEGLGISEADMKQSLRERFFGRLKKVLKSLLSGGNKVRAFNGWVMPVLMYSFGILKWTQTELDALDRRVRTLLTANRMHHPRSSVMRLYIPRKCGGRGLLNAKTLHNREVCSLREFFLHADAGIHRDVVAVDKGLTPLSLARENWRKPVVLSTNDRREIWQSKELHGRFYRALHGPDVDFLASVSWLRFGDLFGETEGFVCAIMDEVIMTNNYRKYIVKDGTVDICRACHCPGESLRHIISGCSRLANGEYLHRHNQVARIIHQQLALKYNLVESEVPYYRYVPDPVLENGRITLYWDRSIITDRTIVANKPDIVVIDQSAAQ

SEQ ID NO: 29676 - protein, 1202 aa, Amphipyra berbera
MLTRSRTRETEQRSARPPPPDSPLSSTSQPPELGLPVTPAAAASSSSSDEYFSPPTSPRPVRRQGRGRPPNSLGPRGPPAPSRVLATGGYVQRMKWTQSINENVMRAYYGSTEGGTNLTAYRVRMLTLFRELEPAINVSAQRLSDQVRVIQRNHRLDDAALDRLRLEVQNSRAIPVPSQTAVHQLINVAPPRSDRVDGDEDDGAVTVSSQYNDRLRSALEDAIRECRANPESRPRLPRLPMHNKNRALVCALDSLLASYFESSEDLGDTHSILYCAAVAACRVANVKFNNSERATRPKPAVPAWQCRIERRIDETRALIGKLICFREGNTRPRVMRFVRRAFSGTGISPREYTSRATERIDFLKQKVCAWASRIRRYKRRVERYTQNRMFQCDQRWVYRAWERPDQSVSGGRLPDDDAMSSFWRSIWSVPVIHTEGDWMRDIERTCESIEEMGEIVISPQDVADAVRPLPNWKSPGPDGLHNFWIKWLRSSHARLASQFQSSLESGSLPQFLTTGVTHLLHKSGSTAEPKNYRPITCLPTVYKLLTSILRSKINTHIENNSVLSSSQNGCRNGSRGTKELLLIDTAISQQVRRSQKNLSTCWIDYKKAYDSVPHTWLMRVLELYKINTTLRTFLRSCMGQWRTVLRSPGCQPIRGSGEPIRIERGIFQGDSLSPLWFCLALNPLSTLLEGSGLGYPLRRGGQVVSHLLYMDDLKLFAPTKLQLVDLLKVTETFSNSIRMEFGVDKCAVMHVRRGRIMESEGLQLSDSIHLRPLSANDTYKYLGMSEGLGISEADMKQSLRERFFGRLKKVLKSLLSGGNKVRAFNGWVMPVLMYSFGILKWTQTELDALDRRVRTLLTANRMHHPRSSVMRLYIPRKCGGRGLLNAKTLHNREVCSLREFFRHADAGMHRDVVAVDKGLTPLSLARENWRKPVVLSTNDRREIWQSKELHGRFYRALHRPDVDFLASVSWLRFGDLFGETEGFVCAIMDEVIMTNNYRKYIVKDGTVDICRACHCPGESLRHIISGCSRLANGEYLHRHNQVARIIHQQLALKYNLVESEVPYYRYVPDPVLENGRITLYWDRSIITDRTIVANKPDIVVIDRSERRTMIVDVTIPHDGNLVKAEKDKQIKYLDLAHEVVNMWDVESATIVPIVVTANGLMAKSLDKHLMRLSLSGWIKGLIQKAVLLDTARIVRRFLSLEP

SEQ ID NO: 29677 - protein, 1209 aa, Amphipyra berbera
MQTRSRAKATVTQNTRPTPSVSSLSSASQPPDSSIVSDVTPAAAVASSSSDEFYSPPSSPPPLPPPRRRGRGRPPASLGPRGPPVSDRVPAPGGSVQRMRWTPTMNENCMRAYFGATEGGTNLTAYRGRMLSLFQALEPAVNVSAQRLSDQVRVIQRDHRLTDAALDRLRSEVQSNRIISLQSQNAAQPQVPCMVPPRPNHADEESDDRVTNVSTQCNEQLRSALEHAIREYRFTPPNLRPRIPRLPMNKKNRALMCALDSLLSSYFDNSEGLEDTHSILYCAAVAACRVAHAKFDNNDRDTRPKPAVPAWQCRVECRINEARALIGKLICFREGNTRPRVMRFVRRAFSGTDINPRDYMSRVTERIDFLKQKVYAWANRIRRYKRRVERYTQNRMFHSDERRVYRTWERPDHDVSDTHLPDSDVMNTFWRNIWSMPVTHTEGDWMQEVQRACEPIEEMGDVTIVPQDVTSAVRPMSNWKSPGPDGLHNFWLKWLRSSHARLASQFQSSLESGSLPQFLTTGVTHLLHKSGSTAEPKNYRPITCLPTVYKLLTSILRSKISTHITNNFIMSTSQNGCKNRSRSTKELLLIDMTISQQVRRSRKDLSTCWIDYKKAYDSVPHTWLMRVLELYKVNTTLCAFLTSCMGQWRTVLHYPGCRKIQGRGEPIRIKRGIFQGDSLSPLWLCLALNPLSTLLEGSGLGYRLRRGGQVISHLLYMDDLKLFAPNNLQLVKLLKVTETFSNSIRMEFGVDKCAVMRVKRGGIMESVGTQLSDSIHLRSLSSTETYKYLGMSEALGINVADMKQSLRERFYGRLKKVLKSLLSGGNKVRAFNGWVMPVLMYSFGMLKWTQTELDALDRKVRTLLTAYRMHHPRSSVMRLYIPRKCGGRGFLNAKTLHNREVCNLREYFLQADVGMHRDVVAVDKGFTPLSLAKENWRKPVVLDTTGRRDVWQSKELHGRFYRALHGPDVDFLASVAWLRFGDLFWETEGFVCAIMDEVIMTNNYRKYIVKDGTVDICRACHCPGESIRHIISGCSRLANGEYLHRHNLVARIIHQQLALKYNLVDVEVPYYKYVPDPVLENGHITLYWDRSIITDRTIIANKPDIVVIDRSERLTMIVDITVPHDENLVKAEKDKEIKYQDLAHEVVDMWEVDSAVIVPIVVTANGLIAKSLDQHLMRLSLGSWVKGLIQKAVLLDTARIVRKFLSLRP

SEQ ID NO: 29678 - protein, 1203 aa, Noctua janthe
MLTRSRAKHQAHPPSPDSSLSSASQPPGRLSIVSAVSPIAAVASSSSDEFFSPPSTPSPPRRRGRGRPPAGLGPRGQQAPNRVPAAGGNVSRMRWTQSINENVMRAYYGATEGGSNLTAYRGRMLSLFQVLEPGVSVSAQRLSDQVRVIQRNHMLDDTVLERLRFDSRSNLVIPASPMIAVQLQNVSSAPPRSEHDGEEDDDEVISVSTQCNAQLRSALEGAFREYRSTPPELRPRLPRLPMHKKNKALVCALDSQLSNCFDSSKDLADTHSILYCGAVAACRVAHVKFPNNDRATRPKFAVPAWQCRIERRIGKARALIGKLICFREGNTRPRVLRFVKRAFSGTDVSFRDYLARVTERIDFLKQKICAWASRIRRYKRRVERYTQNRTFRSDERWVYRAWERPDQGVTDTRLPDDDAMCSFWRNIWSVPVSHTEGDWTREVERACDSIPEMGAIIISPQDVARAVRPLPNWKSPGPDGLHNFWIKWFQRSHVRLASQFQSALESGSLPQFLTTGITHLLHKSGSTAEPKNYRPITCLPTVYKVLTSILRAKINHHIDSNSIMSASQNGCRNGSRGTKELLLIDMAISQQVRRSRRDLSTCWIDYKKAYDSVPHTWLMRVLELYKVDATLRTFLMSCMGHWRTVLRYPGCRQIQGNSEPIKIERGIFQGDSLSPLWFCLALNPLSTLLEGSGLGYRLRRGGQVISHLLYMDDLKLFAPNNLQLMKLLKVTETFSSAIRMEFGVDKCAVMHVKRGEIMESVGTQLSDSIHLRSLSSTETYKYLGMSEALGINTADMKQSLRDRFFGRLNKVLSSLLSGGNKVRAFNGWVMPVLMYSFGILKWTQTELDALDRRVRALLTANRMHHPRSSVMRLYIPRKCGGRGFLNAKTLHNREICSLREYFLEVDEGMHRDVVSVDKGLTPLSLANENWRKPRVLDTNDRKEVWQGKELHGRFYRALHGPDVDFLASVSWLRFGDLFGETEGFVCAIMDEVMMTNNYRKYIVKDGTVDICRACHRPGESIRHIISGCSRLANGEYLHRHNLVARIIHQQLALKYNLVESEVPYYKYAPDPVLDNGNITLYWDRSIITDRTIVANKPDIVVIDRLERRAMIVDITVPHDENLVKAEKDKQFKYLDLAREVVDMWDVSTAVIVPIVVSANGLIANSFDKHLRRLSLGSWIKGLIQKAVLLDTARIVRRFLSQEP

SEQ ID NO: 29679 - protein, 867 aa, Mythimna ferrago
MRFVRRAFSGTDISPRDYLPCVTERIDFLKQKIYAWANRIRRYKRRVERYIQNRTFQSNERWVYRAWERPDRMTDTRLPDDDAMCSFWRSIWSAPVSHTEGDWIREVERACDLLPEMGAITISTQDVARAVRPLPNWKSPGPDGLHNFWLKRFQGSHARLASQFQSALESGSLPQFLTTGITHLLHKSGSTAEPKNYRPITCLPTVYKVLTSILRAKINSHIETNSIMSVSQNGCRNGSCGTKELLLIDIAISQQVRRSRKNLSACWIDYKKAYDSVPHTWLMRVLELYKVDATLRTFLMSCMGQWRTVLRYPGCRQIWENSEPIRIERGIFQGDSLSPLWFCLALNPLSTLLEGSGLGYWLKRGGQVISHLLYMDDLKLFAPNNLQLMELLKVTETFSSAIRMDFGVDKCAVIHVKRGEIMESEGIQLSDSIHLRSLSSTETYKYLGMSEALSINTDDVKQSLKERFFGRLNKVLNSLLSGGNKVRAFNGWVIPVLMYSFGILKWTQTELDALDRRVRTLLTANRMHHPRSSVMRLYIPRKCGGRGFLNAKSLHNREVCSLREYFLAVDVGMHRDVVAVDKGLTPLSLANENWRKPLVLDTNDRREVWQGKELHGRFYRALHGPDVDLLASVSWLRFGDLFGETEGFVFAIMDEVMMTNNYRKYIVKDGTVDICRACHRPGESIRHIISGCSRLANGDYLHRHNLVARIIHQQLALKYNLVESEVPYYRYVPDPVLDNGSITLYWDRSIITDRTIVANKPDIVVIDRLERRTMIVDIAVPHDENLVKAEKDKQIKYLDLAREVVDMWEVDRAIIVPIVVTANGLIAKSLEQHLRRLSLGSWIKGLIQKAVLLDTARIVRRFLSQEP

SEQ ID NO: 29680 - protein, 1203 aa, Agrochola circellaris
MLTRSAAHRARLPPPDSPLSSASPPPVPSPIVSAASTPAAVVASSSSDEYFSPPTSPIPVRRQGRGRPPRSLGLRGQPAPRRVPAAGGCVQRMRWTQSMNENVMRAYYGSTEGGTNLTAYRVRMLSLFQELEPTANVSAQRLSDQVRVIQRNHRLDDAALDRLRSEVLSNHIVSTPAQTAAQASSIDAIPPRSNHGVAEEDDRAATVSSQCNVRLRSALEDAFREYRYTPTELRPRLPRLPMHKKNRALVCALDSQLRNYFENSEDLIDTHSILYCAAVAACRLANVKFPNYDGVTRPKPAVPAWQCRIEQRIDGARALIGKLYCFREGNTRPRVMRFVRRAFLGTGISPREYMPRVTERIDFLKQKVCAWASRIRRYKRRVERYTQNRMFQSDERWVYRAWERPEQNVADVCRPDDAATSAFWRSIWSVPVCHTEADWMRDVERVCETIPEMEKIEITPLDIARAVRPLPNWKSPGPDGLHNFWLKWLISSHTCLASQFQSSLESGSLPQFLTTGVTHLLHKSGSPAEPKNYRPITCLSTVYKLLTSILRAKINTHIDNNSIMSASQNGCRNGSRGTKELLLIDMAISQQVRRSRKDLSTCWIDYKKAYDSVPHTWLMRVLELYKIDATLRTFLMSCMGQWRTVLRYPGCRQIQGNDEPVWIKRGIFQGDSLSPLWFCLALNPLSTLLEDSGLGYRLRRGGQVISHLLYMDDLKLFAPNNLRLMELLKVTETFSSAIRMEFGVDKCAVMHVKRGEIMESEGTQLSESIHLRSLSSSESYKYLGMSEALGINVADMKQSLKERFFGRLKKVLISLLSGGNKVRAFNGWVMPVLMYSFGILKWTQTELDALDRRVRTLLTANRMHHPRSSVMRLYIPRKCGGRGFLNAKTLHNREVCNLREYFLKAEVGMHRDVVAVDKGLTPLSMAKENWHKPVVLTTDDRKEVWQSKELHGRFYRALHEPGVDFLASVSWLRFGDLFGETEGFVCAIMDEVILTNNYRRYIMKDGTVDVCRACHRPGESIRHIISGCCRLANGEYLHRHNQVARIIHQQLALKYKLVVSEVPYYKYVPDPVLENDHVTLYWDRSIITDRTIAANKPDIVVIDRLARRAMIVDVTIPHDGNLVKAEKEKQIKYLDLAHEVVDMWNVSSAIIVPIVVTANGLMAESLDQHLSRLSLGGWIKGLIQKAVLLDTARIVRRFLSLQP

SEQ ID NO: 29681 - protein, 1201 aa, Amphipyra tragopoginis
MLTRARNRTPRPPPPDSPLSSASQPPESSPTVSAVTPAAAVASSSSDEYFSPPTSPTPVRRQGRRRPPNSLGPRGPPAPSRVLATGGCVQRMKWTQKINENVMRAYYGSTEGGTNLTAYRVRMLTLFQELEPAINVSAQRLSDQVRVIQRNHRLDDAALDRLRLEVQNSHVTPVPSQTAVHQLNISVVPPRSDCVDGDMDDRAVTVSSQYNDQLRSALEDAIREYRANPELRPRLPRLPMHNKNRALVCALDSLLSSYFESSEDLCDTHSILYCAAVAACRVANVKFNNSERATRPKPAVPVWQCRIERRIDEARALIGKLICFREGNTRPRVMRFVRRAFSGTGIRPREYISRVTERIDFLKQKVYAWASRIRRYKRRVERYTLNRMFQCDQRWVYRAWERPDQGVNEGRLPDDDAMNSFWRSIWSVPVIHTEGDWTRDIERACEPIEEMGEIFISPQDVASAVRPLPNWKSPGPDGLHNFWIKWLRGSHARLASQFQSSLESGSLPQFFTTGVTHLLHKSGSTAEPKNYRPITCLPTVYKLLTSILRTKINTHVENNSIMSPSQNGCRNGSRGTKELLLIDMAISQQVRRSRKNLSTCWIDYKKAYDSVPHTWLMRVLELYKINATLRTFLMSCMGQWRTVLRYPGCRTIRGSDEPISIERGIFQGDSLSPLWFCLALNPLSTLLEGSRLGYPLRRGGQVVSHLLYMDDLKLFAPTKLQLVELLKVTETFSNSIRMEFGVDKCAVMHVRRGGIMESEGLQLSDSIHLRSLSANDTYKYLGMSEGLGISEADMKQSLKERFFGRLKKVLKSLLSGGNKVRAFNGWVMPVLMYSFGILKWTQTELDALDRRVRTLLTANRMHHPRSSVMRLYIPRKCGGRGLLNAKTLHNREVCSLREYFLHADAGMHRDVVAVDKGLTPLNLAKENWRKPVVLSTNDRREVWQSKELHGRFYRALHGPDVDFLASVSWLRFGDLFGETEGFVCAIMDEVIMTNNYRKYIVKDGTVDICRACHCPGESLRHIISGCSRLANGEYLHRHNQVARIIHQQLALKYNLVESEVPYYKYVPDPVLENGHITLYWDRSIITDRTIVANKPDIVVIDRSERRTMIVDVTIPHDENLVKAEKDKQIKYLDLAHEVVNMWDVDSATIVPIVVTANGLMAKSLDQHLKRLSLGGWIKGLIQKAVLLDTARIVRRFLSLEP

SEQ ID NO: 29682 - protein, 1111 aa, Amphipyra tragopoginis
MRWTQAMNENCMRAYFGATEGGTNLTAYRGRMLSLFQALEPAVNVSAQRLSDQVRVIQRDHRLDGAALDRLRSEMQSSHVAPLQSQTAAQSQVPSVVAPRSIPADEESDDRVTNVSTQSNEQLRSALELAIREYRSTLPDLRPRLPRLPMNKKNKALMCALDSLLSSYFDGSEDLADTHSILYCAAVAACRVAHVKVDNNDRATRPKPAVPAWQCRIERRIGGARALIGKLICFREGNTRPRVMRFVRRAFSGTDTSPRDYMSCVTERIDFLKQKVYAWANRIRRYKRRVERYTQNRMFQRDQRWVYRAWERADQGVGDAHLPDDDATNSFWRSIWSVPVSHTEGDWMRDVERVCEPILDMGAISISPQDVASAVRPLPNWKSPGPDGLHNFWLKWLRSSHARLASQFQSSLETGTLPQFLTTGVTHLLHKSGSTAEPKNYRPITCLPTVYKLLTSILRCKINSHIENNSIMSASQNGCRNGSRGTKELLLIDMAISQQVRRSRKDLSTCWIDYKKAYDSVPHTWLMRVLELYKVNTTLCAFLTSCMGQWRTVLHYPGCRQIQGIGEPIRIERGIFQGDSLSPLWFCLALNPLSTLLEGSGLGYRLRRGGQVISHLLYMDDLKLFAPNNLQLLDLLKVTETFSNSIRMEFGVDKCAVMHVKRGRIMESVGTQLSDSIQLRSLSSTETYKYLGMSEALGINEADMKQSLRERFYGRLKKVLKSLLSGGNKVRAFNGWVMPVLMYSFGILKWTQTELDALDRRVRTLLTAYRMHHPRSSVMRLYIPRKCGGRGFLNAKTLHNREVCSLREYFSQADVGMHRDVVAVDKGLTPLSLAKENWRKPAVLDTNGRKDVWRSKELHGRFYRALHGPDVDFLASVAWLRFGDLFGETEGFVCAIMDEVMMTNNYRKYVVRDGTVDICRACHCPGESIRHIVSGCSRLANGEYLHRHNLVARIIHQQLALKYKLVDAEVPYYKYVPDPVLENGHVTLYWDRSIITDRTIVANKPDIVVIDRSERRAMIVDVTVPHDENLVKAENDKKIKYLDLAHEVVDMWDIDSAVIVPIVVTANGLIAKSLDQHLMRLSLGGWIKGLIQKAVLLDTARIVRKFLSLEP

SEQ ID NO: 29683 - protein, 1194 aa, Autographa pulchrina
MLTRSRKRKPARPPSPDSSPSSASQLPDHVQAPAPAVASSSSDEYYSPPTSPTPVRRQGRRRPPSSLAPAGQPASNRAPAPGGDVRRMKWTQGINENVMRAYYGATEGGTNLTAYRARMLSLFQVLEPGVSVSAQRLSDQVRVIQRNHRLDDSTLDRLRSEIQSSPATNTLPPAAAPVSGAPHTAPSDGEEDDGAMTVSTQFSELIRSTLEDAIRDYRTSPPDQRPRLPRLPMHNRNKAIMGALDSLLPIYFESSEDLRDTHSILYCAALTACRVANVAICYSNIAARPKPAVPAWQCRIEQRVAEARTLIAKLIAFKQGNSRPRVMRFVRRAFAGTDISSSEYTARVTERIDLFKQKVCAWASRIRRYKRRVERFYLNRMFQKDQRWVYRAWERPASGVDGGCLPDGDATNSFWRSIWSVPVSHSEGGWMREVEQVCEPIQEMGAITISPQDVANAVRPMANWKTPGPDGLQNFWLKWLRSSHGCLASQFQSAVESASLPQFLTTGSTHLLHKTGSATDPKNYRPITCLPTVYKLLTSILRAKINEHVVSFSIMSASQNGCRSGSRGTKELLLIDTAICQQVRRSKKDLSTCWIDYKKAYDSVPHTWLMRVLELYKINATLRAFLVSCMGQWSTVLHYPGCRDIQQGGEPIRIERGIFQGDSLSPLWFCLALNPLSTLLENSRLGYSLRRGSQVISHLLYMDDLKLFANSGLQLMKLLKITESFSNSIRMEFGVDKCAVMHVKRGGVVESQGIQLSDSINLRSLSATETYKYLGMSEALGINAADVKQSLQARFFGRLNKVLKSVLSGGNKVRAFNGWVMPVLMYSFGVLKWTQTELDALDRRVRTLLTANRMHHPRSSVMRLYIPRKCGGRGFLNAKTLHNREVCNLREYFLQVDVGMHRDVVVVDKGLTPLSLGKENWHKPVVLSVKDREVVWQSKELHGRYYRTLHGSDVDFLASVAWLRFGDLFGETEGFVCAIMDEVIMTNNYRKYIIKDGTVDICRACHCPGESLRHIISGCSRLANGEYLHRHNQVARIIHQQLALRYKLVESEVPYYRYVPDPVLENGRVTLYWDRSIITDRTIVANKPDIVVIDRSERRAIIVDITIPHDENLVKAEKEKQLKYLDLAHEVVDMWEVDSAIIVPIVVTANGIIAKSLDQHLKRLSLGAWVKGLMQKAVLLDTARIVRRFLSLEP

SEQ ID NO: 29684 - protein, 1123 aa, Mythimna impura
MLTRSRAREQETHPTSSGSSLSSASQPPGPAPAVSPVIPEAAVASSSSDEYFSPPTTPPPARRRGRGRPPASLRPRGPPVFPAAGGSVQRMRWTQSINENVMRSYFGATEGGSNLTAYRGRMLSLFQVLEPTVNVSAQRLSDQVRVIQRNRMLDDAVLDRLRLESQRSRASSATPPAAVQLQPSALPRPDHVGDADDDAAISVSTQCNERLRSALEDAFREYRSTPPGLRPRLPRLPMHKRNRALVCALDSQLSNCFDSSKDLADTHSILYCAAAAACRVAHVKFPNCDRATRPAVPAWQRRIERRIGEARALIGKLICFREGNTRPRVMRFVRRAFLGTDISPQNYLPCVTERIDFLKQKVYAWASRIRRYKRRVERYTQNRTFQSNERWVYRTWERPDQDVTDTRLPDDDAMCSFWRRIWSVPVSYIEGDWIREVERTCDLLPEMGAITISPQDVARAVRPLPNWKSPGLDGLHNFWIKWFQGSHARLASQFQSALESGSLPEFLTTGITHLLHKSGSTADPKNYRPITCLPTVYKVLTSILRAKINTHIETNSIMSASQNGCRNGSRGTKELLLIDMAISQQVRRSRKDLSTCWIDYKKAYDSVPHTWLMRVLELYKVDTTLRTFLMSCMRQWRTVLHYPGCRQIRENSEPIRIERGIFQGDSLSPLWFCLALNPLSTLLEGSGLGYRLKRGGQVISHLLYMDDLKLFAPNNLHLMELLKVTETFSSAIRTEFGVDKCAVMHVKRGEIMESVGTQLSDSIYLRFLCSTETYKYLGMSEALGINAADVKQSLKERFFGRLNRVLKSLLSGGNKVRAFNGWVMPVLMYSFGILKWTQTELDALDRRVRTLLTANRMHHPRSSVMRLYIPRKCGGRGFLNAKTLHNREVCSLREYFLETDVGIHRDVVAVDKGLTPLSLANGNWRKPIILDTNDRREVWQSKELHGRFYRALHGPDVDLLASVSWLRFGDLFGETEGFVCAIMDEVVMTNNYRKYIVKDGTADICRACHRPGESIRHIISGCSHLANGDYLHRHNLVARIIHQQLALKYNLVESEVPYYKYVPDPVLDNGSITLYWDRSIITDRTIVANKPDIVVIDRLERRTVIVDIAVPHDENLVKAEKDK

SEQ ID NO: 29685 - protein, 1200 aa, Mythimna impura
MLTRAAARRARHPPPGSPLSSASPPPDLESPVSPAAAVASSSSDEYFSPPTSPTPVRRQRRGRPPKSLGSRGQPAPSRVPAAGGCVQRMRWTQSMNENVMRAYYGSTEGGTNLTAYRDRMLSLFQDLEPTVNVSAQRLSDQVRVIQRNHRLDDATLDRLRSEVLSNQIVSTSIQTQTAATPTTNAISPRSNPNNDDADDRVVTVSSQCNNELRSALEDALREYRTTPTELRPRLPRLPMHKKNRALVCTLDSLLKNNFESSENLVDTHSILYCGAVAACRLANINFPNIDGTIRPKPAVPAWQYRIERRIDGARVLIGKLHCFREGNTRPRVMRFVRRAFLGTGISPQEYMSRVTERIDFLKQKVCAWARRIRRYKRRVDRYSQNRMFQSDERWVYRAWERPEQNVIDGRRPDDFATITFWRNIWSVPVSHTEGDWMRDVERVCEAIPEMEKVVITPADVAKAVRPLPNWKSPGPDGLQNFWLKWFSNSHAPLASQFQSTLESGSLPEYLTTGVTHLLHKTGNPVEPKNYRPITCLSTVYKLLTSILRAKINRHIENNLIMSASQNGCRNGSRGTKELLLIDMAISQQARRSRKDLSTCWIDYKKAYDSVPHTWLMRVLELYKVDMTLRTFLESCMRQWKTVLRYPGCRPIQGNDEPIRIKRGIFQGDSLSPLWFCLALNPLSTLLEESGLGYRLRRGGQAISHLLYMDDLKLFAPSNLQLMELLKVTETFSSAIRMEFGVDKCAAMHVKRGEIMESEGIQLPDSIHLRSLSSTETYRYLGMSEALGINNADMKQSLKERFFGRLKKVLNSLLSGGNKVRAFNGWVMPVLMYSFGILKWTQTELDALDRRVRTLLTANRMHHPRSSVMRLYISRKCGGRGFLNAKTLHNREVCSLREYFLKTDVGMHRDVVAVDKGLTPLSMAKEDWRKPVILTTDDRKEIWKGKELHGRFYRALHEPYVDFLASVAWLRFSDLFGETEGFICAIMDEVILTNNYRRYIMKDGTVDVCRACHRPGESIRHIISGCSRLANGEYLHRHNQVARIIHQQLALKYNLVDSEVPYYKYVPDPVLENDHVTLYWDRSIITDRTIVANKPDIVVIDRLARRAVIVDVTIPHDENLVKAEKEKQIKYLDLAHEVVDMWNVDSAVIVPMVVTANGLIAKSFDDHLSKLSLRGWIKGLIQKAVLLDTARIVRRFLSLEP

SEQ ID NO: 29686 - protein, 1099 aa, Xestia xanthographa
MITRAAARRAHLPTPDSSLSSASPPPDPGSPVSPVAAVASSSSDEYFSPPTSPPPVRRAGRGRPPKSLGLRGQQTPNRVPATGGCVQRMKWTQSMNENVMRAYYGSTEGGTNLTAYRVRMLSLFQGLEPTVNVSAQRLSDQVRVIQRSHRLDDAALDRLRSEVLSNLIVLTPTQTAVQVSAIDATPPRLNPVVVEEDDGVATVSSQCNDRLRSALENALHEYRSTPTELRPRLPRLPMHKKNRALVCALDSQLKNIFESSENLVDTHSILFCGAVAACRLANVKFPNCDVANRPKPAVPAWQRRIERRIDGARVLIGKLYCFREGNTRPRVMRFVRRAFSGTEISPQEYMSRVTERIDFLKQKVYAWAHRIRRYKRRVDRYSQNRMFQSDERWVYRAWERPEQNMTDVCRPDDAATSSFWRSIWSVPVCHTEADWMRDVERVCEPIPEMEPIFITPLDVARAVRPLPNWKSPGPDGLHNFWLKWFSSSHTCLASQFQSSLESGSLPQFLTTGVTHLLHKSGSPAEPKNYRPITCLSTIYKLLTSILRVKINTHIDKNSIMSASQNGCRNGSRGTKELLLIDMAISQQVRRSRKDLSTCWIDYKKAYDSVPHTWLMRVLELYKIDTTLRTFLESCMRQWRTVLRYPGCRQIQGSDDPVWIKRGIFQGDSLSPLWFCLALNPLSTLLENSGLGCRLRKDGQVISHLLYMDDLKLFASNKLRLMELLKVTETFSNAIRMEFGVDKCAVMYVKRGEIMESEGLQLSDSIQLRSLSSSETYKYLGMSEALGINITDMKQSLKERFFSRLRKVLNSLLSGGNKVRAFNGWVMPVLMYSFGILKWTQTELDALDRRVRTLLTESRMHHPRSSVMRLYIPRKCGGRGFLNAKTLHNREVCSLREYFLKAEVGMHRDVVAVDKGLTPLSMAKENWHKPEVLTTDDRKEVWQGKELHGRFYRALHGPDVDFLASVSWLRFGDLFGETEGFVCAIMDEVMLTNNYRKYIMKDGTVDMCRACHLPGESIRHIISGCSRLANGEYLHRHNQVARIIHQQLALKYKLVESEVPYYKYVLDPVLESDHVTLYWDRSIITDRTIVANKPDIVMID

SEQ ID NO: 29687 - protein, 1202 aa, Cosmia trapezina
MLTRSAARARPPPPDSSLSSASPPPVPSPTVSAVTTPAAVVASSSSDEYFSPPTSPTPVRRQGRGRPPKSLGLRGQPAPSWVPAAGGCVQRLRWTQSMNENVMRAYYGSTEGGTNLTAYRVRMLSLFQELEPTVNVSAQRLSDQVRVIQRNHRLDDAALDRLRSEILNDRIVSTPAQTAVQASIIDAVPPRSTHVVGEGDDRVATVSSQSNDRLRSALEDAFREYRSTPTELRPRLPCLPMHKKNRALVCALDSQLKDFFESSEDLVDTHSILYCAAVAACRLANVKFPNCDGATRPKPAVPAWQCRIERRIDGARVLIGKLYCFREGNTRPRVMRFVRRAFSGTGISPPEYMSRVTERIDFLKQKVCAWASRIRRYERRVDRYTQNRIFQSDERWVYRAWERPEQNVTDVCRPDDTITSAFWRSIWSVPVCHAEAGWMQDVERVCEAIPEMEAVLITPLDVARAVRPLPNWKSPGPDGLHNFWIKWLISSHTRLASQFQSSLESGSLPQFLTTGVTHLLHKSGSPAEPKNYRPITCLSTIYKLLTSILRAKINMHIENNSIMSASQNGCRNGSRGTKELLLIDMAISQQVRRSRKDLSTCWIDYKKAYDSVPHTWLMRVLELYKIDATLRTFLGSCMGQWRTVLRYPGCRRIQGNDEPVWIKRGIFQGDSLSPLWFCLALNPLSTLLEDSGLGYRLRRGGQVISHLLYMDDLKLFAPNKLRLMELLKVTETFSSAISMEFGVDKCAVMHVKRGEIMESEGIQLSDSIHLRSLSSSETYKYLGMSEALGINVADMKQSLKERFFGRLKKVLISLLSGGNKVRAFNGWVMPVLMYSFGILKWTQTELDALDRRVRTLLTANRMHHPRSSVMRLYIPRKYGGRGFLNAKTLHNREVCSLREYFLKGDVGMHRDVVAVDKGLTPLSMANENWRKPVVLTTDDRKKVWQSKELHGRFYRALHEPGVDFLASVSWLRFGDLFGETEGFVCAIMDEVILTNNYRRHIMRDGTVDVCRACHRPGESIRHIVSGCSRLANGEYLHRHNQVARIIHQQLALKYKLVDSEVPYYRYVPDPVLENDHVTLYWDRSIITDRTIVANKPDIVVIDRLARRAMIVDVTIPHDENLVKAEKEKQIKYLDLAHEVVDMWNVSSAIIVPIVVTANGLMAESLDQHLLRLSLGGWIKGQIQKAVLLDTARIVRRFLSLQP

SEQ ID NO: 29688 - protein, 1194 aa, Autographa gamma
MLTRSRARKPARPPSPDPSPSSASQLPDHVPAPAPAVASSSSDEYYSPPTSPTPVRRQGRRRPPCSLAPSGQPASNRAPAPGGDVRRMKWTLSINENVMRAYYGATEGGTNLTAYRARMLSLFQALEPGVSVSAQRLSDQVRVIQRNHRLDDSTLDRLRSEIQHSPATSTSPPVAAPVSGAPLTAPSDGEEEDGAITVSTQCNELIRSTLEDAIRVYRRSPPDQRPRLPRLPMHNRNKAIMGALDSLLPVYFESSEDLRDTHSILYCAALTACRVANVAMCHNNIATRPKPAVPAWQCRIEQRVAEARTLIAKLKAFKQGNSRPRVMRFVRRAYAGTDISPSEFIARVTERIDLFKQRVCAWANRIRRYKRRAERFHLNRMFQKDQRWVHRLWERPVSAMDGGCLPDGDATNSFWRSIWSVPVTHSEGGWMREVEQVCEPIQEMGAITISPQDVANAVRPMANWKTPGPDGLQNFWLKWLRSSHSCLASQFQSAVESASLPQFLTTGSTHLLHKTGSATDPKNYRPITCLPTVYKLLTSILRAKINEHIVNFSIMSASQNGCRSGSRGTKELLLIDTAICQQVRRSKKDLSTCWIDYKKAYDSVPHTWLMRVLELYKINTTLRAFLMSCMGQWSTVLHYPGCRDIQQGGEPIRIERGIFQGDSLSPLWFCLALNPLSTLLENSGLGYSLRRGGQVISHLLYMDDLKLFATSGFQLMELLKITESFSNSISMEFGVDKCAVMHVKRGGIVESQGIQLSDSINLRSLSATDTYKYLGMSEALGINVADVKQSLQARFFGRLNKVLKSVLSGGNRVRAFNGWVMPVLMYSFGVLKWTQTELDALDRRVRTLLTANRMHHPRSSVMRLYIPRKCGGRGFLNAKTLHNREVCNLREYFLQVDVGMHRDVVVVDKGFTPLSLGKENWHKPVVLSVKDREDVWQSKELHGRYYRTLHGPDVDFLASVAWLRFGDLFGETEGFVCAIMDEVIMTNNYRKYIIKDGTVDICRACHCPGESLRHIISGCSRLANGEYLHRHNQVARIIHQQLALRYKLVESEVPYYRYVPDPVLENGRVTLYWDRSIITDRTIVANKPDIVVIDRSERRAIIVDVTIPHDENLVKAEKEKQLKYLDLAHEVVDMWEVDSAMIVPIVVTANGIIAKSLDQHLKRLSLGTWVKGLIQKAVLLDTARIVRRFLSLES

SEQ ID NO: 29689 - protein, 1202 aa, Griposia aprilina
MLTRSARTRARPPPPDSSLSSASPPPVSSPIVSAVMTPVAVVASSSSDEYFSPPTSPTPVRRQGRGRPPRSLGLRGHPAPSRVPAAGGCVQRMKWTQSMNENVMRAYYRSTEGGTNLTAYRDRMLSLFQELEPTINVSAQRLSDQVRVIQRSHRLDDAALDRLRSELNNHIISTPAQTAVQASTIDEIQPRSNHGVEVEDDRVASVSSQCNARLRSALEDAFREYRSTPTELRPRLPRLPMHKKNSALVCALDSQLKNVFESSENLIDTHSILYCAAVAACRLANVRFPNCDGATRPKPAVPAWQCRIERRIDGAKVLIGKLHCFREGNNRPRVMRFVRRAFSGTGISPREYMSHATERIDFLKQKVCAWASRIRRYKRRVDRYTQNRMFQSDERWVYRAWERPEQNVTDECRPDDATTSTFWRSIWSVPVCHVEADWMRDVGRACETVPEMDAVLITPLDVARAVRPLPNWKSPGPDGLHNFWLKWLISSHACLASQYQSSLESGSLPQFLTTGVTHLLHKSGCPTDPKNYRPITCLSTVYKLLTSILRAKINTHIESNSIMSASQNGCRNGSRGTKEPLLIDMAISQQVRRSRRDLSTCWIDYKKAYDSVPHTWLMRVLELYKIDTTLRTFLRSCMGQWRTVLRYPGCRQIQANDEPVWIKRGIFQGDSLSPLWFCLALNPLSTLLEDSGLGYRLRKDGQVISHLLYMDDLKLFAPNKLQLMELLKVTETFSSTIRMEFGVDKCAVMHVKRGEIMEPEGIQLSDSIHLRSLSSSESYKYLGMSEALGINVADMKQSLRERFFGRLKKVLISLLSGGNKVRAFNSWVMPVLMYSFGILKWTQTELDALDRRVRTLLTANRMHHPRSSVMRLYIPRKCGGRGFLNAKTLHNREVCSLREYFLKAEVGMHRDVVAVDKGLTPLSMAKENWRKPVVLTTDDRKEVWQSKELHGRFYRALHEPGVDFLASVSWLRFGDLFGETEGFVCAIMDEVILTNNYRRHIMKDGTVDMCRACHRPGESIRHIVSGCSRLANGEYLHRHNQEARIIHQQLALKYKLVDSEVPYYKYVPDPVLENDHITLYWDRSIITDRTIVANKPDIVVIDRLARRTMIIDITIPHDENLVKAEKEKQIKYLDLAHEVVEMWNVSSAVIVPIVVSANGLMAKSLDQHLSRLSLDGWVKGLIQKAVLLDTARIVRRFLSLEP

SEQ ID NO: 29690 - protein, 868 aa, Mythimna ferrago
MRFVRRAFSGTEISPREYMSRVTERIDFLKQKICAWANRIRRYKRRVDRYSQNRMFQSDERWVYRAWERPGQNVTDGFRPDSVATNTFWRSIWSEPVCHNEGGWMRDVERVCEAIPEMDKVFITPLDVARAVRPLPNWKSPGPDGLQNFWLKWYSSSHVILASQFQSSLESGSLPQILTTGTTHLLHKTGSTADPKNYRPITCLSTVYKLLTSILRVKITLHIEKNSIMFASQNGCRNGSRGTKELLLIDMAISQQVRRSRKDLSTCWIDYKKAYDSVPHTWLMKVLELYKIDATLRTFLESCMRQWKTVLRYPGCRPIQGNDEPIWIKRGIFQGDSLSPLWFCLALNPLSTLLEDSGLGYRLRRGGQVLSHLLYMDDLKLFAHNNSQLMELLKVTETFSSAIRMEFGVDKCAVMHVRRGEIVESEGIQLSDSIHLRSFSLTETYKYLGMSEALGINVADMKQTLKERFFGRLKKVLNSLLSGGNKVRAFNGWVMPVLMYSFGILKWTQTELDALDRRVRTLLTANRMHHPRSSVMRLYIPRKCGGRGFLNAKTLHNREVCSLREYFLKTDVGMHRDVVAVDKGLTPLSMAKENWRKPVVLTTDDRKEVWKGKELHGRFFRALHEPDVDFSASVAWLRFSNLFGETEGFVCAIMDEVILTNNYRRHIMKDGTVDVCRACHRPGESIRHIISGCSRLANGEYLHRHNQVARILHQQLALKYNLVDSEVPYYRYVPDPVLENDHVTLYWDRSIITDRTIVANKPDIVVIDRLARRAMIVDVTIPHDENLVKAEKEKQIKYLDLAHEVVDMWNVDSAIIVPIVVTANGLIAKSFDDHLSKLSLHGWIKGLIQKAVLLDTARIVRRFLSLEP

SEQ ID NO: 29691 - protein, 1203 aa, Agrochola circellaris
MLTRSAAHRARLPPPDSPLSSASPPPVPSPIVSAASTPTAVVASSSSDEYFSPPTSPIPVRRQGRGRPPRSLGLRGQPAPSRVPAAGGCVQRMRWTQSMNENVMRAYYGSTEGGTNLTAYRVRMLSLFQELEPTANVSAQRLSDQVRVIQRNHRLDDAALDRLRSEVLSNHIVSTPAQTAAQASSIDAIPPRSNHGVAEDNDRAATVSSQCNVRLRSALEDAFREYRYTPTELRPRLPRLPMHKKNRALVCALDSQLRNYFENSEDLIDTHSILYCAAVAACRLANVKFPNYDGVTRPKPAVPAWQCRIEQRIDGARALIGKLYCFREGNTRPRVMRFVRRAFSGTGISPREYMPRVTERIDFLKQKVCAWASRIRRYKRRVERYTQNRMFQSDERWVYRAWERPEQNVADVCRPDDAATSAFWRSIWSVPACHAEADWMQDVERVCETIPEMDKIEITPLDIAKAVRPLPNWKSPGPDGLHNFWLKWLISSHTCLASQFQSSLESGSLPQFLTTGVTHLLHKSGSPAEPKNYRPITCLSTVYKLLTSILRAKINTHIDNNSIMSASQNGCRNGSRGTKELLLIDMAISQQVRRSRKDLSTCWIDYKKAYDSVPHTWLMRVLELYKIDATLRTFLMSCMGQWRTVLRYPGCRQIQGNDEPVWIKRGIFQGDSLSPLWFCLALNPLSTLLEDSGLGYRLRRGGQVISHLLYMDDLKLFAPNKLRLMELLKVTETFSSAIRMEFGVDKCAVMHVKRGEIMESEGTQLSESIHLRSLSSSESYKYLGMSEALGINVADMKQSLKERFFGRLKKVLISLLSGGNKVRAFNGWVMPVLMYSFGILKWTQTELDALDRRVRTLLTANRMHHPRSSVMRLYIPRKCGGRGFLNAKTLHNREVCNLREYFLKAEVGMHRDVVAVDKGLTPLSMAKENWHKPVVLTTDDRKEVWQSKELHGRFYRALHEPGVDFLASVSWLRFGDLFGETEGFVCAIMDEVILTNNYRRYIMKDGTVDVCRACHRPGESIRHIISGCSRLANGEYLHRHNQVARIIHQQLALKYKLVVSEVPYYKYVPDPVLENDHVTMYWDRSIITDRTIVANKPDIVVIDRLARRAMIVDVTIPHDGNLVKAEKEKQIKYLDLAHEVVDMWNVNSAIIVPLVVTANGLMAESLDQHLSRLSLGGWIKGLIQKAVLLDTARIVRRFLSLQP

SEQ ID NO: 29692 - protein, 1200 aa, Amphipyra tragopoginis
MLTRSKARARDAHPPPPDSSPSSASQQQGLDPASPAAAVASSSSDEYYSPPSSPPPARRRGGTRPPGGLGLRGPLASDRVPAPGGIVPRMKWTQKMNESVMRAYYGATEGGTNLTAYRSRMLSLFQVLEPAVNVSAQRLSDQVRVIQRGHMLDDTVLDRLRSEVQSSPVISPSSQVLEQQQNLAAALPRPNRADEEDDDRVANVSTQCNGELRSALEDAMREYRYTRSDLRPRIPRLPMHRKNRALVCALDSLLSNYFDGSEDLGDTHSILYCAAVAACRVAHVKFTDNERATRPKNAVPAWQCRIERRISEARALIGKLVCFREGNTRPRVMRFVRRAFSGTDVSPREYMSRVTERIDFLKQKVYAWANRIRRYRRRVDRYTQNRLFQSDERWVYRTWERPDQRVSDTRLPDNDVMNTFWRNIWSVPVAHTEGDWMQEVQRACEPIQEMGDIIISPQDVASAVRPMSNWKSPGPDGLHNFWLKWLRSSHARLASQFQSSLESGSLPQFLTTGVTHLLHKSGSTAEPKNYRPITCLPTVYKVLTSILRTKINNHIDNNSIMSASQNGCRNGSRGTKELLLIDMAISQQVRRSRKDLSTCWIDYKKAYDSVPHTWLMRVLELYKVNTTLCAFLTSCMGQWRTVLRYPGCQQIQGIGEPIRIERGIFQGDSLSPLWFCLALNPLSTLLEGSGLGYRLRRGGQVISHLLYMDDLKLFAPNNLRLLELLKVTETFSNSIRMEFGVDKCAVMHVKRGRIMESVGTQLSDSIQLRSLSSTETYKYLGMSEALGVNETDMKQALKERFFGRLKKVFNSLLSGGNKVRAFNGWVMPVLMYSFGILKWTQTELDALDRRVRSLLTANRMHHPRSSVMRLYIPRKCGGRGFLNAKTLHNREVCSLREYFSQADVGMHRDVVAVDKGFTPLSLAKENWRKPVVLDTNGRREVWRSKELHGRFYRALHGPDVDFLASVAWLRFGDLFGETEGFVCAIMDEVMMTNNYRKYVVKDGTVDICRACHCPGESIRHIVSGCSRLANGEYLHRHNLVARIIHQQLALKYNLVDAEVPYYKYVPDPVLENGHVTLYWDRSIITDRTIVANKPDIVVIDRSERLTMIVDITVPHDENLVKAEKDKEIKYQDLAHEVVAMWDVDSAIIVPIVVTANGLIAKSLDQHLKRLSLGSWIKGLIQKAVLLDTARIVRKFLSLRP

SEQ ID NO: 29693 - protein, 1207 aa, Amphipyra tragopoginis
MLTRSRAKARAQTTQPPPPASSLSSASQPPESSPNVSAVTPAAAVASSSSDEYFSPPTSPPPARRRGGRRPPDRLGPRGPQASDRVPAPGGSVSRMRWTQTINENAMRAYFGATEGGTNLTAYRSRMLSLFQVLEPTVNVSAQRLSDQVRAIQRGHMLDDTVLDRLRSEIQCSPVISSSSQAPGLISRNVPVASPRLQHVDEEDDDRATAVSIQCNEQLRRALEDAMREYRSTRPELRPRLPRLPMHRRNRALMCALDSLLSNYFDSSEDLGDTHSILYCAAVAACRVAHVKFINNERATRPKNAVPAWQCRIERRIAEARALIGKLICFGEGNTRPRVMRFVRRAFSGTDVSPREYMSRVTERIDFLKQKVYAWANRIRRYRRRVDRYNQNRMFRSDERWVYRNWEQPDQSVGAAHLPDDDAMNSFWRSIWSVPVTHTEGDWMRDVERMCEPILDMGAIIISPQDVASAVRPLPNWKSPGPDGLHNFWLKWLRSSHARLASQFQSSLETGTLPQFLTTGVTHLLHKSGSTAEPKNYRPITCLPSVYKVLTSILRTKINNHIDNNSIMSASQNGCRNGSRGTKELLLIDMAISQQVRRSRKDLSTCWIDYKKAYDSVPHTWLMRVLELYKVNTTLCAFLTSCMRQWRTVLRYPGCRQIQGIGEPIRIERGIFQGDSLSPLWFCLALNPLSTLLEGSGLGYRLRRGGQVISHLLYMDDLKLFAPNKLQLLELLKVTETFSNSIRMEFGVDKCAVMHVKRGGIMESVGTQLTDSIHLRSLSSTETYKYLGMSEALGINETDMKQSLGERFYGRLKKVLNSLLSGGNKVRAFNGWVMPVLMYSFGILKWTQTELDALDRRVRSLLTANRMHHPRSSVMRLYIPRKCGGRGFLNAKTLHNREVCSLREYFSQSDVGMHRDVVAVDKGFTPLSLAKENWRKPVIFDTNGRREVWRSKELHGRFYRALHGPDVDFLASVAWLRFGDLFGETEGFVCAIMDEVMMTNNYRKYIVKDGTVDICRACHCPGESIRHIVSGCSRLANGEYLHRHNLVARIIHQQLALKYNLVDAEVPYYKYVPDPVLENGHVTLYWDRSIITDRTIVANKPDIVVIDRSERLTMIIDITVPHDENLVKAEKDKEIKYQDLAHEVVDMWDVDSAVIVPIVVTANGLIAKSLDQHLKRLSLGGWIGGLIQKAVLLDTARIVRKFLSLRP

SEQ ID NO: 29694 - protein, 999 aa, Autographa pulchrina
MTVSTQCSELIRSTLEDAIRDYRTSPPDQRPRLPRLPMHNRNKAIMGALDSLLPIYFESSEDLRDTHSILYCAALTACRVANVAICYSNIAARPKPAVPAWQCRIEQRVAEARTLIAKLIAFKQGNSRPRVMRFVRRAFAGTDISSSEYTARVTERIDLLKQKVCAWASRIRRYKRRVERFYLNRMFQKDQRWVYRAWERPASGVDGGCLPDGDATNSFWRSIWSVPVSHSEGGWMREVEQVCEPIQEMGAITISPQDVANAVRPMANWKTPGPDGLQNFWLKWLRSSHGCLASQFQSAVESASLPQFLTTGSTHLLHKTGSATDPKNYRPITCLPTVYKLLTSILRAKINEHVVSFSIMSASQNGCRSGSRGTKELLLIDTAICQQVRRSKKDLSTCWIDYKKAYDSVPHTWLMRVLELYKINATLRAFLVSCMGQWSTVLHYPGCRDIQQGGEPIRIERGIFQGDSLSPLWFCLALNPLSTLLENSRLGYLLRRGSQVISHLLYMDDLKLFANSGLQLMKLLKITESFSNSIRMEFGVDKCAVMHVKRGGVVESQGIQLSDSINLRSLSATETYKYLGMSEALGINAADVKQSLQARFFGRLNKVLKSVLSGGNKVRAFNGWVMPVLMYSFGVLKWTQTELDALDRRVRTLLTANRMHHPRSSVMRLYIPRKCGGRGFLNAKTLHNREVCNLREYFLQVDVGMHRDVVVVDKGLTPLSLGKENWHKPVVLSVKDREVVWQSKELHGRYYRTLHGSDVDFLASVAWLRFGDLFGETEGFVCAIMDEVIMTNNYRKYIIKDGTVDICRACHCPGESLRHIISGCSRLANGEYLHRHNQVARIIHQQLALRYKLVESEVPNYRYVPDPVLENGRVTLYWDRSIITDRTIVANKPDIVVIDRSERRAIIVDITIPHDENLVKAEKEKQLKYLDLAHEVVDMWEVDSAIIVPIVVTANGIIAKSLDQHLKRLSLGAWVKGLMQKAVLLDTARIVRRFLSLEP

SEQ ID NO: 29695 - protein, 1194 aa, Autographa pulchrina
MLTRSRTRRPARPPPPDSSPSSASQLPDHVHAPAPAVASSSSDEYYSPPTSPTPVRRQGRRRPPSSLVPSGQPASNRAPAPGGDVRRMKWTQGINENVMRAYYGATEGGTNLTAYRARMLSLFQVLEPGVSVSAQRLSDQVRVIQRNHRLDDSTLDRLRSEIQSSPATNTLPPAAAPVSGAPHTAPSDGEEDDGAMTVSTQCSELIRSTLEDAIRDYRTSPPDQRPRLPRLPMHNRNKAIMGALDSLLPIYFESSEDLRDTHSILYCAALTACRVANVAICYSNIAARPKPAVPAWQCRIEQRVAEARTLIAKLIAFKQGNSRPRVMRFVRRAFAGTDISSSEYTARVTERIDLFKQKVCAWASRIRRYKRRVERFYLNRMFQKDQRWVYRAWERPASGVDGGCLPDGDATNSFWRSIWSVPVSHSEGGWMREVEQVCEPIQEMGAITISPQDVANAVRPMANWKTPGPDGLQNFWLKWLRSSHGCLASQFQSAVESASLPQFLTTGSTHLLHKTGSAMDPKNYRPITCLPTVYKLLTSILRAKINEHVVSFSIMSASQNGCRSGSRGTKELLLIDTAICQQVRRSKKDLSTCWIDYKKAYDSVPHTWLMRVLELYKINATLRAFLVSCMGQWSTVLHYPGCRDIQQGGEPIRIERGIFQGDSLSPLWFCLALNPLSTLLENSRLGYSLRRGSQVISHLLYMDDLKLFANSGLQLMKLLKITESFSNSIRMEFGVDKCAVMHVKRGGVVESQGIQLSDSINLRSLSATETYKYLGMSEALGINGADVKQSLQARFFGRLNKVLKSVLSGGNKVRAFNGWVMPVLMYSFGVLKWTQTELDSLDRRVRTLLTANRMHHPRSSVMRLYIPRKCGGRGFLNAKTLHNREVCNLREYFLQVDVGMHRDVVVVDKGLTPLSLGKENWHKPVVLSVKDREVVWQSKELHGRYYRTLHGSDVDFLASVAWLRFGDLFGETEGFVCAIMDEVIMTNNYRKYIIKDGTVDICRACHCPGESLRHIISGCSRLANGEYLHRHNQVARIIHQQLALRYKLVESEVPYYRYVPDPVLENGRVTLYWDRSIITDRTIVANKPDIVVIDRSERRAIIVDITIPHDENLVKAEKEKQLKYLDLAHEVVDMWEVDSAIIVPIVVTANGIIAKSLDQHLKRLSLGAWVKGLMQKAVLLDTARIVRRFLSLEP

SEQ ID NO: 29696 - protein, 962 aa, Hecatera dysodea
MHKKNRALVCALDSLLKNIFESSENLVDTHSILYCGAVAACRVANVKFSNSDGATRLKNAAPAWQCRIERRIDEARVLIGKLYCFREGNTRPRVMRFVRRAFLGTEISPQEYMSRVTERIDFLKQKVCAWANRIRRYKRRVDRYSQNRIFQSDERWVYRAWERPEQSVTDVCRPDDVTTNTFWRSIWSVPVCHAEGGWMRDVERVCEAIPQMEKITITTVDIATAVRPLPNWKSPGPDGLHNFWLKWYSSSPALLASQFQASLDSGSLPQFLTTGVTHLLHKTGSPAEPKNYRPITCLSTVYKLLTSILRVKINEHIESNSIMSYSQNGCRKGSRGTKELLLIDMAISQQVRRSRKDLSTCWIDYKKAYDSVPHTWLLKVLELYKVDATLRTFLESCMRQWKTVLRYPGCRPIQGNEEPVWIKRGIFQGDSLSPLWFCLALNPLSTLLEDSGLGYRLRRGGQTISHLLYMDDLKLFAPNNLRLMELLKVTETFSSAIRMEFGVDKCAVMHVKKGEIMESEGIQLSDSIQVRSLSSTETYKYLGMSEALGINGADMKQSLKERFFGRLKKVLNSLLSGGNKVRAFNGWVMPVLMYSFGILKWTQTELDALDRRVRTLLTANRMHHPRSSVMRLYIPRKCGGRGFLNAKTLHNREMCSLREYFLKADVGMHRDVVAVDKGLTPLSMANENWRKPVIHTTDDRKEVWKGKELHGRFYRALYGSDVDFTASVAWLRFGDLFGETEGFVCAIMDEVILTNNYRRHIMKDGTVDVCRACHRPGESIRHIISGCSRLANGEYLNRHNQVARIIHQQLALKYKLVDSEVPYYKYVPDPVLENDHVTLYWDRSIITDRTIIANKPDIVVIDRLARRTMIIDVTIPHDENLVKAEKEKQIKYLDLAHEVVDMWNVDSAVIVPIVVTANGLMAKSFDEHLSKLALHGWLKGLIQKAVLLDTARIVRRFLSLEP

SEQ ID NO: 29697 - protein, 1117 aa, Mythimna impura
MLQTSPAQSHLSWAAFWAISTTFILYVIINNNNNNRMLSLFQDLEPTVNVSAQRLSDQVRVIQRNHRLDDATLDRLRSEVLSNQIVSTSIQTQTAATPTTNAISPRSNPNNDDADDRVVTVSSQCNDELRSALEDALREYRTTPTELRPRLPRLPMHKKNRALVCTLDSLLKNNFESSENLVDTHSILYCGAVAACRLANINFPNIDGTIRPKPAVPAWQYRIERRIDGARVLIGKLHCFREGNTRPRVMRFVRRAFLGTGISPQEYMSRVTERIDFLKQKVCAWASRIRRYKRRVDRYSQNRMFQSDERWVYRAWERPEQNVIDGCRPDDFATITFWRNIWSVPVSHTEGDWMRDVERVCEAIPEMEKVVITPADVAKAVRPLPNWKSPGPDGLQNFWLKWFSNSHAPLASQFQSTLESGSLPEYLTTGVTHLLHKTGNPVVPKNYRPITCLSTVYKLLTSILRAKINRHIENNLIMSASQNGCRNGSRGTKELLLIDMAISQQARRSRKDLSTCWIDYKKAYDSVPHTWLMRVLELYKVDMTLRTFLESCMRQWKTVLRYPGCRPIQGNDEPIRIKRGIFQGDSLSPLWFCLALNPLSTLLEESGLGYRLRRGGQAISHLLYMDDLKLFAPSNLQLMELLKVTETFSSAIRMEFGVDKCAAMHVKRGEIMESEGIQLPDSIHLRSLSSTETYRYLGMSEALGINNADMKQSLKERFFGRLKKVLNSLLSGGNKVRAFNGWVMPVLMYSFGILKWTQTELDALDRRVRTLLTANRMHHPRSSVMRLYISRKCGGRGFLNAKTLHNREVCSLREYFLKTDVGMHRDVVAVDKGLTPLSMAKEDWRKPVILTTDDRKEIWKGKELHGRFYRALHEPDVDFLASVAWLRFSDLFGETEGFICAIMDEVILTNNYRRYIMKDGTVDVCRACHRPGESIRHIISGCSRLANGEYLHRHNQVARIIHQQLALKYNLVDSEVPYYKYVPDPVLENDHVTLYWDRSIITDRTIVANKPDIVVIDRLARRAVIVDVTIPHDENLVKAEKEKQIKYLDLAHEVVDMWNVDSAVIVPMVVTANGLIAKSFDDHLSKLSLRGWIKGLIQKAVLLDTARIVRRFLSLEP

SEQ ID NO: 29698 - protein, 1119 aa, Mythimna impura
MLTRAAARRARPPPPASSLSSASPPPEPCLTVSAVTPAVAAASSSSDEYYSPPTTPPPTRRRGERRPPACLGSRGPPASDRVPATGGCVSRMRWTQSINENVMRAYYGATEGGNNLTAYRVRMLSLFQVLEPAVNVSAQRLSDQVRVIQRNHMLDDTVLDRLRTEMGSHAIASSSQTVVPSQVSPPNNLSNHADEESTDMVTHVSTQCSNELRSALECAIREYRNMPLELRPRLPRLPMCNKNKALVAALDSQLSNYFDDCEDLTDTHSIMYCAAVAACRVAHVKFPNSDVASRPKPAVPAWQCRIERRIGGARALIGKLICFREGNTRPRVMRFVRRAFSGTDISPRDYMSCVTERIDFLKQKVYAWANRIRRYKRRVERYTQNRTFRSNERWVYRAWEQPNQGVADTRLPDDDAMSSFWRNIWSVPVSHTEGGWTREVERACEPIPEMGAITISPQDVARAVRPLPNWKSPGPDGLHNFWIKWLQRSHARLVSQYQTALESGSLPEFLTTGVTHLLHKSGSTAEPKNYRPITCLPTVYKVLTSILRAKINHHVDNNAIMSASQNGCRNGSRGTKELLLIDMAISQQVRRSRKDLSTCWIDYKKAYDSVPHTWLMRVLELYKIDATLRTFLMSCMRQWRTVLRYPGCRHIQRNSEPVRIERGIFQGDSLSPLWFCLALNPLSTLLENSGLGYRLKRGGQVISHLLYMDDLKLFAPNNLQLMELLKVTETFSSAIRMEFGVDKCAVMHVKRGEIVESVGTQLSDSINLRSLSPTETYKYLGMSEALGINATDMKQTLRERFFGRLKKVFNSLLSGGNKVRAFNGWVMPVLMYSFGVLKRTQTELDALDRRVRTLLTAYRMHHPRSSVMRLYIPRKCGGRGFLNAKTLHNREVCSLREYFLTADVGMHRDVVAVDKGLTPLSLVNEGWRKPVVLDTNDRREVWQSKELHGRFFRALHGPDVDQQASVAWLRAGDLFGETEGFVCAIMDEVIMTNNYRRFIVKDGTVDICRACHRPGESIRHIISGCSRLANGEYLHRHNLVARIIHQQLALNYSLVESEVPYYRYVPDPVLDNGDITLYWDRSIITDRTIVANKPDIVVVDRRERRTMIVDISVPHDENT

SEQ ID NO: 29699 - protein, 1200 aa, Mythimna impura
MLTRAAARRARHPPPGSPLSSASPPPDLESPVSPAAAVASSSSDEYFSPPTSPTPVRRQRRGRPPKSLGSRGQPAPSRVPAAGGCVQRMRWTQSMNENVMRAYYGSTEGGTNLTAYRDRMLSLFQDLEPTVNVSAQRLSDQVRVIQRNHRLDDATLDRLRSEVLSNQIVSTSIQTQTAATPTTNAISPRSNPNNDDADDRVVTVSSQCNDELRSALEDALREYRITPTELRPRLPRLPMHKKNRALVCTLDSLLKNNFESSENLVDTHSILYCGAVAACRLANINFPNIDGTIRPKPAVPAWQYRIERRIDGARVLIGKLHCFREGNTRPRVMRFVRRAFLGTGISPQEYMSRVTERIDFLKQKVCAWASRIRRYKRRVDRYSQNRMFQSDERWVYRAWERPEQNVIDGRRPDDFATITFWRNIWSVPVSHTEGDWMRDVERVCEAIPEMEKVVITPADVAKAVRPLPNWKSPGPDGLQNFWLKWFSNSHAPLASQFQSTLESGSLPEYLTTGVTHLLHKTGNPVEPKNYRPITCLSTVYKLLTSILRAKINRHIENNLIMSASQNGCRNGSRGTKELLLIDMAISQQARRSRKDLSTCWIDYKKAYDSVPHTWLMRVLELYKVDMTLRTFLESCMRQWKTVLRYPGCRPIQGNDEPIRIKRGIFQGDSLSPLWFCLALNPLSTLLEESGLGYRLRRGGQAISHLLYMDDLKLFAPSNLQLMELLKVTETFSSAIRMEFGVDKCAAMHVKRGEIMESEGIQLPDSIHLRSLSSTETYRYLGMSEALGINNADMKQSLKERFFGRLKKVLNSLLSGGNKVRAFNGWVMPVLMYSFGILKWTQTELDALDRRVRTLLTANRMHHPRSSVMRLYISRKCGGRGFLNAKTLHNREVCSLREYFLKTDVGMHRDVVAVDKGLTPLSMAKEDWRKPVILTTDDRKEIWKGKELHGRFYRALHEPDVDFLASVAWLRFSDLFGETEGFICAIMDEVILTNNYRRYIMKDGTVDVCRACHRPGESIRHIISGCSRLANGEYLHRHNQVARIIHQQLALKYNLVDSEVPYYKYVPDPVLENDHVTLYWDRSIITDRTIVANKPDIVVIDRLARRAVIVDVTIPHDENLVKAEKEKQIKYLDLAHEVVDMWNVDSAVIVPMVVTANGLIAKSFDDHLSKLSLRGWIKGLIQKAVLLDTARIVRRFLSLEP

SEQ ID NO: 29700 - protein, 868 aa, Notodonta dromedarius
MRFVRRIFSGTNVGPQEYLNHVTERIDFLKQKVYAWANRIRRYKARVDRYYQNSMFQRDQRWVYRSWEQSSQRDGEVHRPDDDDMIKFWRNIWSVPMTHSEGGWIGDVEQVCEPIQEMDKITIEAKDVANAVRSLPNWKAPGPDGLHNFWLKWLRSSHACLASQFQSALESRLLPEFITTGVTHLLHKSGSTTDPKNYRPITCLPTIYKTLTSVLREKICRHIDDNSIMSASQNGCRSGARGTKELLLIDMAICQQVRRNRKDLSTCWIDYKKAYDSVPHTWLMRVLELYKVNSTLRAFLATCMGQWRTVLLYPGSRRILGNGDPIRIERGIFQGDSLSPLWFCLAMNPLSTLLGGSGLGFRLRRGGQVISHLLYMDDLKLFAPTELQLTGLLKVTETFSKSIRMEFGVDKCAVMHVKKGRMVESRCIRLSDSIQLRSLSGTETYRYLGMSQALGICETDMKQSVRERFLGRLKKVLKSVLSGGNKVRAYNGWVMPVLIYSFGILKWSQTELDTLDRTVRTLLTAHRMHHPRSSVMRLYIPRKCGGRGFLNAKTLHNREVFNLREYFLHAVGEMHADVVTVDNGLTPLSLGKENWRRPVVLTTDDRMAVWQGKELHGRYYRALHGPDVDLAASVAWLQFGDLFGETEGFVCAIMDEVVMTNNYRRFIIRDGTIDICRACHRPGESLRHIISGCSRLANGEYLHRHNQVARIVHQQLALKYRLVASEVPYYRYVPEPVLEDGHITLYWDRSIITDRTIVANRPDIVFIDRQERHAMLVDVTVPHDGNLVKAEKDKECKYLDLVHEVVDMWDIDTAIIVPIVVSAHGLIGKSLDKHLKRLSLGTWIKGQIQKAVLLETARIVRKFLSLEP

SEQ ID NO: 29701 - protein, 1180 aa, Limenitis camilla
MLTRARAKNVRSPTSPGSSDNSTSQVPEHTEEVVAVVSSSSDEYFSPPTSPSPVRRPGRGRPPRSLGPRGQPASRQVPAIDGYVQRMKWTQCINENVMCAYYGSTEGGTNLTAYRDRMLSLFQKLEPSINVSAQRLSDQVRIILRNHRLNDTVLERIRSEVHDSRVIPSSIQATLPGPSPPSPNQRDEEEDDTTITAGKKYDELLRSALEDAIREYRYTSDEIRPRLPRLPMHKKNRALVCTLDSLLPMYFESSEDLKDTHSILFCAAVAVCRVAHVKLVNTETTRPKPDVAAWQSRIERRIDETRVLIGKLYSFREGNTRPRVMRFVRRAFSGTEICPPEYMARVTERIDTLKQKIYAWANRIRRYRRRVDRYSQNRMFQKDQKWVYRTWERPDQNVDDIHRPDDDDTNKFWRSIWSVSVDHTEGDWMREIRQTREPLQAMEHIFITCKDVADAVRSVPNWKSPGPDGLHNFWLKWLRSSHACLASQFQSALESGSLPQFLTTGITHLLHKSGSTTEPKNYRPITCLPTVYKLLTSILRDKIDSHITKNAIMSVSQNGCRNRSRGTKELLLIDMTISQQVRRSRKDLSTCWIDYKKAYDSVPHGWLMRVLELYKVDATLCAFLGSCMRQWRTVLRYPGCRPIQGNNEPLRIKRGIFQGDSLSPLWFCLALNPLSTLLENSGLGYRLRRGGQVISHLLYMDDLKLFVPTKLQLIELLKITKTFSNSIRMEFGVDKCAVMHVKRGKIEESEGIQLSDSVNLRSLSADETYKYLGMSEALGIIEIDMKQSVRERFLARLRKVLKSLLSGGNKVRAYNGWVMPILMYSFGILKWTQKELDDLDRKVRALLTTYRMHHPRSSVMRLYIPRKCGGRGFLNAKTLHNREVCNLREYFLQTDVGMHRDVVAMDKGLTPLSLAKENWRKPIVLSTDNRKEVWKSKELHGRFYRALHGDEVDFKASVSWLRFGNLFGETEGFVCAIMDEVIMTRNYRRYIVRDGTVDICRACHSSGESLRHIISGCPRLANGEYLHRHNQVAKIIHQQLALRYGLVESEVPYYRYAPDPVLENGHVTLYWDRTIITDRTIIANKPDIVVIDRSERCTMIVDVTIPHDGNLVKAEKDKQMKYLDLAHEIVDMWDVDSAVVVPIVVTANGLIAKSLDQHLKRLAVLLDTARIVRKFLSLEP

SEQ ID NO: 29702 - protein, 1121 aa, Noctua fimbriata
MITRAAYRRARLSPPDPSLSSASPPPESSSIVSAVTPAVAVASSSSDEYFSPPTSPTPVRRQGRGRPPRSLGLRGHPAPSRVPAAGGCVQRMRWTHSINENVMRAYYGSTEGGTNLTAYRVGMLSLFQVLEPTVNVSAQRLSDQVRVIQRNHMLDDAVLDRLRSEVLSNRIVLTPAQTAVQASVIDATPPRFNPAVVEEDDRVAVVSSQCNDRLRSALEDALREYRSTPTELRPRLPRLPMHNKNRALVCALDSQLENIFESSENLVDTHSILYCGAVAACRLANVKFPNCDVVTRPKPAVPAWQRRIERRIDGARVLIGKLHCFREGNTRPRVMRFVRRAFSGTGISPQEYMSRVTERIDFLKQKVYAWANRIRRYKRRVDRYSQNRMFQSDERWVYRAWERPELNMTDVCPDDAATSSFWRSIWSVPVCHTETDWMRDVERVCEPIPEMEPILITPLDIARAVRPLPNWKSPGPDGLHNFWLKWLSSSHTCLASQFQSSLESGSLPQFLTTGVTHLLHKSGSPAEPKNYRPITCLSTVYKLLTSILRAKINTHIDKNSIMSASQNGCRNGSRGTKELLLIDMAISQQVRRSRKDLSTCWIDYKKAYDSVPHTWLMRVLELYKIDATLRAFLESCMGQWRTVLRYPGCRQIQGNDEPVWIKRGIFQGDSLSPLWFCLALNPLSTLLEDSGLGYRLRRGGQVISHLLYMDDLKLFAPNKLRLMELLKVTETFSSAIRMEFGVDKCAVMYVKQGEIMESEGIQLSDSIHLRTLSSTESYKYLGMSEALGINVTDMKQSLKERFFGRLNKVLHSLLSGGNKVRAFNGWVMPVLMYSFGVLKWTQTELDALDRRVRTLLTANRMHHPRSSVMRLYIPRKCGGRGFLNAKSLHNREMCSLREYFLKVEVGMHRDVVAVDKGLTPLSMAKENWRKPEVLTTDDRKEVWQGKELHGRFYRALHRPDVDFLASVSWLRFGDLFGETEGFVCAIMDEVMLTNNYRKYIMKDGTVDVCRACHRPGESIRHIISGCSRLANGEYLHRHNQVARIIHQQLALKYKLVESEVPYYKYVPDPVLEKDHVTLYWDQSIITDRTIVANKPDIVVIDRSARRVMIVDVTIPHDENLV

SEQ ID NO: 29703 - protein, 962 aa, Abrostola tripartita
MHNKNKAMISALDSLLSSYFEGSEDLCDTHSILYCAAATACRVANVKCFDSSTATRPKPAVPAWQCRIESRITEARTLIGKLTAFREGNIRPRVMRFVRRAFAGVDINPREYATRATERIDFYKQKVYAWASRIRRYKRRVDRFSQNRIFNQDQRWVYRNWERSAQGVSDGHLPDDDVTNAFWRSIWSVPVNHTEGSWMLDVEQSCESIPEMGTITISPQDVASAVRPMSNWKSPGPDGLHNFWIKWLRSSHGCLASQFQSVIEVGSLPQFLTTGSTHLLHKTGSTTDPKNFRPITCLPTIYKLLTSILRAKITKHIDDNNIMSASQNGCKNGSRGTKELLLIDMTICQQVRRSKKDLSTCWIDYKKAYDSVPHTWLMRVLELYKIDTTLRTFLLSCMRQWRTVLHYPGCRDIQQDGEPIRIERGIFQGDSLSPLWFCLALNPLSTLLENSGLGYSLRRRSQVISHLLYMDDLKLFAPSRFQLIKLLKITEAFSNSIRMEFGVDKCAVMHVKRGGIIESQGIQLSDSINLRSLSATETYKYLGMSEALGINVVDMKQSLKERFFGRLNKVLKSLLSGGNKVRAFNGWVMPTLMYSFGILKWTQTELDALDRRVRTLLTSNRMHHPRSSVMRLYIPRKCGGRGFLNAKTLHNREVCSLREYFLRAEVGMHREVVAVDKGLTPLFLAKENWCKPVVLSVNDRRDVWQSKELHGRFYKALHGPNVDLLSSVSWLRFGDLFGETEGFVCAIMDEVIMTKNYRKYILKDGTVDICRACHRPGESLRHIMSGCSRLANGEYLHRHNQVARIIHQQLALKYKLVDSEMPYYRYVPDPVLENDHITLYWDRSIITDRTIVANKPDIVVIDRLERRAMIVDITIPHDENLVKAERDKQIKYLDLAHEVVDMWGVDSAIIVPIVVSANGLMAKSLDQHLKRLTLGGWVKGLMQKAVLLDTARIVRRFLSLEP

SEQ ID NO: 29704 - protein, 868 aa, Mesoligia furuncula
MRFVRRAFSGTGISPREYISRVTERIDFLKQKVCAWASRIRRYKRRVDRYTQNRMFQSDERWVYRAWERPEQNVTDVYRPDDATTSAFWCSIWSVPVCHTEAGWMRDVERVCESVPEMETVLITPSDVAKAVRPLPNWKSPGPDGLHNFWLKWLISSHTYLASQFQSSLESGSLPQFLTTGVTHLLHKSGSPAEPKNYRPITCLSTVYKLLTSILRAKINTHIENNSIMSASQNGCRNGSRGTKELLLIDMAISQQVRRSRKDLSTCWIDYKKAYDSVPHTWLMKVLELYKIDATLRTFLESCMRQWKTVLRYPGCRQIQGNDEPVWIKRGIFQGDSLSPLWFCLALNPLSTLLEDSGLGYRLRRDGQVISHLLYMDDLKLFAPNKLRLMELLKVTETFSSAIRMEFGVDKCAVMHVKRGEIMESEGIQLSDSISLRSLSSSESYKYLGMSEALGINDADMKQSLKERFFCRLKKVLISLLSGGNKVRAFNGWVMPVLMYSFGILKWTQTELDALDRRVRTLLTANRMHHPRSSVMRLYIPRKSGGRGFLNAKTLHNREVCSLREYFLKAEVGMHRDVVAVDKGLTPLSMAKENWRKPVVLSTDDRKKVWQSKELHGRFYRALHEPGVDFLASISWLRFGDLFGETEGFVCAIMDEVILTNNYRRHIMRDGTVDVCRACHRPGESIRHIISGCSRLANGEYLHRHNQVARIIHQQLVLKYKLVDSEVPYYKYVPDPVLENDHVTLYWDRSIITDRTIVANKPDIVVIDRLARRTMIVDVTVPHDGNLVKAEKEKQIKYLDLAHEVVDMWNVSSAIIVPIVVSANGLMAESLDQHLSRLSLGGWIKGLIQKAVLLDTARIVRRFLSLGP

SEQ ID NO: 29705 - protein, 1048 aa, Omphaloscelis lunosa
MLDETVLDRLRSEMQSSHVIAPPLRSVIVPSQMSSAITSQADERFDDRATNVSTQCNEDLRSALEGAIQEYRFMSPELRPRLPRLPMHNKNKALVAVLDSQLSNYFDDCEDLTDTHSILYCAAVAVCRVTHVKFSNDSRATRPKPAAPAWQCRIERRIGGAGTLIGKLICFREGNTRPRVMRFVRRAFLGTDISPQDYMTRVTERIDFLKQKVYAWANRIRRYKRRVERYTQNRTFQSDERWVYRAWERPDQGVADTHLPDDDAMCSFWRSIWSVPVSHTEGDWTREVKRACDPIPEMGAITICPQDVARAVRPLPNWKSPGPDGLHNFWIKWFVRSHARLAAQYQTALESGSLPQFLTTGVTHLLHKSGSTAEPKNYRPITCLPTVYKVLTSILRAKINKHIDSNSIMSASQNGCRNGSRGTKELLLIDMAISQQVRRSRKDLSTCWIDYKKAYDSVPHTWLMRVLELYKVHTTLRTFLMSCMGQWRTVLRYPGCRNIQRNSEPIRIERGIFQGDSLSPLWFCLALNPLSTLLEDSGLGYRLRRGGQVISHLLYMDDLKLFAPNNLQLMEILKVTETFSSAIRMEFGVDKCAVMHVKRGEIMESVGTQLSDSINLRALSASETYKYLGMSEALGINVTDMKQSLKERFFGRLKKVLNSLLSGGNKVRAFNGWVMPVLMYSFGILKWTQTELDALDRRVRTLLTAYGMHHPRSSVMRLYIPRKCGGRGFLNAKTLHNREICSLREYFLGVYVGMHRDVVVVDKGLTPLSLAKENWRKPVVLDTKDRMEIWQSKELHGRYFRALHGPDVDLPASVTWLRFGDLFGETEGFVCAIMDEVMMTNNYRRFIVKDGTVDICRACHRPGESIRHIISGCSRLANEEYLHRHNLVARIIHQQLALKYSLVESEVPYYRYVPDPVLENGNITLYWDRSIITDRTIAANKPDIVVVDRGERRTMIIDITVPHDENLVKAEKDKQIKYLDLAREVVDMWDVDSAIIVPIVVTANGLIAKSLDQHLRRLSLGSWIKGLIQRAVLLDTARIVRRFLSLEP

SEQ ID NO: 29706 - protein, 1111 aa, Busseola fusca
MLTRSAAQRARLRPPDSSLSSASPPPVPSPSVSAVTTPAAVVASSSSDEYFSPPTTPPPARGRGRRRPPDGFGPRGPPASDRVPAPGGSVQRMRWTRSINENVMRSYYGATEGGNNLTAYRVRMLSLFQVLEPAVNVSAQRLSDQVRVIQRNHMLDDTVLDRLRNEMQSSRVIAHQSQTAAVPPQSTSYADEGSNDRATNVSTQCNEELRNALETAIREYRSMSPELRPRLPRLPMHNKNRALVAALDAQLSNHFDACENLTDTHSILYCAAVAACRVANVKFANNFRATRPKPAVPAWQRRIERRIGGARALIGKLICFREGNTRPRVMRFVRQAFSGTNISPQDYMSCVTERIDFLKQKVYAWANRIRRYKRRVERYTQNCRFQSDERWVYRAWERPDQGVSDTHLPDDDAMVSFWQNIWSVPVSHTEGDWARDVQRACDPIPEMGAISICPQDVAHAVRPLPNWKSPGPDGLHNFWIKWFTRSHVHLASQFQSALESGSLPQFLTTGITHLLHKSGSIADPKNYRPITCLPTVYKVLTSILRAKIYKHIDTNSIMSASQNGCRNGSRGTKELLLIDMAISQQVRRSRKDLSTCWIDYKKAYDSVPHTWLMRVLELYKVDATLRTFLMTCMGQWRTVLRYPGCRNIQRNSEPIRIERGIFQGDSLSPLWFCLALNPLSTLLEDSGLGYRLRRGGQVISHLLYMDDLKLFAPNNLQLMALLKITETFSSAIRMEFGVDKCAVMHVKRGEIVESVGTQLSGSTNLRALSASETYKYLGMSEALGINVTDMKQSLKERFFGRLKKVLNSLLSGGNKVRAFNGWVMPVLMYSFGILKWTQTELDALDRRVRTLLTANRLHHPRSSVMRLYVPRKCGGRGFLNAKTLHNREICSLREYFIDTDVGMHRDVVAVDKGLTPLSLAKENWRKPVVLDTNDRLEVWQSKELQGRFYRALHGPDVDLLASVAWLRFGNLFGETEGFVCAIMDEVMMTNNYRRYIVKDGTVDICRACHRPGESIRHIISGCSRLANGEYLHRHNLVARIIHQQLALKYNLVESEVPYYRYVPDPVLENGNITLYWDRSIITDRTIVANKPDIVMVDRSERRAMIVDITIP

SEQ ID NO: 29707 - protein, 1201 aa, Amphipyra tragopoginis
MLTRARTREARPPPPDSPLSSASQPPESSPTVSAVTPAAAVASSSSDEYFSPPTSPTPVRRQGRRRPPNSLGPRGPPAPSRVLATGGCVQRMKWTQNINENVMRAYYGSTEGGTNLTAYRVRMLTLFRELEPAINVSAQRLSDQVRVIQRNHRLDDAALDRLRLEVQNSRVTPVPSQTAVHHININVVPPRSDCVDGDVDDRAVTVSSQYNDRLRSALEDAIREYRANPELRPRLPRLPMHNKNRALVCALDSLLSSYFESSEDLVDTHSILYCAAVAACRVANVKFNNSERATRPKPAVPAWQCRIERRIDGARALIGKLICFREGNTRPRVMRFVRRAFSGTGISPREYMSQVTERIDFLKQKVCAWASRIRRYKRRVERYAQNRMFQCDQRWVYRAWERPDQGVSDGRLPDDDAMSSFWRSIWSVPVTHTEGDWTRDIERACEPIEEMGEILISPQDVASAARPLPNWKSPGPDGLHNFWIKWLRSSHARLASQFQSSLESGSLPQFLTTGVTHLLHKSGSTAEPKNYRPITCLPTVYKLLTSILGTKINTHVENNSIMSPSQNGCRNGSRGTKELLLIDMAISQQVRRSRKNLSTCWIDYKKAYDSVPHTWLMRVLELYKINTTLRTFLTSCMRQWRTVLRYPGCRPILGSGEPISIERGIFQGDSLSPLWFCLALNPLSTLLEGSGLGYPLRRGGQVVSHLLYMDDLKLFAPTKLQPVELLKVTETFSNSIRMEFGVDKCAVMHVRRGGIMESEGLQLSDSIHLRSLSANDIYKYLGMSEGLGISEADMKQSLRERFFGRLKKVLKSLLSGGNKVRAFNGWVMPVLMYSFGILKWTQTELDALDRRVRTLLTANRMHHPRSSVMRLYIPRKCGGRGLLNAKTLHNREVCSLREYFLHADAGMHREVVAVDKGLTPLNLAKENWRKPVVLSTNDRREVWQSKELHGRFYRALHGPDVDFLASVSWLRFGDLFGETEGFVCAIMDEVIMTNNYRKYIVKDGTVDICRACHCPGESLRHIISGCSRLANGEYLHRHNQVARIIHQQLALKYNLVESEVPYYKYVPDPVLENGHITLYWDRSIITDRTIVANKPDIVVIDRSERRTMIVDVTIPHDENLVKAEKDKQIKYLDLAHEVVNMWDVDSATIVPIVVTANGLMAKSLDQHLKRLSLGGWIKGLMQKAVLLDTARIVRRFLSLEP

SEQ ID NO: 29708 - protein, 1202 aa, Amphipyra tragopoginis
MLTRSRARARDNQAHLPPPDSSPSSASQQQGLNPASPAAAVASSSSDEYYSPPSSPPPARRRGGTRPPVGLGLRGPLASDRVPAPGGIVPRMKWTQKMNESVMRAYYGATEGGTNLTAYRSRMLSLFQVLEPAVNVSAQRLSDQVRVIQRGHMLDDTVLDRLRSEVQSSPVISPSSQVLEQQQNLAAALPRPNRADEEDDDRVANVSTQCNDELRSALEDAMREYRYTRSDLRPRIPRLPMHRKNRALVCALDSLLSNYFDGSEDLGDTHSILYCAAVAACRVAHVKFTDNERATRPKNAVPAWQCRIERRISEARALIGKLVCFREGNTRPRVMRFVRRAFSGTDVSPREYMSRVTERIDFLKQKVYAWANRIRRYRRRVDRYTQNRLFQSDERWVYRTWERPDPRVSDTRLPDNDVMNTFWRNIWSVPVAHTESDWMQEVQRACEPIQEMGDIIISPQDVASAVRPMSNWKSPGPDGLHNFWLKWLRSSHARLASQFQSSLESGSLPQFLTTGVTHLLHKSGSTAEPKNYRPITCLPTVYKVLTSILRTKINNHIDNNSIMSASQNGCRNGSRGTKELLLIDMAISQQVRRSRKDLSTCWIDYKKAYDSVPHTWLMRVLELYKVNTTLCAFLTSCMGQWRTVLRYPGCRQIQGIGEPIRIERGIFQGDSLSPLWFCLALNPLSTLLEGSGLGYRLRRGGQVISHLLYMDDLKLFAPNNLRLLELLKVTETFSNSIRMEFGVDKCAVMHVKRGRIMESVGTQLSDSMQLRSLSSTETYKYLGMSEALGVNETGMKQSLKERFFGRLKKVFNSLLSGGNKVRAFNGWVMPVLMYSFGILKWTQTELDALDRRVRSLLTANRMHHPRSSVMRLYIPRKCGGRGFLNAKTLHNREVCSLREYFSQADVGMHRDVVAVDKGFTPLSLAKENWRKPVVLDTNGRREVWRSKELHGRFYRALHGPDVDFLASVAWLRFGDLFGETEGFVCAIMDEVMMTNNYRKYIVKDGTVDICRACHCPGESIRHIVSGCSRLANGEYLHRHNLVARIIHQQLALKYNLVDAEVPYYKYVPDPVLENGHVTLYWDRSIITDRTIVANKPDIVVIDRSERLTMIVDITVPHDENLVKAEKDKEIKYQDLAHEVVAMWDVDSAIIVPIVVTANGLIAKSLDQHLKRLSLGGWIKGLIQKAVLLDTARIVRKFLSLRP

SEQ ID NO: 29709 - protein, 1207 aa, Amphipyra tragopoginis
MLTRSRAKTLQRTHPTPSASSLSSASQPPEPASIVSDVTPAAAVASSSSDEYFSPATSPSPPPARRRGRGRPPTCLGPRGPPASDRVPAPGGSVQRMRWTQSMNENCMRAYFGATEGGTNLTAYRGRMLSLFQTLEPAVNVSAQRLSDQVRVIQRDHRLDDAALGRLRDEMQNSHATPPPSQIRTQPLVPPAVPLQPNHADKEEQDRAISAGTQYSEIMRSALEDALREFRSTPPELRPRLPRLPMHNKNRALVCALDSLLSNVLESSKDIGDTHSILYCAAVAACRVAHVKFPNDNRATRPKSTVPAWQCRIERRIDEARVLIGKLTCFREGNIRPRVMRFVGRAFSGTDVSPEEYVSRVTERIDFLKQKVYAWANRIRRYRRRVDRYTQNRIFQSDQRWVYRTWERPDQGVSDTHLPDNDVMNAFWRNIWSVPVTHTEGDWMQEVQRACEPIQEMGAVTIGPQDVTSAVRPMPNWKSPGPDGLHNFWIKWLRSSHARLASQFQSSLESGSLPSFLTTGVTHLLFKSGSTAEPKNYRPITCLPTVYKLLTSILRAKINNHIDNNAIMSDSQNGCRNGSRGTKELLLIDMAISQQVRRSRKDLSTCWIDYKKAYDSVPHTWLMRVLELYKINATLRTFLMSCMGQWRTVLHYPGCRQIQGNGELIRIERGIFQGDSLSPLWFCLALNPLSTLLEGSGLGYRLRRGGQVISHLLYMDDLKLFAPNNLQLVELLKVTETFSNSIRMEFGVDKCAVMHVKRGRIMESVGTQLSDAIHLRSLSSTETYKYLGMSEALGINEADMKQSLQERFFGRLIKVLKSLLSGGNKVRAFNGWVMPVLMYSFGMLRWTQTELDALDRRVRTLLTAYRMHHPRSSVMRLYIPRKCGGRGFLNAKTLHNREVCSLGEYFSQADVGMHRDVVAVDKGLTPLSLAKENWRKPVVLDTNGRREVWRSKELHGRFYRALHGPDVDFLASVAWLRFGDLFGETEGFVCAIMDEVMMTNNYRKYIVKDGTVDICRACHCPGESIRHIVSGCSRLANGEYLHRHNLVARIIHQQLALKYNLVDTEVPYYKYVPDPVLENGHVTLYWDRSIITDRTIVANKPDIVVIDRLERRTVIVDIAVPHDENLVKAENDKKIKYLDLAHEVVDMWDVDSAVIVPIVVTANGLIAKSLDQHLMRLSLGSWIKGLIQKAVLLDTARIVRKFLSLEP

SEQ ID NO: 29710 - protein, 1194 aa, Autographa pulchrina
MLTRSRKRKPARPPSPDSSPSSASQLPDHVQAPAPAVASSSSDEYYSPPTSPTPVRRQGRRRPPSSLAPAGQPASNRAPAPGGDVRRMKWTQGINENVMRAYYGATEGGTNLTAYRARMLSLFQVLEPGVSVSAQRLSDQVRVIQRNHRLDDSTLDRLRSEIQSSPATNTLPPAAAPVSGAPHTAPSDGEEDDGVMTVSTQCSELIRSTLEDAIRDYRTSPPDQRPRLPRLPMHNRNKAIMGALDSLLPIYFESSEDLRDTHSILYCAALTACRVANVAICYSNIAARPKPAVPAWQYRIEQRVAEARTLIAKLIAFKQGNSRPRVMRFVRRAFAGTDISSSEYTARVTERIDLFKQKVCAWASRIRRYKRRVERFYLNRMFQKDQRWVYRAWERPASGVDGGCLPDGDATNSFWRSIWSVPVSHSEGGWMREVEQVCEPIQEMGAITISPQDVANAVRPMANWKTPGPDGLQNFWLKWLRSSHGCLASQFQSAVESASLPQFLTTGSTHLLHKTGSATDPKNYRPITCLPTVYKLLTSILRAKINEHVVSFSIMSASQNGCRSGSRGTKELLLIDTAICQQVRRSKKDLSTCWIDYKKAYDSVPHTWLMRVLELYKINATLRAFLVSCMGQWSTVLHYPGCRDIQQGGEPIRIERGIFQGDSLSPLWFCLALNPLSTLLENSRLGYSLRRGSQVISHLLYMDDLKLFANSGLQLMKLLKITESFSNSIRMEFGVDKCAVMHVKRGGVVESQGIQLSDSINLRSLSATETYKYLGMSEALGINAADVKQSLQARFFGRLNKVLKSVLSGGNKVRAFNGWVMPVLMYSFGVLKWTQTELDALDRRVRTLLTANRMHHPRSSVMRLYIPRKCGGRGFLNAKTLHNREVCNLREYFLQVDVGMHRDVVVVDKGLTPLSLGKENWHKPVVLSVKDREVVWQSKELHGRYYRTLHGSDVDFLASVAWLRFGDLFGETEGFVCAIMDEVIMTNNYRKYIIKDGTVDICRACHCPGESLRHIISGCSRLANGEYLHRHNQVARIIHQQLALRYKLVESEVPYYRYVPDPVLENGRVTLYWDRSIITDRTIVANKPDIVVIDRSERRAIIVDITIPHDENLVKAEKEKQLKYLDLAHEVVDMWEVDSAMIVPIVVTANGIIAKSLDQHLKRLSLGAWVKGLIQKAVLLDTARIVRRFLSLEP

SEQ ID NO: 29711 - protein, 868 aa, Mythimna impura
MRFVRRAFLGTGISPQEYMSRVTERIDFLKQKVCAWASRIRRYKRRVDRYSQNRMFQSDERWVYRAWERPEQNVIDGRRPDDFATITFWRNIWSVPVSHTEGDWMRDVERVCEAIPEMEKVVITPADVAKAVRPLPNWKSPGPDGLQNFWLKWFSNSHAPLASQFQSTLESGSLPEYLTTGVTHLLHKTGNPVEPKNYRPITCLSTVYKLLTSILRAKINRHIENNLIMSASQNGCRNGSRGTKELLLIDMAISQQARRSRKDLSTCWIDYKKAYDSVPHTWLMRVLELYKVDMTLRSFLESCMRQWKTVLRYPGCRPIQGNDEPIRIKRGIFQGDSLSPLWFCLALNPLSTLLEESGLGYRLRRGGQAISHLLYMDDLKLFAPSNLQLMELLKVTETFSSAIRMEFGVDKCAAMHVKRGEIMESEGIQLPDSIHLRSLSSTETYRYLGMSEALGINNADMKQLLKERFFGRLKKVLNSLLSGGNKVRAFNGWVMPVLMYSFGILKWTQTELDALDRRVRTLLTANRMHHPRSSVMRLYISRKCGGRGFLNAKTLHNREVCSLREYFLKTDVGMHRDVVAVDKGLTPLSMAKEDWRKPVILTTDDRKEIWKGKELHGRFYRALHEPDVDFLASVAWLRFSDLFGETEGFICAIMDEVILTNNYRRYIMKDGTVDVCRACHRPGESIRHIISGCSRLANGEYLHRHNQVARIIHQQLALKYNLVDSEVPYYKYVPDPVLENDHVTLYWDRSIITDRTIVANKPDIVVIDRLARRAVIVDVTIPHDENLVKAEKEKQIKYLDLAHEVVDMWNVDSAVIVPMVVTANGLIAKSFDDHLSKLSLRGWIKGLIQKAVLLDTARIVRRFLSLEP

SEQ ID NO: 29712 - protein, 1195 aa, Notodonta dromedarius
MLTRLQARLRPPGLLPRSASQPLGLIQDETLTTAAASSESDEYFSPPSSPPPVRRRRGRPPGNLGTLGQPALIRILVPGGVVRRMRWTSSINENVMRAYYEATEGGTNLTAYRGRMLSLFQILEPAVNVSAQRLSDQVRVIQRGHMLADSLLDQLRSEALSSRVVPVASSQPVSLPVTTVESWPAVSGDTDRNDTASEVSTQYNGILRSTLEDVVREYRFVPPHVRPRLPRLPMHNKNRALVCSTNMLLSSYFESSENLMDTHSLLYCTAIAVCRVARVKFPDTDVATRPKPAVPAWQCRIERRINEARIFIGKLSCFRAGNTRPRVMRFVRRIFSGTNVGPQEYLNHVTERIDFLKQKVYAWANRIRRYKARVDRYYQNSMFQRDQRWVYRSWEQSSQRDGEVHRPDDDDMIKFWRNIWSVPMTHSEGGWIGDVEQVCEPIQEMDSITIEAKDVANAVRSLPNWKAPGPDGLHNFWLKWLRSSHACLASQFQSALESRLLPEFITTGVTHLLHKSGSTTDPKNYRPITCLPTIYKTLTSVLREKICRHIDDNSIMSASQNGCRSGARGTKELLLIDMAICQQVRRNRKDLSTCWIDYKKAYDSVPHTWLMRVLELYKVNATLRAFLATCMGQWRTVLLYPGSRRILGSGDPIRIERGIFQGDSLSPLWFCLAMNPLSTLLGGSGLGFRLRRGGQVISHLLYMDDLKLFAPTELQLTGLLKVTETFSKSIRMEFGVDKCAVMHVKKGRMVESRCIRLSDSIQLRSLSGTETYRYLGMSQALGICETDMKQSVRERFLGRLKKVLKSVLSGGNKVRAYNGWVMPVLIYSFGILKWSQTELDTLDRTVRTLLTAHRMHHPRSSVMRLYIPRKCGGRGFLNAKTLHNREVFNLREYFLHAVGEMHADVVAVDNGLTPLSLGKEHWRRPVVLTTDDRMAVWQGKELHGRYYRALHGPDVDLAASVAWLQFGDLFGETEGFVCAIMDEVVMTNNYRRFIIRDGTIDICRACHRPGESLRHIISGCSRLANGEYLHRHNQVARIVHQQLALKYRLVASEVPYYRYVPEPVLEDGHITLYWDRSIITDRTIVANRPDIVLIDRQERHAMLVDVTVPHDGNLVKAEKDKECKYLDLVHEVVDMWDIDTAIIVPIVVSAHGLIGKSLDKHLKRLSLGSWIKGQIQKAVLLETARIVRKFLSLEP

SEQ ID NO: 29713 - protein, 1186 aa, Phlogophora meticulosa
MLTRSRARVLNAPTNSSGSSLSSASQLPGPAPDVSPVTPAAAVASSSSDEYYSPPKSPPPVRRCGRGRPPASLGLRGPPASARVPASGGSVQRMRWTQSINENVMRSYYGATEGGINLTAYRGRMLSLFQVLEPAVNVSAQRLSDQVRVIQRNHMLDDAVLDRLRLNSRSNRVTPASSPVAVQLQNLPSVSPRPDYVGEEDDDAAISVSSQCNVRLRSALEDAFREYRSTPPGLRQRLPRLPMHKKNKALMCTLDSLLSNSFDSSRDLADTHSILYCAAVAACRVANVKFPNSVRSTRPAIPAWQCRIERRIGEARVLIGKLICFREGNTRPRVMRFVRRAFSGTDISSRDYLTRVTERIDFLKQKICAWANRIRRYKRRVERYTQNRTFRSDERWVYRTWERPDQGVTDTFLPDDEAMCLFWRSIWSVPVSHTEGDWTREVERTCESLPEMGAINISPQDVACAVRPLPNWKSPGPDGLHNFWIKWLKSSHARLASQFQSALESGSLPQFLTTGITHLLYKSGSTAEPKNYRPITCLPTVYKVLTSILRSKINNHIDSTSIMSVSQNGCKNGSRGTKELLLIDMAISQQVRRSRKDLLTCWIDYKKAYDSVPHTWLMRVLELYKIDATLRTFLKSCMGQWRTVLHYPGCRQFQENSEPIRIERGIFQGDSLSPLCFCLALNPLSTLLEGSGLGYRLRRGGQVISHLLYMDDLKLFAHNNLQLMKLLKVTETFSSAIRMDFGVDKCAVMHVKRGGIVESAGTQLSDSIYLRSLSSTETYKYLGMSEALGINTADMKQSLKERFFGRLNKVLNSLLSGGNKVRAFNSWVMPVLMYSFGILKWTQTELDALDRRVRTLLTANRMHHPRSSVMRLYISRKCGGRGFLNAKTLHNREVCSLREYFFEADVGIHRDVVAMDKALTPLSLANENWRKPIVLDTTDRMEIWKSKELHGRFYRVLHGPDVDLSASVSWLRFGDLFGETEGFVCAIMDEVFMTNNYRKYIVKDGTVDICRACHRSGESIRHIISGCSRLANGDYLHRHNLVAKIIHQQLALKHNLVESEVPYYKYVPDPVLENGNITLYWDRSIITDRTIVANKPDIVVIDRLERRTMIVDITVPHDENLVKAEKEKQIKYLDLAREVVDMWDVNTAVIVPIVVTANGIIAKSLDQHLRRLSLGSWIKGLIQTYS

SEQ ID NO: 29714 - protein, 1202 aa, Cosmia trapezina
MLTRSAARARPPPPDSSLSSASPPPVPSPTVSAVTTPAAVVASSSSDEYFSPPTSPTPVRRQGRGRPPKSLGLRGQPAPSWVPAAGGCVQRMRWTQSMNENVMRAYYGSTEGGTNLTAYRVRMLSLFQELEPTVNVSAQRLSDQVRVIQRNHRLDDAALDRLRSEILNDRIVSTPAQTAVQASIIDAVPPRSTHVVGEGDDRVATVSSQSNDRLRSALEDAFREYRSTPTELRPRLPRLPMHKKNRALVCALDSQLKDFFESSEDLVDTHSILYCAAVAACRLANVKFPNCDGATRPKPAVPAWQCRIERRIDGARVLIGKLYCFREGNTRPRVMRFVRRAFSGTGISPPEYMSRVTERIDFLKQKVCAWASRIRRYERRVDRYTQNRIFQSDERWVYRAWERPEQNVTDVCRPDDTITSAFWRSIWSVPVCHAEAGWMQDVERVCEAIPEMEAVLITPLDVARAVRPLPNWKSPGPDGLHNFWIKWLISSHTRLASQFQSSLESGSLPQFLTTGVTHLLHKSGSPAEPKNYRPITCLSTIYKLLTSILRAKINMHIENNSIMSASQNGCRNGSRGTKELLLIDMAISQQVRRSRKDLSTCWIDYKKAYDSVPHTWLMRVLELYKIDATLRTFLGSCMGQWRTVLRYPGCRRIQGNDEPVWIKRGIFQGDSLSPLWFCLALNPLSTLLEDSGLGYRLRRGGQVISHLLYMDDLKLFAPNKLRLMELLKVTETFSSAIRMEFGVDKCAVMHVKRGEIMESEGIQLSDSIHLRSLSPSETYKYLGMSEALGINVADMKQSLKERFFGRLKKVLISLLSGGNKVRAFNGWVMPVLMYSFGILKWTQTELDALDRRVRTLLTANRMHHPRSSVMRLYIPRKCGGRGFLNAKTLHNREVCSLREYFLKADVGMHRDVVAVDKGLTPLSMANENWRKPVVLTTDDRKKVWQSKELHGRFYRALHEPGVDFLASVSWLRFGDLFGETEGFVCAIMDEVILTNNYRRHIMRDGTVDVCRACHRPGESIRHIVSGCSRLANGEYLHRHNQVARIIHQQLALKYKLVDSEVPYYRYVPDPVLENDHVTLYWDRSIITDRTIVANKPDIVVIDRLARRAMIVDITIPHDENLVKAEKEKQIKYLDLAHEVVDMWNVSSAIIVPIVVTANGLMAESLDQHLLRLSLGGWIKGQIQKAVLLDTARIVRRFLSLQP

SEQ ID NO: 29715 - protein, 1194 aa, Autographa gamma
MLTRSRARKPARPPSPDPSPSSASQLPDHVPAPAPAVASSSSDEYYSPPTSPTPVRRQGRRRPPCSLAPSGQPASNRAPAPGGDVRRMKWTLSINENVMRAYYGATEGGTNLTAYRARMLSLFQALEPGVSVSAQRLSDQVRVIQRNHRLDDSTLDRLRSEIQHSPATSTSPPVAAPVSGAPLTAPSDGEEEDGAITVSTQCNELIRSTLEDAIRVYRRSPPDQRPRLPRLPMHNRNKAIMGALDSLLPVYFESSEDLRDTHSILYCAALTACRVANVAMCHSNIATRPKPAVPAWQCRIEQRVAEARTLIAKLKAFKQGNSRPRVMRFVRRAYAGTDISPSEFIARVTERIDLFKQRVCAWANRIRRYKRRAERFHLNRMFQKDQRWVHRLWERPVSAMDGGCLPDGDATNSFWRSIWSVPVTHSEGGWMREVEQVCEPIQEMGAITISPQDVANAVRPMANWKTPGPDGMQNFWLKWFRSSHSCLASQFQSAVESASLPQFLTTGSTHLLHKTGSATDPKNYRPITCLPTVYKLLTSILRAKINEHIVNFSIMSASQNGCRSGSRGTKELLLIDTAICQQVRRSKKDLSTCWIDYKKAYDSVPHTWLMRVLELYKINTTLRAFLMSCMGQWSTVLHYPGCRDIQQGGEPIRIERGIFQGDSLSPLWFCLALNPLSTLLENSGLGYSLRRGGQVISHLLYMDDLKLFATSGFQLMELLKITESFSNSISMEFGVDKCAVMHVKRGGIVESQGIQLSDSINLRSLSATDTYKYLGMSEALGINVADVKQSLQARFFGRLNKVLKSVLSGGNRVRAFNGWVMPVLMYSFGVLKWTQTELDALDRRVRTLLTANRMHHPRSSVMRLYIPRKCGGRGFLNAKTLHNREVCNLREYFLQVDVGMHRDVVVVDKGFTPLSLGKENWHKPVVLSVKDREDVWQSKELHGRYYRTLHGPDVDFLASVAWLRFGDLFGETEGFVCAIMDEVIMTNNYRKYIIKDGTVDICRACHCPGESLRHIISGCSRLANGEYLHRHNQVARIIHQQLALRYKLVESEVPYYRYVPDPVLENGRVTLYWDRSIITDRTIVANKPDIVVIDRSERRAIIVDVTIPHDENLVKAEKEKQLKYLDLAHEVVDMWEVDSAMIVPIVVTANGIIAKSLDQHLKRLSLGTWVKGLIQKAVLLDTARIVRRFLSLES

SEQ ID NO: 29716 - protein, 1116 aa, Sesamia nonagrioides
MLTRSAARRARPPSPDSLVSSALPPPVSSATVSAVTTPAAAVASSSSDEYFSPPTTPPPVRRRGGRRPPDCLGPRGPPASDRVPAPGGSVQRMRWTQSINENVMRSYYGATEGGTNLTAYRVRMLSLFQVLEPAVNVSAQRLSDQVRVIQRKHMLDDTVLDRLRNEMQSSRIIAHQSQSAEIPPQPTNYADEGSNDRATNVSTQCNEELRNALEAAIREYRSISAELRPRLPRLPMHNRNRALMGALDAQLLNYFDTCEDLTDTHSILYCAAVAACRVAHVKFPSDSRATRPKPVVPAWQHRIERRIGGARALIGKLICFREGNTRPRVMRFVRRAFSGTNTSPQNYMARVTERIDFLKQKVYAWANRIRRYKRRVERYTQNRTFQSNERRVYRDWERPEQGVTDTCLPDDDAMCSFWRSIWSVPVSHTEGDWAQDVERACDPIPEMGAITICPQDVAHAVRPLPNWKSPGPDGLHNFWIKWFPRSHARLASQFQTALVSGSLPQFLTTGITHLLHKSGSTAEPKNYRPITCLPTVYKVLTSILKTKINKHIDSNSILSASQNGCRSGSRGTKELLLIDMAISQQVRRSRKDLSTCWIDYKKAYDSVPHTWLMRVLELYKVDATLRTFLMTCMRTWRTVLRYPGCRNIQRNSEPIRIERGIFQGDSLSPLWFCLALNPLSTLLEDSGLGYRLRRGGQVISHLLYMDDLKLFAPNNSQLNELLKITEIFSSSIRMEFGVDKCAVMHVKRGEIMEPVGTQLTSSINLRALSASETYKYLGMSEALGINVTDMKQSLKERFFGRLKKVLNSLLSGGNKVRAFNGWVMPVLMYSFGILKWTQTELVALDQRVPTLLTANRLHHPRSSVMRLYIPRKCGGRGFLNAKTLHNREICSLRDYFLETDVGMHRDVVAADKGLTPLSLAKENWRKPVVLDTNDRMEVWKSKELHGRFFRALHGPDVDFQASVAWLRFGDLFGETEGFVSAIMDEVMMTNNYRRFIVKDGTVDICRACHRPGESIRHIISGCSRLANGEYLHRHNLVARIIHQQLALKYKLVESEVPYYRYMPDPVLENGHITLYWDRSIITDRTIIANKPDIVLVDRSERRAMIVDITIHMMRTS

SEQ ID NO: 29717 - protein, 1104 aa, Mythimna ferrago
MRWTSSINENVMRSYFGATEGGINLTAYRGRMLSLFQVLEPAVNVSVQRLSDQVRVIQRNRMLDDAVLDKLRLESQSSRATPSAAAQRQPSAAPRPDHVGDADDDAAISVSTQCNERLRGALEDAFREYRSIPPELRPRLPRLPMHKRNRALVCALDSQLSICFDSSEDLADTHSILYCAAVAACRVAHVKFPNCNRATRPAVPAWQCRIERRIGEARALIGKLICFREGNTRPRVMRFVRRAFSGTDISPRDYLPCVTERIDFLKQKIYAWANRIRRYKRRVERYTQNRTFQSNERWVYRAWERPDQGVTDTRLPDDDAMCSFWRSIWSAPVSHTEGDWIREVERACDLLPEMGAITISPQDVARAVRPLPNWKSPGPDGLHNFWLKWFQRSHARLASQFQSALESGSLPLFLTTGITHLLHKSGSTAEPKNYRPITCLPTVYKVLTSILRAKINSHIETNSIMSVSQNGCRNGSRGTKELLLIDIAISQQVRRSRKNLSACWIDYKKAYDSVPHTWLMRVLELYKVDATLRTFLMSCMGQWRTVLHYPGCRQIWENSEPIRIERGIFQGGSLSPLWFCLALNPLSTLLEGSGLGYRLKRGGQVISHLLYMDDLKLFAPNNLQLMELLKVTETFSSAIRMDFGVDKCAVIHVKRGEIMESEGIQLSDSIHLRSLSSTETYKYLGMSEALGINTDDVKQSLKERFFGRLNKVLNSLLSGGNKVRAFNGWVMPVLMYSFGILKWTQTELDALDRRVRTLLTANRMHHPRSSVMRLYIPRKCGGRGFLNAKSLHNREVCSLREYFLAVDVGMHRDVVAVDKGLTPLSLANENWRKPLVLDTNDRREVWQGKELHGRFYRALHGPDVDLLASVSWLRFGDLFGETEGFVFAIMDEVMMTNNYRKYIVKDGTVDICRACHRPGESIRHIISGCSRVANGDYLHRHNLVARIIHQQLALKYNLVESEVPYYRYVPDPVLDNGSITLYWDRSIITDRTIVANKPDIVVIDRLERRTMIVDIAVPHDENLVKAEKDKQIKYLDLAREVVDMWEVDRAITVPIVVTANGLIAKILEQHLRRLSLDSWIKGLIQKAVLLDTARIVRRFLSQEP

SEQ ID NO: 29718 - protein, 1197 aa, Mythimna ferrago
MLTRSRARRPETHPTTSGSSLNSASQPPGPAPAVSPVIPEAAVASSSSDEYFSPPTTPPPARRRGRGRPPASLGPRGPPASDRVPAVGGSVQRMRWTSSINENVMRSYFGATEGGINLTAYRGRMLPLFQVLEPAVNVSVQRLSDQVRVIQRNRMLDDAVLDRLRLESQSSRATPSAAAQRQPSAAPRPDHVGDADDDAAISVSTQCNERLRGALEDAFREYRSIPPELRPRLPRLPMHKRNRALVCALDSQLSICFDSSEDLADTHSILYCAAVAACRVAHVKFPNCNRATRPAVPAWQCRIERRIGEARALIGKLICFREGNTRPRVMRFVRRAFSGTDISPRDYLPCVTERIDFLKQKIYAWANRIRRYKRRVERYTQNRTFQSNERWVYRAWERPDQGVTDTRLPDDDAMCSFWRSIWSAPVSHTEGDWIREVERACDLLPEMGAITISPQDVARAVRPLPNWKSPGPDGLHNFWLKWFQGSHARLASQFQSALESGSLPQFLTTGITHLLHKSGSTAEPKNYRPITCLPTVYKVLTSILRAKINSHIETNSIMSVSQNGCRNGSRGTKELLLIDIAISQQVRRSRKNLSACWIDYKKAYDSVPHTWLMRVLELYKVDATLRTFLMSCMGQWKTVLHYPGCRQIWENSEPIRIERGIFQGDSLSPLWFCLALNPLSTLLEGSGLGYRLKRGGQVISHLLYMDDLKLFAPNNLQLMELLKVTETFSSAIRMDFGVDKCAVIHVKRGEIMESEGIQLSDSIHLRSLSSTETYKYLGMSEALGINTDDVKQSLKERFFGRLNKVLNSLLSGGNKVRAFNGWVMPVLMYSFGILKWTQTELDALDRRVRTLLTANRMHHPRSSVMRLYIPRKCGGRGFLNAKSLHNREVCSLREYFLAVDVGMHRDVVAVDKGLTPLSLANENWRKPLVLDTNDRREVWQGKELHGRFYRALHGPDVDLLASVSWLRFGDLFGETEGFVFAIMDEVMMTNNYRKYIVKDGTVDICRACHRPGESIRHIISGCSRLANGDYLHRHNLVARIIHQQLALKYNLVESEVPYYRYVPDPVLDNGSITLYWDRSIITDRTIVANKPDIVVIDRLERRTMIVDIAVPHDENLVKAEKDKQIKYLDLAREVVDMWEVDRAIIVPIVVTANGLIAKSLEQHLRRLSLGSWIKGLIQKAVLLDTARIVRRFLSQEP

SEQ ID NO: 29719 - protein, 1202 aa, Amphipyra tragopoginis
MLTRSRAKATRPPSSASSLSSASQPPEPAPTVSDVTPAAAVASSSSDEYFSPPTSPPPPRRRGRGRPPASIGPRGPPASDRVLAPGGSVQRMRWTQAMNENCMRAYFGATEGGTNLTAYRGRMLSLFQALEPAVNVSAQRLSDQVRVIQRDHRLDGAALDRLRSEMQSSHVAPLQSQTAAQSQVPSVVAPRSIPADEESDDRVTNVSTQSNEQLRSALELAIREYRSTLPDLRPRLPRLPMNKKNKALMCALDSLLSSYFDGSEDLADTHSILYCAAVAACRVAHVKVDNNDRATRPKPAVPAWQCRIERRIGGARALIGKLICFREGNTRPRVMRFVRRAFSGTDTSPRDYMSCVTERIDFLKQKVYAWANRIRRYKRRVERYTQNRMFQRDQRWVYRAWERADQGVGDSHLPDDDATNSFWRSIWSVPVSHTEGDWMRVVERVCEPILDMGAISISPQDVASAVRPLPNWKSPGPDGLHNFWLKWLRSSHARLASQFQSSLETGTLPQFLTTGVTHLLHKSGSTAEPKNYRPITCLPTVYKLLTSILRCKINSHIENNSIMSASQNGCRNGSRGTKELLLIDMAISQQVRRSRKDLSTCWIDYKKAYDSVPHTWLMRVLELYKVNTTLCAFLTSCMGQWRTVLHYPGCQQIQGIGEPIRIERGIFQGDSLSPLWFCLALNPLSTLLEGSGLGYRLRRGGQVISHLLYMDDLKLFAPNNLQLLDLLKVTETFSNSIRMEFGVDKCAVMHVKRGRIMESVGTQLSDSIQLRSLSSTETYKYLGMSEALGINEADMKQSLRERFYGRLKKVLKSLLSGGNKVRAFNGWVMPVLMYSFGILKWTQTELDALDRRVRTLLTAYRMHHPRSSVMRLYIPRKCGGRGFLNAKTLHNREVCSLREYFSQADVGTHRDVVAVDKGLTPLSLAKENWRKPAVLDTNGRKDVWRSKELHGRFYRALHGPDVDFLASVAWLRFGDLFGETEGFVCAIMDEVMMTNNYRKYVVKDGTVDICRACHCPGESIRHIVSGCSRLANGEYLHRHNLVARIIHQQLALKYNLVDAEVPYYKYVPDPVLENGHVTLYWDRSIITDRTIVANKPDIVVIDRSERRAMIVDVTVPHDENLVKAENDKKIKYLDLAHEVFDMWDIDSAVIVPIVVTANGLIAKSLDHHLMRLSLGGWIKGLIQKAVLLDTARIVRKFLSLEP

SEQ ID NO: 29720 - protein, 1093 aa, Ochropleura plecta
MLTRSAHARSARHPPPGSSLSSASPPPEPSLVVSAVTPAVAVASSSSDEYFSPPTTPPPVRRRGRHRPPDGLGPRGPPASDRVPALGGSVQRMRWTQSINENVMRSYYGATEGGNNLTAYRVRMLSLFQVLEPAVNVSAQRLSDQVRVIQRNRMLDDTVLDRLRTEMQSSQVITSSSQVVVPPQSHQVVNRANEVSNGMATNVSTQCSEEMRSTLEGAIREYRYMSPELRPRLPRLPMHNKNRALVAALDSQLSSYFDNCENLTDAHSILYCAAVAACRVAHVKFPDDRATRPKPAIPFWQCRIERRIGAARALIGKLICFREGNTRPRVMRFVRRAFAGTDISPPDYMSRIAERIDFLKQKVYAWANRIRRYKRRVERYTQNRTFQSDERWVYRAWERPDQGVSDTHLPDDDAMCLFWRSIWSVPVSHTEGEWTREVERACDPIPEMGVLTISPQDVACAVRPLPNWKSPGPDGLHNFWIKWIQRSHVRLAALFQSALESGSLPKFLTTGITHLLHKSGSTAEPKNYRPITCLPTLYKVLTSILRAKITKHIDDNSIMSASQNGCRNGSRGTKELLLIDMAISQQVRRSRRHLSTCWIDYKKAYDSVPHTWLMRVLEMYKVDATLRTFLSSCMRQWSTVLRYPGCRQFQMNSEPIRIERGIFQGDSLSPLWFCLALNPLSTLLENSGLGYRLRRGGQVISHLLYMDDLKLFAPNDLQLMELLKVTETFSSAIRMEFGVDKCAVMHVKRGEIVESVGTQLSDSINLRSLSATETYKYLGMSEALGINGADMKQSLKERFFGRLRKVLNSLLSGGNKVRAFNGWVMPVLMYSFGILKWTQTELDTLDRKVRTLLTAFRMHHPRSSVMRLYIPRSCGGRGFLNAKTLHNREICSLREYFLETDVGMHRDVVAVDKGLTPLSLAKENWRKPVVLDTNDRREIWQSKELHGRFFRALHGPDVDQSASVAWLRSGDLFGETEGFVCAIMDEVMMTNNYRKFIVKDGTVDICRACHRPGESIRHIISGCSRLANGEYLHRHNLVARIIHQQLALKYNLVELEVPYYSMSPTQFSNMAILHCTGIDPSSLTGLLLPTSLI

SEQ ID NO: 29721 - protein, 1200 aa, Mythimna impura
MLTRAAARRARHPSPGSPLSSASPPPDLESPVSPAAAVASSSSDEYFSPPTSPTPVRRQRRGRPPKSLGSRGQPAPSRVPAAGGCVQRMRWTQAMNENVMRAYYGSTEGGTNLTAYRDRMLSLFQDLEPTVNVSAQRLSDQVRVIQRNHRLDDATLDRLRSEVLSNQIVSTSIQTQTAATPTTNAISPRSNPNNDDADDRVVTVSSQCNDELRSALEDALREYRTTPTELRPRLPRLPMHKKNRALVCTLDSLLKNNFESSENLVDTHSILYCGAVAACRLANINFPNIDGTIRPKPAVPAWQYRIERRIDGARVLIGKLHCFREGNTRPRVMRFVRRAFLGTGISPQEYMSRVTERIDFLKQKVCAWASRIRRYKRRVDRYSQNRMFQSDERWVYRAWERPEQNVIDGRRPDDFATITFWRNIWSVPVSHTEGDWMRDVERVCEAIPEMEKVVITPADVAKAVRPLPNWKSPGPDGLQNFWLKWFSNSHAPLASQFQSTLESGSLPEYLTTGVTHLLHKTGNPVEPKNYRPITCLSTVYKLLTSILRAKINRHIENNLIMSASQNGCRNGSRGTKELLLIDMAISQQARRSRKDLSTCWIDYKKAYDSVPHTWLMRVLELYKVDMTLRTFLESCMRQWKTVLRYPGCRPIQGNDEPIRIKRGIFQGDSLSPLWFCLALNPLSTLLEESGLGYRLRRGGQAISHLLYMDDLKLFAPSNLQLMELLKVTETFSSAIRMEFGVDKCAAMHVKRGEIMESEGIQLPDSIHLRSLSSTETYRYLGMSEALGINNADMKQSLKERFFGRLKKVLNSLLSGGNKVRAFNGWVMPVLIYSFGILKWTQTELDALDRRVRTLLTANRMHHPRSSVMRLYISRKCGGRGFLNAKTLHNREVCSLREYFLKTDVGMHRDVVAVDKGLTPLSMAKEDWRKPVILTTDDRKEIWKGKELHGRFYRALHEPDVDFLASVAWLRFSDLFGETEGFICAIMDEVILTNNYRRYIMKDGTVDVCRACHRPGESIRHIISGCSRLANGEYLHRHNQVARIIHQQLALKYNLVDSEVPYYKYVPDPVLENDHVTLYWDRSIITDRTIVANKPDIVVIDRLARRAVIVDVTIPHDENLVKAEKEKQIKYLDLAHEVVDMWNVDSAVIVPMVVTANGLIAKSFDDHLSKLSLRGWIKGLIQKAVLLDTARIVRRFLSLEP

SEQ ID NO: 29722 - protein, 1111 aa, Mamestra brassicae
MRWTQSMNENVMRAYYGSTEGGTNLTAYRVRMLSLFQDLEPTVNVSAQRLSDQVRVIQRNHRLDDAALDRLRSEVLNNLIISTPTQTAVQAPVNGRITPRPNNVSDEVDDRVVTVSSQCNDRLRSALEDALREYRSTPTELRPRLPRLPMHKKNRALVCALDSLLQNIFESSESLVDTHSILYCGAVAACRIANVKFPGCDEAIRPKPAAPAWQRRIERRIDETRALIGKLYCFREGNTRPRVMHFVRRAFSGTEINPRDFTSRVTERIDFLKQKVCAWASRIRRYKRRVDRYSQNRMFQSDERWVYRAWERPEQSVTDVCRPDDVATSIFWRSIWSVPICHAEGGWMRDVERVCEAIPQMEKITITTLDVAKAVRPLPNWKSPGPDGLHNFWLKWYSSSHVLLASQFQSSLESGSLPQFLTTGVTHLLHKTGSPAEPKNYRPITCLSTVYKLLTSILRAKINEHIESNSIMSASQNGCRKGSRGTKELLLIDMAISQQVRRSRKDLSTCWIDYKKAYDSVPHTWLMKVLELYKIDATLRTFLESCMRQWKTVLRYPGCRPIQGSDEPVWIKRGIFQGDSLSPLWFCLALNPLSTLLEDSGLGYRLRRGGQAISHLLYMDDLKLFAPNNLRLMELLKVTETFSSAIRMEFGVDKCAVMHVKKGEIMESEGIHLSDSIQVRSLSSTETYKYLGMLEALGINGTDMKQSLRERFFGRLKKVLNSLLSGGNKVRAFNGWVMPVLMYTFGILKWTQTELDALDRRVRTLLTANRMHHPRSSVMRLYIPRKCGGRGFLNAKTLHNREMCSLREYFLKADVGMHRDVVAVDKGLTPLSMAKENWRTPVILTTDDRKEVWKGKELHGRFYRALHGSDVDFSASVAWLRFGDLFGETEGFVCAIMDEVILTNNYRRHIMKDGTVDMCRACHRPGESIRHIISGCSRLANGEYLHRHNQVARIIHQQLALKYNLVDFEVPYYKYVPDPVLENDHVTLYWDRSIITDRTIVANKPDIVVIDRLARRTMIIDVTIPHDENLVKAEKEKQIKYLDLAHEVVDMWNVESAVIVPIVVTANGLMAKSFDDHLSKLALRSWVKGLIQKAVLLDTARIVRRFLSLEP

SEQ ID NO: 29723 - protein, 1073 aa, Abrostola tripartita
MLALFQDLEPAVNVSAQRLSDQVRVILRNHRLDDATLDRLRSEVHSSPVTCRPVHVVVPPIGPPPCDMEADDRATTVSTQYNDILRSTLEDTIREYRVSPPGLRPRLPRLPMHNKNKAMISALDSLLSSYFEGSEDLCDTHSILYCAAATACRVANVKCFDSSTATRPKPAVPAWQCRIESRITEARTLIGKLTAFREGNIRPRVMRFVRRAFAGVDINPREYATRATERIDFYKQKVYAWASRIRRYKRRVDRFSQNRIFNQDQRWVYRNWERSAQGVSDGHLPDDDVTNAFWRSIWSVPVNHTEGSWMLDVEQSCESIPEMGTITISPQDVASAVRPMSNWKSPGPDGLHNFWIKWLRSSHGCLASQFQSAIEVGSLPQFLTTGSTHLLHKTGSTTDPKNFRPITCLPTIYKLLTSILRAKITKHIDDNNIMSASQNGCKNGSRGTKELLLIDMTICQQVRRSKKDLSTCWIDYKKAYDSVPHTWLMRVLELYKIDTTLRTFLLSCMRQWRTVLHYPGCRDIQQDGEPIRIERGIFQGDSLSPLWFCLALNPLSTLLENSGLGYSLRRRSQVISHLLYMDDLKLFAPSRFQLIKLLKITEAFSNSIRMEFGVDKCAVMHVKRGGIIESQGIQLSDSINLRSLSATETYKYLGMSEALGINVVDMKQSLKERFFGCLNKVLKSLLSGGNKVRAFNGWVMPTLMYSFGILKWTQTELDALDRRVRTLLTSNRMHHPRSSVMRLYIPRKCGGRGFLNAKTLHNREVCSLREYFLRAEVGMHREVVAVDKGLTPLFLAKENWCKPVVLSVNDRRDVWQSKELHGRFYKALHGPNVDLLSSVSWLRFGDLFGETEGFVCAIMDEVIMTNNYRKYILKDGTVDICRACHRPGESLRHIMSGCSRLANGEYLHRHNQVARIIHQQLALKYKLVDSEMPYYRYVPDPVLENDHITLYWDRSIITDRTIVANKPDIVVIDRLERRAMIVDITIPHDENLVKAERDKQIKYLDLAHEVVDMWGVDSAIIVPIVVSANGLMAKSLDQHLKRLTLGGWVKGLMQKAVLLDTARIVRRFLSLEP

SEQ ID NO: 29724 - protein, 1197 aa, Chilo suppressalis
MILRPRRTRKTRPPSPDSSLSSALQPPPPTEETPSVATTASSSSNEYFSPPTSPTPVRRPGRPRPPASLGSRSHPVPNRAPAAGGCVPRMRWTRTINENVMRAYYGSTEGGTNLTAYRVRMHSLFQELEPALNVSAQRLSDQVRVIQRSHRLDDTVLDRLRLEMLSSRVGPVPLLTAVETPARAILPRYEDSDVEEVGRAATVSTQYSDRVRSVLEDAIREYRMAPPELRPRLPRLPMHKKNKALVGVLDSLLSSYFESSQNLGDTHSILYCAAVATCRVANVKFPDMTARPKQALPVWQCRIERRIAEARTLIGKLICFREGNSRPRVMRFVRRAFLGTDISPRDYLSCATERIDFLKQRVCAWASRIRRYKCRVERYNLNRMFQCDEKWVYRAWEQPIQGVADGGRPDDSATNSFWRSIWSAPVSHIEGDWMGDVEQACDGISPMEPITITVEDVTCAVSSVPNFKSPGPDCLHNFWLKWLRTSHACLASQFQSCLDSGSLPQLLTTGITHLLHKSGSTMEPKNYRPITCLPTVYKLLTSILRAKILNHIVQNSVMNATQNGCRNGSRGTKELLLIDMAISQQARRSRKNLSTCWIEYKKAYDSVPHTWLMRVLELYKVDTTLRTFLMSCMGLWRTVLCYPGCRPIRENDELIRIERGIFQGDSLSPLWFCLAMNPFSTLLEASGLGFSLRRGGQIISHLLYMDDLKLFDPTKLQLMELLKVTETFSKDINMEFSVDKCAVMHVKRGEIVESEGLQLSDSINIRSLSADETYKYLGMSEGLGINGADMKQSVQERFFGRLNKVLTSVLSGGNKVRAFNGWVMPVLMYSFGILKWTQTELNALDRRVRTLLTANRMHDPRSSVMRLYIPRKCGGRGFLNAKTLHNREVCSLREYFLKADVGMHRDVVAVDTGLTPLSLAKENWRKPVIMTTDERREVWQGKELHGRFFRALHRPEVDLKVSMAWLRFGNLFGETEGFVCAIADEVMMTNNYRKYILKDGTVDICRACHCPGESIRHILSGCSRLANGEYLHRHNQVARIIHQQLALKYNLVASEVPYYRYVPDPVLESGHITLYRDRSIITDRTIVANKPDIVLIDREKRLAMIVDVAIPHDENLMKAEKDKQIKYLDLAHEVVAMWDVDSAIIVPIVVTVNGLIAKSFDCHLRRLELGDWIKGLIQKAVLLDTARIVRRFLSLGP

SEQ ID NO: 29725 - protein, 1202 aa, Griposia aprilina
MLTRSARTRARPPPPDSSLSSASPPPVSSLIVSAVTTPAAVVASSSSDEYFSPPTSPTPVRRQGRGRPPRSLGLRGHPAPSRVPAAGGCVQRMKWTQSMNENVMRAYYRSTEGGTNLTAYRDRMLSLFQELEPTINVSAQRLSDQVRVIQRSHRLDDAALDRLRSELNNHIISTPAQTAVQASTIDEIQPRSNHGVEVEDDRVASVSSQCNARLRSALEDAFREYRSTPTELRPRLPRLPMHKKNRALVCALDSQLKNVFESSENLIDTHSILYCAAVAACRLANVRFPNCDGATRPKPAVPAWQCRIERRIDGARVLIGKLHCFREGNNRPRVMRFVRRAFSGTGISPREYMSHATERIDFLKQKVCAWASRIRRYKRRVDRYTQNRMFQSDERWVYRAWERPEQNVTDECRPDDATTSTFWRSIWSVPVCHVEADWMRDVGRACETVPEMDAVLITPLDVARAVRPLPNWNSPGPDGLHNFWLKWLISSHACLASQYQSSLESGSLPQFLTTGVTHLLHKSGSPTDPKNYRPITCLSTVYKLLTSILRAKINTHIESNSIMSASQNGCRNGSRGTKELLLIDMAISQQVRRSRRDLSTCWIDYKKAYDSVPHTWLMRVLELYKIDTTLRTFLRSCMGQWRTVLRYPGCRQIQANDEPVWIKRGIFQGDSLSPLWFCLALNPLSTLLEDSGLGYRLRRGGQVISHLLYMDDLKLFAPNKLQLMELLKVTETFSSTIRMEFGVDKCAVMHVRRGEVMEPEGIQLSDSIHLRSLSSSESYKYLGMSEALGINVADMKQSLRERFFGRLKKILISLLSGGNKVRAFNGWVMPVLMYSFGILKWTQTELDALDRRVRRLLTANRMHHPRSSVMRLYIPRKCGGRGFLNAKTLHNREVCSLREYFLKAEVGMHRDVVAVDKGLTPLSMAKENWRKPVVLTTDDRKEVWQSKELHGRFYRALHEPGVDFLASVSWLRFGDLFGETEGFVCAIMDEVILTNNYRRHIMKDGTVDMCRACHRPGESIRHIVSGCSRLANGEYLHRHNQVARIIHQQLALKYKLVDSEVPYYKYVPDPVLENDHITLYWDRSIITDRTIVANKPDIVVIDRLARRTMIIDITIPHDENLVKAEKEKQIKYLDLAHEVVDMWNVSSAVIVPIVVSANGLMAKSLDQHLSRLSLGGWVKGLIQKAVLLDTARIVRRFLSLEP

SEQ ID NO: 29726 - protein, 1202 aa, Griposia aprilina
MLTRSARTRARPPPPDSSLSSASPPPVSSPIVSAVTTPVAVVASSSSDEYFSPPPSPTPVHRQGRGRPPRSLGLRGHPAPSRVPAAGGCVQRMKWTQSMNENVMRAYYRSTEGGTNLTAYRDRMLSLFQELEPTINVSAQRLSDQVRVIQRSHRLDDAALDRLRSELNKHIISTPAQTAVQASTIDEIQPRSNHGVEVEDDRVASVSSQCNARLRSALEDAFREYRSTPTELRPRLPRLPMHKKNRALVCALDSQLKNVFESSENLVDTHSILYCAAVAACRLANVRFPNCDGATRPKPAVPAWQCRIKRRIDGARVLIGKLHCFREGNNRPRVMRFVRRAFSGTGISPREYMSHATERIDFLKQKVCAWASRIRRYKRRVDRYTQNRMFQSDERWVYRAWERPEQNVTDECRPDDATTSTFWRSIWSVPVCHVEADWMRDVGRACETVPEMDAVLITPLDVARAVRPLPNWKSPGPDGLHNFWLKWLISSHACLASQYQSSLESGSLPQFLTTGVTHLLHKSGSPTDPKNYRPITCLSTVYKLLTSILRAKINTHIESNSIMSAFQNGCRNGSRGTKELLLIDMAISQQVRRSRRDLSTCWIDYKKAYDSVPHTWLMRVLELYKIDTTLRTFLRSCMGQWRTVLRYPGCRQIQANDEPVWIKRGIFQGDSLSPLWFCLALNPLSTLLEDSGLGYRLRKDGQVISHLLYMDDLKLFAPNKLQLMELLKVTETFSSTIRMEFGVDKCAVMHVKRGEVMEPEGIQLSDSIHLRSLSSSESYKYLGMSEALGINVADMKQSLRERFFGRLKKVLISLLSGGNKVRAFNGWVMPVLMYSFGILKWTQTELDALDRRVRTLLTANRMHHPRSSVMRLYIPRKCGGRGFLNAKTLHNREVCSLREYFLKAEVGMHRDVVAVDKGFTPLSMAKENWRKPVVLTTDDRKEVWQSKELHGRFYRALHEPGVDFLASVSWLRFGDHFGETEGFVCAIMDEVILTNNYRRHIMKDGTVDVCRACHRPGESIRHIVSGCSRLANGEYLHRHNQVARIIHQQLALKYKLVDSEVPYYKYVPDPVLENDHITLYWDRSIITDRTIVANKPDIVVIDRLARRTMIIDITIPHDENLVKAEKEKQIKYLDLAHEVVEMWNVSSAVIVPIVVSANGLMAKSLDQHLSRLSLDGWVKGLIQKAVLLDTARIVRRFLSLEP

SEQ ID NO: 29727 - protein, 1098 aa, Omphaloscelis lunosa
MLTRSAARRARLPPPDSPLSSASSPPVLSPTVNAVMTPAAAVASSSSDEYFSPPTTPPPARRRGGRRPPDGLGPRGPPASDRVPAPGGSVQRMRWTRSINENIMRSYHGATEGGINLTAYRVRMLSLFQVLEPAVNVSAQRLSDQVRVIQRNHMLDDTVLDRLRSEMQSSHVIAPPVRSVIIPSQIIKSQADERIDDRATNVSTQCNEELRSALEGAIQEYRFMSPELRPRLPRLPMHNKNKALVAVLDSQLSNYFDDCEDLTDTHSILYCAAVAACRVAHVKFANDSRATRPKPAAPAWQCRIERRIGGARTLIGKLICFREGNTRPRVMRFVRRAFLGTDISPQDYLTCVTERIDFLKQKVYAWANRIRRYKRRVERYTQNCTFQSDERWVYRAWERPDQGVADTHRPDYDAMCSFWRSIWSVPVNHTEGDWTREVERACDPIPEMGAITICPQDVARAVRPLPNWKSPGPDGLHNFWIKWFLRSHARLAAQYQTALESGSLPQFLTTGVTHLLHKSGSTAEPKNYRPITCLPTVYKVLTSILRAKINKHIDTNSIMSASQNGCRNGSRGTKELLLIDMAINQQVRRSRKDLSTCWIDYKKAYDSVPHTWLMRVLELYKVDTTLRTFLMSCMGQWRTVLRYPGCRNIQRNSEPIRIERGIFQGDSLSPLWFCLALNPLSTLLEASGLGYRLRRGGQVISHLLYMDDLKLFAPNNLQLMELLKVTETFSNAIRMEFGVDKCAVMHVKRGEIVESVGTQLSDSINLRALSASETYKYLGMSEALGINVTDMKQSLKERFFGRLKKVLNSLLSGGHKVRAFNGWVMPVLIYSFGILKWTQTELDALDRRVRTLLTAYRMHHPRSSVMRLYIPRKCGGRGFLNAKTLHNREICSLREYFLGVDVGMHRDVVVVDKGLTPLSLAKENWRKPVVLDTKDCMEIWQSKELHGRYFRALHGPDVDLPASVTWLRFGDLFGETEGFVCAIMDEVMMTNNYRRFIVKDGTVDICRACHRPGESIRHIISGCSRLANEEYLHRHNLVARIIHQQLALKYSLVESEVPYYRYVPDPVLENGNITLYWDRSIITDRTIVANKPDIVVVD

SEQ ID NO: 29728 - protein, 962 aa, Omphaloscelis lunosa
MHNKNKALVAVLDSQLSNYFDDCEDLTDTHSILYCAAVAACRVAHVKFANDSRATRPKPAAPAWQCRIERRIGGARTLIGKLICFREGNTRPRVMRFVRRAFLGTDISPQDYLTRVTERIDFLKQKVYAWANRIRRYKRRVERYTQNRTFQSDERWVYRAWERPDQGVADTHRPDDDAMCSFWRSIWSVPVNHTEGDWTREVERACDPIPEMGAITICPQDVARAVRPLPNWKSPGPDGLHNFWIKWFLRSHARLAAQYQTALESGSLPQFLTTGVTHLLHKSGSTAEPKNYRPITCLPTVYKVLTSILRAKINKHIDTNSIMSASQNGCRNGSRGTKELLLIDMAINQQVRRSRKDLSTCWIDYKKAYDSVPHTWLMRVLELYKVDTTLRTFLMSCMGQWRTVLRYPGCRNIQRNSEPIRIERGIFQGDSLSPLWFCLALNPLSTLLEASGLGYRLRRGGQVISHLLYMDDLKLFAPNNLQLMELLKVTETFSNAIRMEFGVDKCAVMHVKRGEIVESVGTQLSDSINLRALSASETYKYLGMSEALGINVTDMKQSLKERFFGRLKKVLNSLLSGGHKVRAFNGWVMPVLIYSFGILKWTQTELDALDRRVRTLLTAYRMHQPRSSVMRLYIPRKCGGRGFLNAKTLHNREICSLREYFLGVDEGMHRDVVVVDKGLTPLSLAKENWRKPVVLDTKDRMEIWQSKELHGRYFRALHGPDVDLPASVTWLRFGDLFGETEGFVCAIMDEVMMTNNYRRFIVKDGTVDICRACHRPGESIRHIISGCSRLANEEYLHRHNLVARIIHQQLALKYSLEESEVPYYRYVPDPVLENGNITLYWDRSIITDRTIVANKPDIVVVDRGERRTMIIDITVPHDENLVKAEKDKQIKYLDLACEVVDMWDVDSAIIVPIVVTANGLIAKSLDQHLRRLSLGSWIKGLIQRAVLLDTARIVRRFLSLEP

SEQ ID NO: 29729 - protein, 1008 aa, Amphipyra berbera
MGMRYEDDGAVTVSSQYNDRLRSALEDAIRECRANPESRPRLPRLPMHNKNRALVCALDSLLASYFESSEDLGDTHSIMYCAAVAACRVANVKFNNSERATRPKPAVPAWQCRIERRIDETRALIGKLICFREGNTRPRVMRFVRRAFSGTGISPREYTSRATERIDFLKQKVCAWASRIRRYKRRVERYTQNRMFQCDQRWVYIAWERPDQSVSGGRLPDDDATSSFWRSIWSVPVIHTEGDWMRDIERTCESIEEMGEIVISPQDVADAVRPLPNWKSPGPDGLHNFWIIWLRSSHARLASQFQSSLESGSLPQFLTTGVTHLLHKSGSTAEPKNYRPITCLPTVYKLLTSILRSKINTHIGNNSVLSSSQNGCRNGSRGTKELLLIDTAISQQVRRSQKSLSTCWIDYKKSYDSVPHTWLMRVLDRYKINTTPRTFLRSCMGQWRTVLRYPGCQPIRGSGEPIRIERGIFQGDSLSPLWFCLALNSLSTLLEGSGLGYPLRRGGQVVSHLLYMDDLKLFAPTKLQLVDLLKLTETFSNSIRMEFGVDKCAVMHVRRGRVMESEGLQLSDSIHLSPLSANDTYKYLGMSEGLGISVADMKQSLRERFFGRLKKVLKSLLSGVNKVRVFNGWVMPVLMYSFGILKWTQTELDALDRRVRTLLTANRMHHPRSSVMRLYIPRKCGGRGLLNAKTLHNSEVCSLREFFLHADAGMHRDVVAVDKGLTPLSLARENWRKPVVLNTNDRREIWQSKELHGRFYRALHGPDVDFLASVSWLRFGDLFGETEGFVCAIMDEFIMTNNYRKCIVKDGTVDICRACHCPGESLRHIISGCSRLANGEYLHRHNQVARIIHQQLALKYNLVESEVPYYRYVPDPVLENGRITLYWDRYIITDRTIVANKPDIVVIDRTERLTMIVDVTIPHDGNLVKAEKDKQIKYLDLAHEVVNIWDVESATIVPIVVTANGLMAKSLDKHLMRLSLGGWIKGLIQKAVLLDTARIVRRFLSLEP

SEQ ID NO: 29730 - protein, 1093 aa, Noctua janthe
MLTRSRAKHQAHPPSPDSSLSSASQPPGRPSIVSAVSPIAAVASSSSDEFFSPPSTPSPPRRRGRGRPPAGLGPRGQQAPNRVPAAGGNVSRMRWTQSINENVMRAYYGATEGGSNLTAYRGRMLSLFQVLEPGVSVSAQRLSDQVRVIQRNHMLDDTVLERLRFDSRSNLVIPASPMIAVQLQNVSSAPPRSEHDGEEDDDEVISVSTQCNAQLRSALEGAFREYRSTPPELRPRLPRLPMHKKNKALVCALDSQLSNCFDSSKDLADTHSILYCGAVAACRVAHVKFPNNDRATRPKFAVPAWQCRIERRIGKARALIGKLICFREGNTRPRVLRFVKRAFSGTDVSFRDYLARVTERIDFLKQKICAWASRIRRYKRRVERYTQNRTFRSDERWVYRAWERPDQGVTDTRLPDDDAMCSFWRNIWSVPVSHTEGDWTREVERACDSIPEMGAIIISPQDVARAVRPLPNWKSPGPDGLHNFWIKWFQRSHVRLASQFQSALESGSLPQFLTTGITHLLHKSGSTAEPKNYRPITCLPTVYKVLTSILRAKINHHIDSNSIMSASQNGCRNGSRGTKELLLIDMAISQQVRRSRRDLSTCWIDYKKAYDSVPHTWLMRVLELYKVDATLRTFLMSCMGHWRTVLRYPGCRQIQGNSEPIKIERGIFQGDSLSPLWFCLALNPLSTLLEGSGLGYRLRRGGQVISHLLYMDDLKLFAPNNLQLMKLLKVTETFSSAIRMEFGVDKCAVMHVKRGEIMESVGTQLSDSIHLRSLSSTETYKYLGMSEALGINTADMKQSLRDRFFGRLNKVLSSLLSGGNKVRAFNGWVMPVLMYSFGILKWTQTELDALDRRVRALLTANRMHHPRSSVMRLYIPRKCGGRGFLNAKTLHNREICSLREYFLEVDEGMHRDVVSVDKGLTPLSLANENWRKPRVLDTNDRKEVWQGKELHGRFYRALHGPDVDFLASVSWLRFGDLFGETEGFVCAIMDEVMMTNNYRKYIVKDGTVDICRACHRPGESIRHIISGCSRLANGEYLHRHNLVARIIHQQPALKYNLVESEVPYYKYAPDPVLDNGNITLYWDRSIITDRSCQ

SEQ ID NO: 29731 - protein, 1203 aa, Amphipyra tragopoginis
MLTRARAREKVARPRSPDPSLRSASQPPESSPSVSAVTPAAAVASSSSDEYFSPPSSPPPVRRRGGARPPACLGPQGQPASNRVPAAGGNVSRMRWTQSINENVMRAYYGATEGGINLTAYRDRMLLLFQVLEPAINVSTQRLSDQVRVIQRNRRLDDTVLERLRSEVQNNRAVTPPVQAVVQAQLPAVPPRPSHGDGEGDGEVIEVSNQCSDELRSALEGAILEYRATPPELRPRLPRLPMHKKNRALVCALDSLLSNYFDGSEDLADTHSILYCAAIAACRVAHVKFTDNERATRPTPAVPAWQCRIERRIGGARALIGKLICFREGNTRPRVMRFVRRAFSGTGISPRDYMSRITERIDFLKQKVYAWANRIRRYKRRVERYTLNRTFQSDQRRVYRTWERPDPCGSDVRLPDDEAMSSFWRSIWSVPVAHTEGGWMRDIERACESIPEMGAIIISPQDVAGAARPLPNWKSPGPDGLHNFWLKWLRSSHACLASQFQSSLESGSLPQFLTTGATHLLYKSGSTAEPKNYRPITCLPTVYKLLTSILRVKISNHIDNNSIMSASQNGCRNGSRGTKELLLIDMTISQQVRRSRKDLSTCWIDYKKAYDSVPHTWLMRVLELYKINATLRTFLMSCMRQWRTVLRYPGCREIRGRGEPVRIERGIFQGDSLSPLWFCLALNPLSTLLEGTRLGYRLRREGQVISHLLYMDDLKLFAPTDLRLMELLKVTENFSSSIRMEFGVDKCAVMHVKRGRIVESEGTQLSNSIQLRSLSPTETYKYLGMSEALGISEADMRQSLRERFFGRLNKVLRSLLSGGNKVRAFNGWVMPVLMYSFGILKWTQTDLDALDRRVRALLTTHRMHHPRSSVMRLYIPRKCGGRGFLNAKTLHNREVCSLREYFLQAEGEMHRDVVAVDKGLTPLALAKENWRKPAVLSTNDREEVWQSKELHGRFYRALHGPDVDFPASVSWLRFGDLFGETEGFVCAIMDEVMMTNNYRRYIVKDGTVDICRACHRPGESIRHIVSGCSRLANGEYLHRHNLVARIIHQQLALKYNLVESEVPYYRYVPDPVLENGHVTLYWDRSIITDRTIVANKPDIVVIDRSERRTVIVDITVPHDENLVKAEKDKQIKYLDLAHEVVGMWDVDSAVIVPIVITANGLIAKSLDQHLKRLSLGGWIKGLIQKAVLLDTARIVRRFLSLEP

SEQ ID NO: 29732 - protein, 989 aa, Amphipyra tragopoginis
MRSALEDALREFRSTPPELRPRLPRLPMHNKNRALVCALDSLLSNVLESSKDIGDTHSILYCAAVAACRVAHVKFPNDNRATRPKSTVPAWQCRIERRIDEARVLIGKLTCFREGNIRPRVMRFVRRAFSGTDVSPGEYVSRVTERIDFLKQKVYAWANRIRRYRRRVDRYTQNRIFQSDQRWVYRTWERPDQGVSDTHLPDNDVMNAFWRNIWSVPVTHTEGDWMQEVQRACEPIQEMGAVTIGPQDVTSAVRPMPNWKSPGPDGLHNFWIKWLRSSHARLASQFQSSLESGSLPSFLTTGVTHLLFKSGSTAEPKNYRPITCLPTVYKLLTSILRAKINNHIDNNAIMSDSQNGCRNGSRGTKELLLIDMAISQQVRRSRKDLSTCWIDYKKAYDSVPHTWLMRVLELYKINATLRTFLMSCMGQWRTVLHYPGCRQIQGNGELIRIERGIFQGDSLSPLWFCLALNPLSTLLEGSGLGYRLRRGGQVISHLLYMDDPKLFAPNNLQLVELLKVTETFSNSIRMEFGVDKCAVMHVKRGRIMESVGTQLSDAIHLRSLSSTETYKYLGMSEALGINEADMKQSLKERFFGRLIKVLKSLLSGGNKVRAFNGWVMPVLMYSFGILRWTQTELDALDRRVRTLLTAYRMHHPRSSVMRLYIPRKCGGRGFLNVKTLHNREVCNLREYFSQADVGMHRDVVAVDKGLTPLSLAKENWRKPVVLDTNGRREVWRSKELHGRFYRALHGPDVDFLASVAWLRFGDLFGETEGFVCAIMDEVMMTNNYRKYIVKDGTVDICRACHCPGESIRHIVSGCSRLANGEYLHRHNLVARIIHQQLALKYNLVDTEVPYYKYVPDPVLENGHVTLYWDRSIITDRTIVANKPDIVVIDRLERRTVIVDIAVPHDENLVKAENDKKIKYLDLAHEVVDMWDVDSAVIVPIVVTANGLIAKSLDQHLMRLSLGSWIKGLIQKAVLLDTARIVRKFLSLEP

SEQ ID NO: 29733 - protein, 1080 aa, Amphipyra tragopoginis
MLSLFQVLEPAVNVSAQRLSDQVRVIQRGHMLDDTVLDRIRSEVQNSPVISPSPQVLEQSQNLAATLPRPNRADEEDDDRATNVSTQCNEELRSALEDAMREYRFIRPDLRPRIPRLPMHRKNRALVCALDSLLSNYFDGSEDLSDTHSILYCAAVAACRVAHIKFTDNERATRPKNAVPAWQCRIERRIAEARALIGKLVCFREGNSRPRVMRFVRRAFSGTDVSPREYMSRVTERIDFLKQKVYAWANRIRRYRRRVDRYTQNRLFQSDERWVYRTWERPDQRVSDTRLPDDDVMNAFWRNVWSVPVTHTEGDWMQEVQRACEPIQEMGDIIISPQDVASAVRPMSNWKSPGPDGLHNFWLKWLRSSHARLASQFQSSLESGSLPQFLTTGVTHLLHKSGSTAEPKNYRPITCLPTVYKVLTSILRAKINNHIDNNSIMSASQNGCRNGSRGTKELLLIDMAISQQVRRSRKDLSTCWIDYKKAYDSVPHTWLMRVLELYKVNTTLCAFLTSCMGQWRTVLHYPGCRQIQGMGEPIRIERGIFQGDSLSPLWFCLALNPLSTLLEGSGLGYRLRRGGQVISHLLYMDDLKLFAPNNLRLLELLKVTETFSNSIRMEFGVDKCAVMHVKRGRIMESVGTQLSDSVHLRSLSSTETYKYLGMSEALGINETDMKQSLRERFYGRLKKVLNSLLSGGNKVRAFNGWVMPVLMYSFGILKWTQTELDALDRRVRSLLTANRMHHPRSSVMRLYIPRKCGGRGFLNAKTLHNREVCSLREYFSQADVGMHRDVVAVDKGLTPLSLAKENWRKPVVLDTNGRREVWRSQELHGRFYRALHGPDVDFLASVAWLRFGDLFGETEGFVCAIMDEVMMTNNYRKYIVKDGTVDICWACHCPGESIRHIVSGCSRLANGEYLHRHNLVARIIHQQLALKYNLVDAEVPYYKYVPDPVLENGHVTLYWDRSIITDRTIVANKPDIVVIDRSKRLTMIVDITVPHDENLVKAEKDKEIKYQDLAHEVVAMWDVDSAIIVPIVVTANGLIAKSLDQHLKRLSLGSWIKGLIQKAVLLDTARIVRKFLSLRP

SEQ ID NO: 29734 - protein, 1198 aa, Amphipyra tragopoginis
MLTRARSKAARPPPPDSPLSSASQPPELGPPVTPAAAAASSSSDEYFSPPASPRPVRRQGRHRPPTSLGPRGPPAPSRVLATGGCVQRMKWTQSINENVMRAYYGSTEGGTNLTAYRVRMLTLFRELEPAINVSAQRLSDQVRVIQRNHRLDDAALDRLRLEVQNSRVTPFPSQTAVHEVNINIVPPRSDYVDGDMDDRAVTVSSQYNDQLRSALEDAIREYRANPELRPRLPRLPMHNKNRALVCALDSLLSSYFESSEDLGDTHSILYCAAVAACRVANVKFNNSERATRPKPAVPAWQCRIERRIDGARALIGKLICFREGNTRPRVMRFVRRAFSGTGISPREYMSQVTERIDFLKQKVCAWASRIRRYKRRVERYTQNRMFQCDQRWVYRAWERPDQGVSDGRLPDDDAMNSFWRSIWSVPVIHTEGDWMRDIERACEPIEEMGEILISPQDVASAARPLPNWKSPGPDGLHNFWIKWLRSSHARLATQFQSSLESGSLPQFFTTGVTHLLHKSGSTAEPKNYRPITCLPTVYKLLTSILRSKINTHIENNSVMSSAQNGCRNGSRGTKELLLIDMAISQQVRRSRKNLSTCWIDYKKAYDSVPHTWLMRVLELYKINATLRTFLMSCMGQWRTVLRYPGCRPIRESGEPIRIERGIFQGDSLSPLWFCLALNPLSTLLEGSGLGYPLRRGGQVVSHLLYMDDLKLFAPTKLQLVELLKVTETFSNSIRMEFGVDKCAVMHVRRGGIMESEGLQLSDSIHLRPLSANDTYKYLGMSEGLGISEADMKQSLRERFFGRLKKVLKSLLSGGNKVRAFNGWVMPVLMYSFGILKWTQTELDALDRRVRSLLTANRMHHPRSSVMRLYIPRKCGGRGLLNAKTLHNRELCSLREYFLHADAGMHRDVVAVDKGLTPLNLAKENWRKPVVLSTNDRREIWQSKELHGRFYRALHGPDVDFQASVSWLRFGDLFGETEGFVCAIMDEVIMTNNYRKYIVKDGTVDICRACHCPGESLRHIISGCSRLANGEYLHRHNQVARIIHQQLALKYNLVESEVPYYKYVPDPVLENGHITLYWDRSIITDRTIVANKPDIVVIDRSERRTMIVDVTIPHDGNLVKAEKDKQIKYLDLAHEVVNMWDVDSATIVPIVVTANGLMAKSLDQHLKRLSLGGWIKGLIQKAVLLDTARIVRRFLSLEP

SEQ ID NO: 29735 - protein, 868 aa, Mythimna impura
MRFVRRAFLGTGISPQEYMSRVTERIDFLKQKVCAWASRIRRYKRRVDRYSQNRMFQSDERWVYRAWERPEQNVIDGCRPDDFATITFWRNIWSVPVSHTEGDWMRDVERVCEALPEMEKVVITPADVAKAVRPLPNWKSPGPDGLQNFWLKWFSNSHAPLASQFQSTLESGSLPEYLTTGVTHLLHKTGNPVEPKNYRPITCLSTVYKLLTSILRAKINRHVENNLIMSASQNGCRNGSRGTKELLLIDMAISQQARRSRKDLSTCWIDYKKAYDSVPHTWLMRVLELYKVDMTLRTFLESCMRQWKTVLLYPGCRPIQGNDEPIRIKRGIFQGDSLSPLWFCLALNPLSTLLEESGLGYRLRRGGQAISHLLYMDDLKLFAPSNLQLMELLKVTETFSSAIRMEFGVDKCAAMHVKRGEIMESEGIQLPDSIHLRSLSSTETYRYLGMSEALGINNADMKQSLKERFFGRLKKVLNSLLSGGNKVRAFNGWVMPVLMYSFGILKWTQTELDALDRRVRTLLTANRMHHPRSSVMRLYISRKCGGRGFLNAKTLHNREVCSLREYFLKTDVGMHRDVVAVDKGLTPLSMAKEDWRKPVILTTDDRKEIWKGKELHGRFYRALHEPDVDFLASVAWLRFSDLFGETEGFICAIMDEVILTNNYRRYIMKDGTVDVCRACHRPGESIRHIISGCSRLANGEYLHRHNQVARIIHQQLALKYNLVDSEVPYYKYVPDPVLENDHVTLYWDRSIITDRTIVANKPDIVVIDRLARRAVIVDVTIPHDENLVKAEKEKQIKYLDLAHEVVDMWNVDSAVIVPIVVTANGLIAKSFDDHLSKLSLRGWIKGLIQKAVLLDTARIVRRFLSLEP

SEQ ID NO: 29736 - protein, 1189 aa, Mythimna impura
MLTRAAARRARHPPPGSPLSSASPPPDLESPVSPAAAVASSSSDEYFSPPTSPTPVRRPGRGRPPRSLGSRGQPAPSRVPAAGGCVQRMRWTQSMNENVMRAYYGSTEGGTNLTAYRVRMLSLFQVLEPTVNVTTQRLSDQVRVIQRNHRLDDAALDRLRSEVLSNRIISTPIQTQTAAPRATDAILPQSNHVDDEADDRVVTVSSQCNDRLRSALEDALREYRSTPIDLRPRLPRLPMHKKNRALVCALDSLLENVFESSVNLADTHSILYCGAIAACRLANVKLPSCDGATRPKSVAPAWQCRIEKRIDGARALIGKLYCFREGNTRPRVMRYVRRAFSGTGISPPEYLSRVTERIDFLKQKVCAWANRIRRYKRRVDRYSRNRMFQSDERWVYRAWERPEQNVTDVTRPDAVATNAFWRNIWSVPVCHTEDGWMREVERVCEAIPEMEKVIISPTDVARAVRPLPNWKSPGPDGLQNFWLKWYSSSHALLASQFQSSLESGSLPQFLTTGVTHLLHKTGSTAEPKNYRPITCLSTVYKLLTSILRTKINQHIDNNSIMSASQNGCRNGSRGTKELLLIDMTISQQVRRSRKDLSTCWIDYKKAYDSVPHTWLMRVLELYKIDATLRTFLESCMGQWNTVLRYPGCRSIRRDDEPIWIKRGIFQGDSLSPLWFCLALNPLSTLLEESGLGYRLRRDGQVLSHLLYMDDLKLIAPNKLRLMELLKVTETFSSAIRMEFGVDKCAVMHVKRGEIMESEGIQLSDSIHLRSLSSTETYKYLGMSEALGINVADMKQSLKERFFGRLKKVLNSLLSGGNKVRAFNGWVMPVLMYSFGILKWTQTELDALDRRVRTLLTANRMHHPRSSVMRLYIPRKCGGRGFLNTKTLHNREVCSLREYFHKTDVGMHRDVVAVDKGLTPLSMAKENWRKPVVLTTDDRKEVWKSKELHGRFYRALHESDVDFAASVAWLRFSNLFGETEGFICAIMDEVILTNNYRRYIMKDGTVDVCRACHRPGESIRHIISGCSRLANGEYLHRHNQVARIIHQQLALKYNLVYSEVPYYRYVPDPVLENDHVTLYWDRSIITDRTIVANKPDIVVIDRLARRAMIVKAEKEKQIKYLDLAHEVVDMWNVDSAVIVPIVVTANGLIAKSFDDHLSKLSLRGWIKGLIQKAVLLDTARIVRRFLSLEP

SEQ ID NO: 29737 - protein, 1200 aa, Mythimna impura
MLTRAAARRARHPPPGSPLSSASPPPDLESPVSPAAAVASSSSDEYFSPPTSPTPVRRQRRGRPPKSLGSRGQPAPSRVPAAGGCVQRMRWTQSMNENVMRAYYGSTEGGTNLTAYRDRMLSLFQDLEPTVNVSAQRLSDQVRVIQRNHRLDDATLDRLRSEVLSNQIVSTSIQTQTAATPTTNAISPRSNPNNDDADDRVVTVSSQCNDELRSALEDALREYRTTPTELRPRLPRLPMHKKNRALVCTLDSLLKNNFESSENLVDTHSILYCGAVAACRLANINFPNIDGTIRPKPAVPAWQYRIERRIDGARVLIGKLHCFREGNTRPRVMRFVRRAFLGTGISPQEYMSRVTERIDFLKQKVCAWASRIRRYKRRVDRYSQNRMFQSDERWVYRAWERPEQNVIDGRRPDDFATITFWRNIWSVPVSHTEGDWMRDVERVCEAIPEMEKVVITPAHVAKAVRLLPNWKSPGPDGLQNFWLKWFSNSHAPLASQFQSTLESGSLPEYLTTGVTHLLHKTGNPVEPKNYRPITCLSTVYKLLTSILRAKINRHIENNLIMSASQNGCRNGSRGTKELLLIDMAISQQARRSRKDLSTCWIDYKKAYDSVPHTWLMRVLELYKVDMTLRTFLESCMRQWKTVLRYPGCRPIQGNDEPIRIKRGIFQGDSLSPLWFCLALNPLSTLLEESGLGYRLRRGGQAISHLLYMDDLKLFAPSNLQLMELLKVTETFSSAIRMEFGVDKCAAMHVKRGEIMESEGIQLPDSIHLRSLSSTETYRYLGMSEALGINNADMKQSLKERFFGRLKKVLNSLLSGGNKVRAFNGWVMPVLMYSFGILKWTQTELDALDRRVRTLLTANRMHHPRSSVMRLYISRKCGGRGFLNAKTLHNREVCSLREYFLKTDVGMHRDVVAVDKGLTPLSMAKEDWRKPVILTTDDRKEIWKGKELHGRFYRALHEPDVDFLASVAWLRFSDLFGETEGFICAIMDEVILTNNYRRYIMKDGTVDVCRACHRPGESIRHIISGCSRLANGEYLHRHNQVARIIHQQLALKYNLVDSEVPYYKYVPDPVLENDHVTLYWDRSIITDRTIVANKPDIVVIDRLARRAVIVDVTIPHDENLVKAEKEKQIKYLDLAHEVVDMWNVDSAVIVPMVVTANGLIAKSFDDHLSKLSLRGWIKGLIQKAVLLDTARIVRRFLSLEP

SEQ ID NO: 29738 - protein, 1084 aa, Limenitis camilla
MCAAQHPRARQITPPRKYRNTQKKVAVVSSSSDEYFSPPTSPSPVRRPGRGRPPRSLGPRGQPASRQVPAIDGYVQRMKWTQCINENVMRAYYGSTEGGTNLTAYRDRMLSLFQKLEPSINVSAQRLSDQVRIILRNHRLNDTVLERIRSEVHDSRVIPSSIQATLPGPSPPSPNQRDEEEDDTTITAGKKYDELLRSALEDAIREYRYTSDEIRPRLPRLPMHKKNRALVCTLDSLLPMYFESSEDLKDTHSILFCAAVAVCRVAHVKLVNTETTRPKPDVAAWRSRIERRIDETRVLIGKLYSFREGNTRPRVMRFVRRAFSGTEICPPEYMARVTERIDTLKQKIYAWANRIRRYRRRVDRYSQNRMFQKDQKWVYRTWERPDQNVDDIHRPDDDDTNKFWRSIWSVSVDHTEDDWMREIRQTREPLQAMEHISITCKDVADAVRSVPNWKSPGPDGLHNFWLKWLRSSHACLASQFQSALESGSLPQFLTTGITHLLHKSGSTTEPKNYRPITCLPTVYKLLTSILRHKIDSHITKNAIMSVSQNGCRNRSRGTKELLLIDMTISQQVRRSRKDLSTCWIDYKKAYDSVPHGWLMRVLELYKVDATLCAFLGSCMRQWRTVLRYPGCRPIQGNNEPIRIKRGIFQGDSLSPLWFCLALNPLSTLLENSGLGYRLRRGGQVISHLLYMDDLKLFVPTKLQLIELLKITKTFSNSIRMEFGVDKCAVMHVKRGKIEESEGIQLSDSVNLRSLSADETYKYLGMSEALGIIEIDMKQSVRERFLARLRKVLKSLLSGGNKVRAYNSWVMPILMYSFGILKWTQKELDDLDRKVRALLTTYRMHHPRSSVMRLYIPRKCGGRGFLNAKTLHNREVCNLREYFLQTDVGMHRDVVAMDKGLTPLSLAKENWRKPIVLSTDNRKEVWKSKELHGRFYRALHGDEVDFKASVSWLRFGNLFGETEGFVCAIMDEVIMTRNYRRYIVRDDTVDICRACHSSGESLRHIISGCPRLANGEYLHRHNQVAKIIHQQLALRYGLVESEVPYYRYAPDPVLENGHVTLYWDRTIITDRTLVLSNSSFIEEST

SEQ ID NO: 29739 - protein, 1131 aa, Noctua fimbriata
MITRAASRRARLPPPDQSLSSASPPPESSPIVSAVTPAVAVASSSSDEYFSPPTSPTPVRRQGRGRPPRSLGLRGHPAPSRVPAAGGCVQRMRWTHSINENVMRAYYGSTEGGTNLTAYRVGMLSLFQVLEPTINVSAQRLSDQVRVIQRNHMLDDAVLDRLRSEVLSNRIVLTPAQTAVQASVIDATPPRFNPAVVEEDDRVAVVSSQCNDRLRSALEDALREYRSTPTELRPRLPRLPMHNKNRALVCALDSQLKNLFESSENLVDTHSILYCGAVAACRLANVKFPNCDVATRPKPAVPAWQRRIECRIDGARVLIGKLHCFREGNTRPRVMRFVRRAFSGTGISPQEYMSRVTERIDFLKQKVYAWANRIRRYKRRVDRYSQNRMFQSDERWVYRAWERPDQNMTDMCRPDDAATSSFWRSIWSVPVCHTEADWMRDVEQVCEPIPEMEPILITPLDVARAVRPLPNWKSPGPDGLHNFWLKWLSSSHTCLASQFQSSLESGSLPQFLTTGVTHLLHKSGSPAEPKNYRPITCLSTVYKLLTSILRAKINTHIDKNSIMSASQNGCRNGSRGTKELLLIDMAISQQVRRSRKDLSTCWIDYKKAYDSVPHTWLMRVLELYKIDATLRAFLESCMGQWRTVLRYPGCRQIQGNDEPVWIKRGIFQGDSLSPLWFCLALNPLSTLLEDSGLGYRLRRGGQVISHLLYMDDLKLFAPNKLQLMELLKVTETFSSAIRMEFGVDKCAVMYVKQGEIMESEGIQLSDSIHLRTLSSTESYKYLGMSEALGINVTDMKQSLKERFFGRLNKVLHSLLSGGNKVRAFNGWVMPVLMYSFGVLKWTQTELDALDRRVRTLLTANRMHHPRSSVMRLYIPRKCGGRGFLNAKSLHNREMCSLREYFLKVEVGMHRDVVAVDKGLTPLSMAKENWRKPEVLTTDDRKEVWQGKELHGRFYRALHGPDVDFLASVSWLRFGDLFGETAGFVCAIMDEVMLTNNYRKYIMKDGTVDVCRACHRPGESIRHIISGCSRLANGEYLHRHNQVARIIHQQLALKYKLVESEVPYYKYVPDPVLEKDHVTLYWDQSIITDRTIVANKPDIVVIDRSARRVMIVDVTIPHDENLVKAEKEKQIK

SEQ ID NO: 29740 - protein, 962 aa, Mesoligia furuncula
MHKKNRALVCALDSQLKNFFESSEDLVDTHSILYCAAVAACRLANVKFPSCDGATRPKPAVPAWQRRIERRIDGTRVLIGKLYCFREGNTRPRVMRFVRRAFSGTGISLREYISRVTERIDFLKQKVCAWASRIRRYKRRVDRYTQNRMFQSDERWMYRAWERPEQNVTDVYRPDDATTSAFWCSIWSVPVCHTEAGWMRDVERVCESVPEMKTVLITPSDVAKAVRPLPNWKSPGPDGLHNFWLKWLISSHTCLASQFQSSLESGSLPQFLTTGVTHLLHKSGSPAEPKNYRPITCLSTVYKLLTSILRAKINTHIESNLIMSASQNGCRNGSRGTKELLLIDMAISQQVCRSRKDLSTCWIDYKKAYDSVPHTWLMKVLELYEIDATLRTFLESCMRQWNTVLRYPGCRQIQGNDEPVWIKRGIFQGDSLCPLWFCLALNPLSTLLEDSGLGYRLRRDGQVISHLLYMDDLKLFAPNKLRLMELLKVTETFSSAIRMEFGVDKCAVMHVKRGEIMESEGIQLSDSISLRSLSSSESYKYLGMSEALGINDADMKQSLKERFFCRLKKVLISLLSGGNKVRAFNGWVMPVLMYSFGILKWTQTELDALVRRVRTLLTANRMHHPRSSVMRLYIPRKSGGRGFLNAKALHNREVCSLREYFLKAEVGKHRDVVTVDKGLTPLSMAKENWRKPVVLSTYDRKKVWQNKELHGRFYRALHEPGVDFLASISLLRFGDLFGETEGFVCAIMDEVILTNNYRRHIMRDGTVDVCRACHRPGESIRHIISGCSRLANGEYLHRHNQVARIIHQQLALKYKLVDSEVPYYKYVPDPVLENDHVTLYWDRSIITDRTIVANKPDIVVIDRLARRTMIVDVTIPHDGNLVKAEKEKQIKYLDLAHEVVDMWNVSSAIIVPIVVSANGLMAESLDQHLSRLSLGGWIKGLIQKAVLLDTARIVRRFLSLEP

SEQ ID NO: 29741 - protein, 868 aa, Griposia aprilina
MRFVRRAFSGTGISPREYMSHATERIDFLKQKVCAWASRIRRYKRRVDRYTQNRMFQSDERWVYRAWERPEQNVTDECRPDDATTSTFWRSIWSVPVCHVEADWMRDVGRACETVPEMDAVLITPLDVARAVRPLPNWKSPGPDGLHNFWLKWLISSHACLASQYQSSLESGSLPQFLTTGVTHLLHKSGSPTDPKNYRPITCLSTVYKLLTSILRAKINTHIESNSIMSASQNGCRNGSRGTKELLLIDMAISQQVRRSRRDLSTCWIDYKKAYDSVPHTWLMRVLELYKIDTTLRTFLRSCMGQWRTVLRYPGCRQIQANDEPVWIKRGIFQGDSLSPLWFCLALNPLSTLLEDSGLGYRLRKDGQVISHLLYMDDLKLFAPNKLQLMELLKVTETFSSTIRMEFGVDKCAVMHVKRGEVMEPEGIQLSDSIHLRSLSSSESYKYLGMSEALGINVADMKQSLRERFFGRLKKVLISLLSGGNKVRAFNGWVMPVLMYSFGILKWTQTELDALDRRVRTLLTANRMHHPRSSVMRLYIPRKCGGRGFLNAKTLHNREVCSLREYFLKAEVGMHRDVVAVDKGFTPLSMAKENWRKPVVLTTDDRKEVWQSKELHGRFYRALHEPGVDFLASVSWLRFGDLFGETEGFVCAIMDEVILTNNYRRHIMKDGTVDMCRACHRPGESIRHIVSGCSRLANGEYLHRHNQVARIIHQQLALKYKLVDSEVPYYKYVPDPVLENDHITLYWDRSIITDRTIVANKPDIVVIDRLARRTMIIDITIPHDENLVKAEKEKQIKYLDLAHEVVEMWNVSSAVIVPIVVSANGLMAKSLDQHLSRLSLDGWVKGLIQKAVLLDTARIVRRFLSLEP

SEQ ID NO: 29742 - protein, 1044 aa, Sesamia nonagrioides
MLDDTVLDRLRNEMQSSRVIAHQSQTAEIPPQPTNYADERSNDRATNVSTQCNEELINALEAAIREYRFTPAELRPRLPRLPIHNRNRALMAALDAQLSDYFDTCEDLTDTHSILYCAAVAACRVAHVKFPSDSRATRPKPVVPAWQHRIERRIGGARALIGKLICFREGNTRPRAMRFVRRAFAGTNISPQNYMARVTERIDFLKQKVYAWANRIRRYKRRVERYTQNRTFQSNERWVYRDWERPEQGVTDTCLPDDDAICSFWRSIWSVPVSHTEGDWARNVERACDPIPEMGAITICPQDVACAVRPLPNWKSPGPDGLHNFWIKWFPRSHARLASQLQTALVSGSLPQFLTTGITHLLHKSGSTAEPKNYRPTTCLPTVYKVLTSILKTKINKHIDSNSIMSASQNGSKSGSRGTKELLLIDMAISQQVRRSRKDLSTCWIDYRKAYDSVPHTWLMRVLELYKVEATLRTFLMSCMRTWRTVLPYPGCRNIQRNSEPIRIERGIFQGDSLSPLWFCLALNPLSTLLEDSGLGYRLRRGGQVISHLLYMDDLKLFAPNNSQLRELLKITETFSSSIRMEFGMDKCAVMHIKRGEIMESLGTQLTDSINLRALSASETYKYLGMLEALGINVTDMKQSLKERFFGRLKKVLNSLLSGGNKVRAFNGWVMPVLMYSFGILKWTQTELDALDQRVRMLLTANRLHHPRSSVMRLYIPRKCGGRGFLNAKTLHNREVCSLRDYFLVTDVGMHRDVVAADKGLTPLSLAKENWRKPVVLDTNDRMEVWKSKELHGRFFRALHGPDVDFQASVAWLRFGDLFGETEGFVFAIMDEVMMTNNYRRFIVKDGTVDICRACHRTGESIRHIISGCSRLANGEYLHRHNLVARIIHQQLALKYNLVESEVPYYRYTPDPVLKNGYITLYWDRSIITDRTIVANKPDIVMVDRLERRAMIVDITIPHDENLVKAEKDKQIKYLDLAHEVVDMWEVDSAIIVPIVVTANGLIAKSLDQHLRRLSLGSWIKGSIQKAVLLDTARIVRKFLSLEP

SEQ ID NO: 29743 - protein, 1199 aa, Mamestra configurata
MLTRAASRRARPPSPDPSLSSASPPPDSRSPMSPAVAVASSSSDEYFSPPTSPTPVRRQRRGRPPRGLGPRGQPAPSRVPATGGCVQRMRWTQSMNENVMRAYYGSTEGGTNLTAYRVRMLSLFQDLEPTVNVSAQRLSDQVRVIQRNHRLDDAALDRLRSEVLNNLIISTPTQTAVQAPVNDAITPRPNNVSHEVDDRVVTVSSQCNDRLRSALEDALREYRSTPTELRPRLPRLPMHKKNRALVCALDSLLQNTFESSESLVDTHSILFCGAVAACRIANVKFPSYDEAIRPKPAAPAWQCRIERRIDEARALIGKLYCFREGNTRPRVMRFVRRAFLGTGISPRDFTSRVTERIDFLKQKVCAWANRIRRYKRRVDRYSQNRMFQSDERWVYRAWERPEQSVMDVCRPDDNTTSTFWRGIWSVPVCHTEGDWLRDVEHVCEAIPEMDTITITPLDVAKAVRPLPNWKSPGPDGLHNFWLKWYSSSHVLLASQFQSSLESGSLPQFLTTGVTHLLHKTGSPAEPKNYRPITCLSTVYKLLTSILRAKINEHIESNSIMSASQNGCRKGSRGTKELLLIDMAISQQVRRSRKDLSTCWIDYKKAYDSVPHTWLMKVLELYKIDATLRTFLESCMRQWKTVLRYPGCRPIQGSDEPVWIKRGIFQGDSLSPLWFCLALNPLSTLLEDSGLGYRLRRGGQAISHLLYMDDLKLFAPNNLRLMELLKVTETFSSAIRMEFGVDKCAVMHVKKGEIMESEGIQLSDSIQVRSLSSTGTYKYLGMSEALGIDGADMKQSLRERFFGRLKKVLNSLLSGGNKVRAFNGWVMPVLMYSYGILKWTQTELDALDRRVRTVLTANRMHHPRSSVMRLYIPRKCGGRGFLNAKTLHNHEVCNLRDFFLKTDVGMHRDVVAVDKGLTPLSMAKENWRKPVILNTDDRKEVWKGKELHGRFYRALHEPDVDFPASVSWLRFGDLFGETEGFVCAIMDEVILTNNYRKYIMKDGTVDVCRACHRPGESIRHIISGCSRLANGEYLHRHNQVARIIHQQLALKYQLVDSEVPYYKYVPDPVLENDHVTLYWDRSIITDRTIVANKPDIVVIDRLARRTMIIDVTIPHDVNLVKAEKEKQIKYLDLAHEVVDMWNVDSAVIVPIVVTANGLFSKSFDDHLSKLSLRGWVKGQIQKAVLLDTARIVRRFLSLEP

SEQ ID NO: 29744 - protein, 1202 aa, Amphipyra berbera
MLTRSRTRTTEQRSARPPPPDSPLSSASQPPELGLPVTPAAAASSSSSDEYFSPPTSPRPVRRQGRGRPPNSLGPRGPPAPSRVLAAGGYVQRMKWTQSINENVMRAYYGSTEGGTNLTAYRVRMLTLFQELEPAINVSAQRLSDQVRVIQRNHRLDDAALDRLRLEVQNSRAIPVPSQTAVHQLINVAPPRSDRVDGDEDDGAVTVSSQYNDRLRSALEDAIRECRANPESRPRLPRLPMHNKNRALVCALDSLLASYFESSEDLGDTHSILYCAAVAACRVANVKFNNSERATRPKLAVPAWQSRIERRIDETRALIGKLICFREGNTRPRVMRFVRRAFSGTGISPREYTSRATERIDFLKQKVCAWASRIRRYKRRVERYTQNRMFQCDQRWVYRAWERPDQSVSGGRLPDDDAMSSFWRSIWSVPVIHTEGDWMRDIERTCESIEEMGEIVISPQDVAGAVRPLPNWKSPGPDGLHNFWIKWLRSSHARLASQFQSSLESGSLPQFLTTGVTHLLHKSGSTAEPKNYRPITCLPTVYKLLTSILRSKINTHIGNNSVLSSSQNGCRNGSRGTKELLLIDTAISQQVRRSQKSLSTCWIDYKKAYDSVPHTWLMRVLELYKINTTLRTFLRSCMGQWRTVLRYPGCQPIRRSGEPIRIERGIFQGDSLSPLWFCLALNPLSTLLEGSGLGYPLRRGGQVVSHLLYMDDLKLFAPTKLQLVDLLKVTETFSNSIRMEFGVDKCAVMHVRRGRIMESEGLQLSDSIHLSPLSANDTYKYLGMSEGLGISEADMKQSLRERFFGRLKKVLKSLLSGGNKVRAFNGWVMPVLMYSFGILKWTQTELDALDRRVRTLLTANRMHHPRSSVMRLYIPRKCGGRGLLNAKTLHNREVCSLREFFLHADAGMHRDVVAVDKGLTPLSLARENWHKPVVLSTNDRREIWQSKELHGRFYRALHGPDVDFLASVSWLRFGDLFGETEGFVCAIMDEVIMTNNYRKYIVKDGTVDICRACHCPGESLRHIISGCSRLANGEYLHRHNQVARIIHQQLALKYNLVESEVPYYRYVPDPVLENGRITLYWDRSIITDRTIVANKPDIVVIDRSERRTMIVDVTIPHDGNLVKAEKDKQIKYLDLAHEVVNMWDVESATTVPIVVTANGLMAKSLDKHLMRLSLGGWIKGLIQKAVLLDTARIVRRFLSLEP

SEQ ID NO: 29745 - protein, 1203 aa, Agrochola circellaris
MLTRSAAHRARLPPPDSPLSSASPPPVPSPIVSAASTPAAVVASSSSDEYFSPPTSPIPVRRQGRGRPPRSLGLRGQPAPSRVPAAGGCVQRMRWTQSMNENVMRAYYGSTEGGTNLTAYRVRMLSLFQELEPTANVSAQRLSDQVRVIQRNHRLDDAALDRLRSEVLSNHIVSTPAQTAAQASSIDAIPPRSNHGVAEDNDRAATVSSQCNVRLRSALEDAFREYRYTPTELRPRLPRLPMHKKNRALVCALDSQLRNYFENSEDLIDTHSILYCAAVAACRLANVKFPNYDGVTRPKPAVPAWQCRIEQRIDGARALIGKLYCFREGNTRPRVMRFVRRAFSGTGISPREYMPRVTERIDFLKQKVCAWASRIRRYKRRVERYTQNRMFQSDERWVYRAWERPEQNVADVCRPDDAATSAFWRSIWSVPVCHAEADWMQDVERVCETIPEMDKIEITPLDIAKAVRPLPNWKSPGPDGLHNFWLKWLFSSHTCLASQFQSSLESGSLPQFLTTGVTHLLHKSGSPAEPKNYRPITCLSTVYKLLTSILRAKINTHIDNNSIMSASQNGCRNGSRGTKELLLIDMAISQQVRRSRKDLSTCWIDYKKAYDSVPHTWLMRVLELYKIDATLRTFLMSCMGQWRTVLRYPGCRQIQGNDEPVWIKRGIFQGDSLSPLWFCLALNPLSTLLEDSGLGYRLRRGGQVISHLLYMDDLKLFAPNKLRLMELLKVTETFSSAIRMEFGVDKCAVMHVKRGEIMESEGTQLSESIHLRSLSSSESYKYLGMSEALGINVADMKQSLKERFFGRLKKVLISLLSGGNKVRAFNGWVMPVLMYSFGILKWTQTELDALDRRVRTLLTANRMHHPRSSVMRLYIPRKCGGRGFLNAKTLHNREVCNLREYFLKAEVGMHRDVVAVDKGLTPLSMAKENWHKPVVLTTDDRKEVWQSKELHGRFYRALHEPGVDFLASVSWLRFGDLFGETEGFVCAIMDEVILTNNYRRYIMKDGTVDVCRACHRPGESIRHIISGCSRLANGEYLHRHNQVARIIHQQLALKYKLVVSEVPYYKYVPDPVLEKDHVTMYWDRSIITDRTIVANKPDIVVIDRLARRAMIVDVTIPHDGNLMKAEKEKQIKYLDLAHEVVDMWNVSSAIIVPIVVTANGLMAESLDQHLSRLSLGGWIKGLIQKAVLLDTARIVRRFLSLQP

SEQ ID NO: 29746 - protein, 962 aa, Eupsilia transversa
MHKKNRALVCALDSQLKNFFESSEDLIDTHSILYCAAVAACRLANVKFPNCDAATRPKPAIPAWQCRIERRVDGARVLIGKLYCFREGNTRPRVMRFVRRAFLGTGISPQEYMSRVTERIDFLKQKVCAWASRIRRYKRRVDRYTQNRMFQSDERWVYRAWERPEQNVADVCRPDDAATSAFWRSIWSVPVCHAEAGWMHGVERVCEAIPEMEAVIITPLDVARAVRPLPNWKSPGPDGLHNFWLKWLISSHTRLASQFQSSLESGSLPQFLTTGVTHLLHKSGSPAEPKNYRPITCLSTVYKLLTSILRAKINSHIDSHSIMSASQNGCRNGSRGTKELLLIDMAISQQVRRSRKDLSTCWIDYKKAYDSVPHTWLMRVLELYKIDATLRTFLMSCMGQWRTVLRYPGCRQIQGNDEPVWIKRGIFQGDSLSPLWFCLALNPLSTLLEESGLGYRLRRGGQVISHLLYMDDLKLFAHNKLRLMELLKVTETFSSAIRMEFGVDKCAVMHVKRGEIMESEGTQLSDSIHLRSLSSTESYKYLGMSEALGINVADMKQALKERFFGRLKKVLISLLSGGNKVRAFNGWVMPVLMYSFGILKWTQTELDALDRRVRTLLTANRMHHPRSSVMRLYIPRKCGGRGFLNAKTLHNREVCSLREYFLKTEEGMHRDVVAVDKGLTPLSMAKENWRKPVVLTTDDRKEVWQSKELHGRFYRVLHEPGVDFLASVSWLRFGDLFGETEGFVCAIMDEVILTNNYRRHIMKDGTVDVCRACHRPGESIRHIISGCSRLANGEYLHRHNQVARIIHQQLALKYKLADSEVPYYKYVPDPVLENDHVTLYWDRSIITDRTIVANKPDIVVIDRLARRAMIVDVTIPHDENLVKAEKEKQIKYLDLAHEVVDMWNVSSAIIVPIVVTANGLMAESLDQHLLRLSLGGWIKGLIQKAVLLDTARIVRRFLSLQP

SEQ ID NO: 29747 - protein, 1050 aa, Amphipyra tragopoginis
MLDDTVLDRLRSEVQSSPVISPSSQVLEQQQNLAAALPRPNRADEEDDDRVANVSTQCNDELRSALEDAMREYRYTRSDLRPRIPRLPMHGKNRALVGALDSLLSNYFDGSEDLGDTHSILYCAAVAACRVAHVKFTDNERATRPKNSVPAWQCRIERRISEARALIGKLVCFREGNTRPRVMRFVRRAFSGTDVSPREYMSRVTERIDFLKQKVYAWANRIRRYRRRVDRYTQNRLFQSDERWVYRTWERPDQRVSDTRLPDNDVMNTFWRNIWSVPVAHTEGDWMQEVQRACEPIQEMGDIIISPQDVASAVRPMSNWKSPGPDGLHNFWLKWLRSSHARLASQFQSSLESGSLPQFLTTGVTHLLHKSGSTAEPKNYRPITCLPTVYKVLTSILRTKINNHIDNNSIMSASQNGCRNGSRGTKELLLIDMAISQQVRRSRKDLSTCWIDYKKAYDSVPHTWLMRVLELYKVNTTLCAFLTSCMGQWRTVLRYPGCRQIQGIGEPIRIERGIFQGDSLSPLWFCLALNPLSTLLEGSGLGYRLRRGGQVISHLLYMDDLKLFAPNNLRLLELLKVTETFSNSIRMEFGVDKCAVMHVKRGRIMESVGTQLSDSIQLRSLSSTETYKYLGMSEALGVNETDMKQSLKERFFGRLKKVFNSLLSGGNKVRAFNGWVMPVLMYSFGILKWTQTELDALDRRVRSLLTANRMHHPRSPVMRLYIPRKCGGRGFLNAKTLHNREVCSLREYFSQADVGMHRDVVAVDKGFTPLSLAKENWRKPVVLDTNGRREVWRSKELHGRFYRALHGPDVDFLASVAWLRFGDLFGETEGFVCAIMDEVMMTNNYRKYIVKDGTVDICRACHCPGESIRHIVSGCSRLANGEYLHRHNLVARIIHQQLALKYNLVDAEVPYYRYVPDPVLENGHVTLYWDRSIITDRTIVANKPDIVVIDRSERLTMIVDITVPHDENLVKAEKDKEIKYQDLAHEVVAMWDVDSAIVVPIVVTANGLIAKSLDQHLKRLSLGSWIKGLIQKAVLLDTARIVRKFLSLRP

SEQ ID NO: 29748 - protein, 1198 aa, Amphipyra tragopoginis
MLTRARSKAARPPPPDSPLSSASQPPELGPPVTPAAAAASSSSDEYFSPPTSPRPVRRQGRHRPPTSLGPRGPPAPSRVLAAGGCVQRMKWTQSINENVMRAYYGSTEGGTNLTAYRVRMLTLFQELEPAINVSAQRLSDQVRVIQRNHRLDDAALDRLRLEVQNSRVTPFPSQTAVHEVNINIVPPRSDYVDGDMDDRAVTVSSQYNDQLRSALEDAIREYRANPELRPRLPRLPMHNKNRALVCALDSLLSSYFESSEDLGDTHSILYCAAVAACRVANVKFNNSERATRPKPAVPAWQCRIERRIDGARALIGKLICFREGNTRPRVMRFVRRAFSGTGISPREYMSQVTERIDFLKQKVCAWASRIRRYKRRVERYTQNRMFQCDQRWVYRAWERPDQGVSDGRLPDDDAMNSFWRSIWSVPVIHTEGDWMRDIERACEPIEEMGEILISPQDVASAARPLPNWKSPGPDGLHNFWIKWLRSSHARLATQFQSSLESGSLPQFFTTGVTHLLHKSGSTAEPKNYRPITCLPTVYKLLTSILRSKINTHIENNSVMSSAQNGCRNGSRGTKELLLIDMAISQQVRRSRKNLSTCWIDYKKAYDSVPHTWLMRVLELYKINATLRAFLMSCMGQWRTVLRYPGCRPIRESGEPIRIERGIFQGDSLSPLWFCLALNPLSTLLEGSGLGYPLRRGGQVVSHLLYMDDLKLFAPTKLQLVELLKVTETFSNSIRMEFGVDKCAVMHVRRGGIMESEGLQLSDSIHLRPLSANDTYKYLGMSEGLGISEADMKRSLRERFFGRLKKVLKSLLSGGNKVRAFNGWVMPVLMYSFGILKWTQTELDALDRRVRSLLTANRMHHPRSSVMRLYIPRKCGGRGLLNAKTLHNREVCSLREYFLHADAGMHRDVVAVDKGLTPLNLAKENWRKPVVLSTNDRREVWQSKELHGRFYRALHGPDVDFQASVSWLRFGDLFGETEGFVCAIMDEVIMTNNYRKYIVKDGTVDICRACHCPGESLRHIISGCSRLANGEYLHRHNQVARIIHQQLALKYNLVESEVPYYKYVPDPVLENGHITLYWDRSIITDRTIVANKPDIVVIDRSERRTVIVDVTIPHDENLVKAEKDKQIKYLDLAHEVVNMWDVDSATIVPIVVTANGLMAKSLDQHLKRLSLGGWIKGLIQKAVLLDTARIVRRFLSLEP

SEQ ID NO: 29749 - protein, 1076 aa, Amphipyra tragopoginis
MISYDYIIIIIIRMVSDQVRVIQRGHMLDDTVLDRLRSEVQRSPVISPSSQVLEQQQNLAAALPRPNRADEEDDDRAANVSTQCNDELRSALEDAMREYRYTRSDLRPRIPRLPMHRKNRALVCALDSLLSNYFDGSEDLGDTHSILYCAAVAACRVAHVKFTDNERATRPKNAVPAWQCRIERRISEARTLIGKLVCFREGNTRPRVMRFVRRAFSGTDVSPREYMSRVTERIDFLKQKVYAWANRIRRYRRRVDRYTQNRLFQSDERWVYRTWERPDQRVGDTRLPDNDVMNTFWRNIWSVPVAHTEGDWMQEVQRACEPIQEMGDIIISPQDVASAVRPMSNWKSPGPDGLHNFWLKWLRSSHARLASQFQSSLESGSLPQFLTTGVTHLLHKSGSTAEPKNYRPITCLPTVYKVLTSILRTKINNHIDNNSIMSASQNGCRNGSRGTKELLLIDMAISQQVRRSRKDLSTCWIDYKKAYDSVPHAWLMRVLELYKVNTTLCAFLTSCMGQWRTVLRYPGCRQIQGIGEPIRIERGIFQGDSLSPLWFCLALNPLSTLLEGSGLGYRLRRGGQVISHLLYMDDLKLFAPNNLRLLELLKVTETFSNSIRMEFGVDKCAVMHVKRGRIMESVGTQLSDSIQLRSLSSTETYKYLGMSEALGVNETDMKQSLKERFFGRLKKVFNSLLSGGNKVRAFNGWVMPVLMYSFGILKWTQTELDALDRRVRSLLTANRMHHPRSSVMRLYIPRKCGGRGFLNAKTLHNREVCSLREYFSQADVGMHRDVVAVDKGFTPLSLAKENWRKPVVLDTNGRREVWRSKELHGRFYRALHGPDVDFLASVAWLRFGDLFGETEGFVCAIMDEVMMTNNYRKYIVKDGTVDICRACHCPGESIRHIVSGCSRLANGEYLHRHNLVARIIHQQLALKYNLVDAEVPYYRYVPDPVLENGHVTLYWDRSIITDRTIVANKPDIVVIDRSERLTMIVDITVPHDENLVKAEKDKEIKYQDLAHEVVAMWDVDSAIIVPIVVTANGLIAKSLDQHLKRLSLGSWIKGLIQKAVLLDTARIVRKFLSLRP

SEQ ID NO: 29750 - protein, 1200 aa, Amphipyra tragopoginis
MLTRSKARARDAHPPPPDSSPSSASQQQGLDPASPAAAVASSSSDEYYSPPSSPPPARRRGGTRPPGGLGLRGPLASDRVPAPGGIVPRMKWTQKMNESVMRAYYGATEGGTNLTAYRSRMLSLFQVLEPAVNVSAQRLSDQVRVIQRGHMLDDTVLDRLRSEVQSSPVISPSSQVLEQQQNLAAALPRPNRADEEDDDRVANVSTQCNDELRSALEDAMREYRYTRSDLRPRIPRLPMHRKNRALVCALDSLLSNYFDGSEDLGDTHSILYCAAVAACRVAHVKFTDNERATRPKNAVPAWQCRIERRISEARALIGKLVCFREGNTRPRVMRFVRRAFSGTDVSPREYMSRVTERIDFLKQKVCAWANRIRRYRRRVDRYTQNRLFQSDERRVYRTWERPDQRVSDTRLPDNDVMNTFWRNIWSVPVAHTEGDWMQEVQRACEPIQEMGDIIISPQDVASAVRPMSNWKSPGPDGLHNFWLKWLRSSHARLASQFQSSLESGSLPQFLTTGVTHLLHKSGSTAEPKNYRPITCLPTVYKVLTSILRTKINNHIDNNSIMSASQNGCRNGSRGTKELLLIDMAISQQVRRSRKDLSTCWIDYKKAYDSVPHTWLMRVLELYKVNTTLCAFLTSCMGQWRTVLRYPGCRQIQGIGEPIRIERGIFQGDSLSPLWFCLALNPLSTLLEGSGLGYRLRRGGQVISHLLYMDDLKLFAPNNLRLLELLKVTETFSNSIRMEFGVDKCAVMHVKRGRIMESVGTQLSDSIQLRSLSSTETYKYLGMSEALGVNETDMKQSLKERFFGRLKKVFNSLLSGGNKVRAFNGWVMPVLMYSFGILKWTQTELDALDRRVRSLLTANRMHHPRSSVMRLYIPRKCGGRGFLNAKTLHNREVCSLREYFSQADVGMHRDVVAVDKGFTPLSLAKENWRKPVVLDTNGRREVWRSKELHGRFYRALHGPDVDFLASVAWLRFGDLFGETEGFVCAIMDEVMMTNNYRKYIVKDGTVDICRACHCPGESIRHIVSGCSRLANGEYLHRHNLVARIIHQQLALKYNLVDAEVPYYKYVPDPVLENGHVTLYWDRSIITDRTIVANKPDIVVIDRSERLTMIVDITVPHDENLVKAEKDKEIKYQDLAHEVVAMWDVDSAIIVPIAVTANGLIAKSLDQHLKRLSLGSWIKGLIQKAVLLDTARIVRKFLSLRP

SEQ ID NO: 29751 - protein, 1202 aa, Amphipyra tragopoginis
MLTRSRARARDNQAHLPPPDSSPSSASQQQGLNPASPAAAVASSSSDEYYSPPSSPPPARRRGGTRPPVGLGLRGPLASDGVPAPGGIVPRMKWTQKMNESVMRAYYGATEGGTNLTAYRSRMLSLFQVLEPAVNVSAQRLSDQVRVIQRGHMLDDTVLDRLRSEVQSSPVISPSSQVLEQQQNLAAALPRPNRADEEDDDRAANVSTQCNDELRSALEDAMREYRYTRSDLRPRIPRLPMHRKNRALVCALDSLLSNYFDGSEDLGDTHSILYCAAVAACRVAHVKFTDNERATRPKNAVPAWQCRIERRISEARALIGKLVCFREGNTRPRVMRFVRRAFSGTDVSPREYMSRVTERIDFLKQKVYAWANRIRRYRRRVDRYTQNRLFQSDERWVYRTWERPDQRVGDTRLPDNDVMNTFWRNIWSVPVAHTEGDWMQEVQRACEPIQEMGDIIISPQDVASAVRPMSNWKSPGPDGLHNFWLKWLRSSHARLASQFQSSLESGSLPQFLTTGVTHLLHKSGSTAEPKNYRPITCLPTVYKVLTSILRTKINNHIDNNSIMSASQNGCRNGSRGTKELLLIDMAISQQVRRSRKDLSTCWIDYKKAYDSVPHTWLMRVLELYKVNTTLCAFLTSCMGQWRTVLRYPGCRQIQGIGEPIRIERGIFQGDSLSPLWFCLALNPLSTLLEGSGLGYRLRRGGQVISHLLYMDDLKLFAPNNLRLLELLKVTETFSNSIRMEFGVDKCAVMHVKRGRIMESVGTQLSDSIQLRSLSSTETYKYLGMSEALGVNETDMKQSLKERFFGRLKKVFNSLLSGGNKVRAFNGWVMPVLMYSFGILKWTQTELDALDRRVRSLLTANRMHHPRSSVMRLYIPRKCGGRGFLNAKTLHNREVCSLREYFSQADVGMHRDVVAVDKGFTPLSLAKENWRKPVVLDTNGRREVWRSKELHGRFYRALHGPDVDFLASVAWLRYGDLFGETEGFVCAIMDEVMMTNNYRKYVVKDGTVDICRACHCPGESIRHVVSGCSRLANGEYLHRHNLVARIIHQQLALKYNLVDAEVPYYRYVPDPVLENGHVTLYWDRSIITDRTIVANKPDIVVIDRSERLTMIVDITVPHDENLVKAEKDKEIKYQDLAHEVVAMWDVDSAIIVPIVVTANGLIAKSLDQHLKRLSLGSWIKGLIQKAVLLDTARIVRKFLSLRP

SEQ ID NO: 29752 - protein, 1110 aa, Amphipyra tragopoginis
MRWTQSINENVMRAYYGATEGGINLTAYRDRMLSLFQVLEPAINVSTQRLSDQVRVIQRNRRLDDTVLERLRSEVQNNRTVTTPLQAAEQPQLPAVSPRPIHVDEAGDGEVIVVSNQCSDELRSALEGAILEYRATPPELKPRLPRLPMHKKNRALVCALDSLLSNYFDGSEDLGDTHSILYCAAIAACRVANVKLTENERATRPKPAVPAWQYRIERRIDGARALIGKLICFREGNTRPRVMRFVRRAFSGTDISPRDYMSRVTERIDFLKQKVYAWANRIRRYKRRVERYTQNRTFQSDQRRVYRAWERSVPGVGDMRLPDDDAMSSFWRSIWSVPVAHAEGDWTRDIERACEPIPEMGEITISPQDVATAARPLPNWKSPGPDGLHNFWLKWLRSSHARLASQFQSSLESGSLPQFLTTGVTHLLYKSGSAAEPKNYRPITCLPTVYKLLTSILRVKISNHIDNNSILSPSQNGCRNGSRGTKELLLIDMTISQQVRRSRKDVSICWIDYKKAYDSVPHTWLMRVLELYKINTTLRTFLMSCMGQWRTGLRYPGCRQIRGRGEPIRIERGIFQGDSLSPLWFCLALNPLSTLLEGTGLGYRLRREGQVISHLLYMDDLKLFAPTNLQLMELLKVTENFSNSIRMEFGVDKCAVMHVKRGRIMESEGIQLSNSIQLRSLSPTETYKYLGMSEALGIREADMRQSLMERFFGRLNKVLKSLLSGGNKVRAFNGWVMPVLKYSFGILKWTQTDLDALDRRVRALLTTHRMHHPRSSVMRLYIPRKCGGRGFLNAKTLHNREVCSLREYFLQAEGEMHRDVVAVDGGLTPLALAKENWRKPTVLSTNDREEVWQSKELHGRFYRALHGPDVDFSASVSWLRFGDLFGETEGFVCAIMDEVMMTNNYRKYIVKDGTVDICRACHRPGESIRHIISGCSRLANGEYLHRHNLVARIIHQQLALKYNLVESEVPYYRYVPDPVLENGHATLYWDRSIITDRTIVANKPDIVVIDRVERRTMIVDITVPHDENLVKAEKEKQIKYLDLAHEVVSMWDVDSAVIVPIVVTANGLIAKSLDQHLMRLSLGGWIKGLIQKAVLLDTARIVRRFLSLEP

SEQ ID NO: 29753 - protein, 1133 aa, Amphipyra tragopoginis
MLTRSRAKTLQRTHPTPSASSLSSASQPPEPASIVSDVTPAAAVASSSSDEYFSPATSPSPPPARRRGRGRPPTCLGPRGPPASDRVPAPGGSVQRMRWTQSMNENCMRAYFGATEGGTNLTAYRGRMLSLFRTLEPAVNVSAQRLSDQVRVIQRDHRLDDAALGRLRDEMQNSHATPPPSQIRTQPLVPPAVPLQPNHADEEEQDRAISAGTQYSEIMRSALEDALREFRSTPPELRPRLPRLPMHNKNRALVCALDSLLSNVLESSKDIGDTHSILYCAAVAACRVAHVKFPNDNRATRPKSTVPAWQCRIERRIDEARVLIGKLTCFREGNIRPRVMRFVRRAFSGTDVSPGEYVSRVTERIDFLKQKVYAWANRIRRYRRRVDRYTQNRIFQSDQRWVYRTWERPDQGVSDTHLPDNDVMNAFWRNIWSVPVTHTEGDWMQEVQRACEPIQEMGAVTIGPQDVTSAVRPMPNWKSPGPDGLHNFWIKWLRSSHARLASQFQSSLESGSLPSFLTTGVTHLLFKSGSTAEPKNYRPITCLPTVYKLLTSILRAKINNHIDNNAIMSDSQNGCRNGSRGTKELLLIDMAISQQVRRSRKDLSTCWIDYKKAYDSVPHTWLMRVLELYKINATLRTFLMSCMGQWRTVLHYPGCRQIQGNGELIRIERGIFQGDSLSPLWFCLALNPLSTLLEGSGLGYRLRRGGQVISHLLYMDDLKLFAPNNLQLVELLKVTETFSNSIRMEFGVDKCAVMHVKRGRIMESVGTQLSDAIHLRSLSSTETYKYLGMSEALGINEADMKQSLKERFFGRLIKVLKSLLSGGNKVRAFNGWVMPVLMYSFGILRWTQTELDALDRRVRTLLTAYRMHHPRSSVMRLYIPRKCGGRGFLNAKTLHNREVCSLREYFSQADVGMHRDVVAVDKGLTPLSLAKENWRKPVVLDTNGRREIWRSKELHGRFYRALHGPDVDFLASVAWLRFGDLFGETEGFVCAIMDEVMMTNNYRKYIVKDGTVDICRACHCPGESIRHIVSGCSRLANGEYLHRHNLVARIIHQQLALKYNLVDTEVPYYKYVPDPVLENGHVTLYWDRSIITDRTIVANKPDIVVIDRLERRTVIVDIAVPHDENLVKAENDK

SEQ ID NO: 29754 - protein, 934 aa, Mythimna impura
MFKILYCGAVAACRLANINFPNIDGTIRPKPAVPAWQYRIERRIDGARVLIGKLHCFREGNTRPRVMHFVRRAFLGTGISPQEYMSRVTERIDFLKQKVCAWASRIRRYKRRVDRYSQNRMFQSDERWVYRAWERPEQNVIDGRRPDDFATITFWRNIWSVPVSHTEGDWMRDVERVCEAIPEMEKVVITPADVAKAVRPLPNWKSPGPDGLQNFWLKWFSNSHAPLASQFQSTLESGSLPEYLTTGVTHLLHKTGNPVEPKNYRPITCLSTVYKLLTSILRAKINRHIENNLIMSASQNGCRNGSRGTKELLLIDMAISQQARRSRKDLSTCWIDYKKAYDSVPHTWLMRVLELYKVDMTLRTFLESCMRQWKTVLRYPGCRPIQGNDEPIRIKRGIFQGDSLSPLWFCLALNPLSTLLEESGLGYRLRRGGQAISHLLYMDDLKLFAPSNLQLMELLKVTETFSSAIRMEFGVDKCAAMHVKRGEIMESEGIQLPDSIHLRSLSSTETYRYLGMSEALGINNADMKQSLKERFFGRLKKVLNSLLSGGNKVRAFNGWVMPVLMYSFGILKWTQTELDALDRRVRTLLTANRMHHPRSSVMRLYISRKCGGRGFLNAKTLHNREVCSLREYFLKTDVGMHRDVVAVDKGLTPLSMAKEDWRKPVILTTDDRKEIWKGKELHGRFYRALHEPDVDFLASVAWLRFSDLFGETEGFICAIMDEVILTNNYRRYIMKDGTVDVCRACHRPGESIRHIISGCSRLANGEYLHRHNQVARIIHQQLALKYNLVDSEVPYYKYVPDPVLENDHVTLYWDRSIITDRTIVANKPDIVVIDRLARRAVIVDVTIPHDENLVKAEKEKQIKYLDLAHEVVDMWNVDSAVIVPMVVTANGLIAKSFDDHLSKLSLRGWIKGLIQKAVLLDTARIVRRFLSLEP

SEQ ID NO: 29755 - protein, 1195 aa, Notodonta dromedarius
MLTRLQARLRPPGLLPRSASQPLGLIQDETLTTAAASSESDEYFSPPSSAPPVRRRRGRPPGNLGTLGQPALSRILVPGGVVRRMRWTSSINENVMRAYYEATEGGTNLTAYRGRMLSLFQILEPAVNVSAQRLSDQVRVIQRGHMLADSLLDQLRSEALSSRVVPVASSQPVSLPVTTVESWPAVGGDTDRNDTASEVSTQYDGILRSTLEDVVREYRFVPPHVRPRLPRLPMHNKNRALVCSTNMLLSSYFESSENLMDTHSLLYCTAIAVCRVARVKFPDTDVATRPKPAVPAWQCRIERRINEARIFIGKLSCFRAGNTRPRVMRFVRRIFSGTNVGPQEYLNHVTERIDFLKQKVYAWANRIRRYKARVDRYYQNSMFQRDQRWVYRSWEQSSQRDGEMHRPDDDDMIKFWRNIWSVPMTHSEGGWIGDVEQVCEPIQEMDKITIEAKDVANAVRSLPNWKAPGPDGLHNFWLKWLRSSHACLASQFQSALESRLLPEFITTGVTHLLHKSGSTTDPKNYRPITCLPTIYKTLTSVLREKICRHIDDNSIMSASQNGCRSGARGTKELLLIDMAICQQVRRNRKDLSTCWIDYKKAYDSVPHTWLMRVLELYKVNSTLRAFLATCMGQWRTVLLYPGSRRILGNGDPIRIERGIFQGDSLSPLWFCLAMNPLSTLLGGSGLGFRLRRGGQVISHLLYMDDLKLFAPTELQLTGLLKVTETFSKSIRMEFGVDKCAVMHVKKGRMVESRCIRLSDSIQLRSLSGTETYRYLGMSQALGICETDMKQSVRERFLGRLKKVLKSVLSGGNKVRAYNGWVMPVLIYSFGILKWSQTELDTLDRTVRTLLTAHRMHHPRSSVMRLYIPRKCGGRGFLNAKTLHNREVFNLREYFLHAVGEMHADVVTVDNGLTPLSLGKENWRRPVVLTTDDRMAVWQGKELHGRYYRALHGPDVDLAASVAWLQFGDLFGETEGFVCAIMDEVVMTNNYRRFIIRDGTIDICRACHRPGESLRHIISGCSRLANGEYLHRHNQVARIVHQQLALKYRLVASEVPYYRYVPEPVLEDGHITLYWDRSIITDRTIVANRPDIVLIDRQERHAMLVDVTVPHDGNLVKAEKDKECKYLDLVHEVVDMWDIDTAIIVPIVVSAHGLIGKSLDKHLKRLSLGTWIKGQIQKAVLLETARIVRKFLSLEP

SEQ ID NO: 29756 - protein, 1106 aa, Limenitis camilla
MKWTQCINENVMRAYYGSTEGGTNLTAYRDRMLSLFQKLEPSINVSAQRLSDQVRIILRNHRLNDTVLERIRSEVHDSRVIPSSIQATLPGPSPPSPNQRDEEEDDTTITAGKKYDELLRSALEDAIREYRYTSDEIRPRLPRLPMHKKNRALVCTLDSLLPMYFESSEDLKDTHSILFCAAVAVCRVAHVKLVNTETTRPKPDVAAWQSRIERRIDETRVLIGKLYSFREGNTRPRVMRFVRRAFSGTEICPPEYMARVTERIDTLKQKIYAWANRIRRYRRRVDRYSQNRMFQKDQKWVYRIWERPDQNVDDIHRPDDDDTNKFWRSIWSVSVDHTEGDWMREIRQTREPLQAMEHISITCKDVADAVRSVPNWKSPGPDGLHNFWLKWLRSSHACLASQFQSALESGSLPQFLTTGITHLLHKSGSTTEPKNYRPITCLPTVYKLLTSILRDKIDSHITKNAIMSVSQNGCRNRSRGTKELLLIDMTISQQVRRSRKDLSTCWIDYKKAYDSVPHGWLMRVLELYKVDATLCAFLGSCMRQWRTVLRYPGCRPIQGNNEPIRIKRGIFQGDSLSPLWFCLALNPLSTLLENSGLGYRLRRGGQVISHLLYMDDLKLFVPTKLQLIELLKITKTFSNSIRMEFGVDKCAVMHVKRGKIEESEGIQLSDSVNLRSLSADETYKYLGMSEALGIIEIDMKQSVRERFLARLRKVLKSLLSGGNKVRAYNGWVMPILMYSFGILKWTQKELDDLDRKVRALLTTYRMHHPRSSVMRLYIPRKCGGRGFLNAKTLHNREVCNLREYFLQTDEGMHRDVVAMDKGLTPLSLAKENWRKPIVLSTDNRKEVWKSKELHGRFYRALHGDEVDFKASVSWLRFGNLFGETEGFVCAIMDEVIMTRNYRRYIVRDGTVDICRACHSSGESLRHIISGCPRLANGEYLHRHNQVAKIIHQQLALRYGLVESEVPYYRYAPDPVLENGHVTLYWDRTIITDRTIIANKPDIVVIDRSERCTMIVDVTIPHDGNLVKAEKDKQMKYLDLAHEIVDMWDVDSAVVVPIVVTANGLIAKSLDQHLKRLALDGWVKGLMQKAVLLDTARIVRKFLSLEP

SEQ ID NO: 29757 - protein, 905 aa, Cosmia trapezina
MHKKNRALVCALDSQLKDFFESSEDLVDTHSILYCAAVAACRLANVKFPNCDGADGVTRPKPAIPAWQCRIERRIDGARVLIGKLYCFREGNTRPRVMRFVRRAFSGTGISPPEYMSRVTERIDFLKQKVCAWASRIRRYKRRVDRYTQNRIFQSDERWVYRAWERPEQNVADVCRPDDTITSAFWRSIWSVPVCHAEAGWMQDVEPVCETVPEMEAVLITPLDVARAVRPLPNWKSPGPDGLHNFWIKWLISSHTRLASQFQSSLESGSLPQFLTTGVTHLLHKSGSPAEPKNYRPITCLSTIYKLLTSILRAKINMHIENNSIMSASQNGCRNGSRGTKELLLIDMAISQQVHRSRKDLSTCWIDYKKAYDSVPHTWLMRVLELYKIDATLRTFLGSCMGQWRTVLRYPGCRRIRGNDEPVWIKRGIFQGDSLSPLWFCLALNPLSTLLEDSGLGYRLRRGGQVISHLLYMDDLKLFAPNKLRLMELLKVTETFSSAIRMEFGVDKCAVMHVKRGEIMESEGIQLSDSMHLRSLASSETYKYLGMSEALGINVADMKQSLKERFFGRLKKVLISLLSGGNKVRAFNGWVMPVLMYSFGILKWTQTELDALDRRVRTLLTANRMHHPRSSVMRLYIPRKCGGRGFLNAKTLHNREVCSLREYFLKADVGMHRDVVAVDKGLTPLSMANENWRKPVVLTTDDRKKVWQSKELHGRFYRALHEPGVDFLASVSWLRFGDLFGETEGFVCAIMDEVILTNNYRRHIMRDGTVDVCRACHRPGESIRHIISGCSRLANGEYLHRHNQVARIIHQQLALKYKLVDSEVPYYKYVPDPVLENDHVTLYWDRSIITDRTIVANKPDIVVIDRLARRAMIVDVTIPHDENLVKAEKEKQIKYLDLAHEVVDM

SEQ ID NO: 29758 - protein, 955 aa, Cosmia trapezina
MQSSRVVAPLLQTIVVPPLQCNTSQADGGSDDTAANVSTQCNEELRSALEGAIQKYRFVSPELRPRLPRLPMHNKNRALVAALDSQLSNYFDDCEDLTDTHSILYCAAVAACRVAHVKFANDSRATRPKPAVPAWQCRIERRIGGARTLIGKLICFREGNTRPRVMRFVRRAFSGTDVSPQDYMSRVTERIDFLRQKVYAWANRIRRYKRRVDRYTQNRTFQSDERWVYRGWERPDQGVTDTRLPDDDAMCSFWRSIWSVPVGHTKGDWAREVERACDPIPEMGAITICPQDVVRAVRPLPNWKSPGPDGLHNFWIKWFLGSHARLAAQYQSALQSGSLPQFLTTGITHLLHKSGSTAEPKNYRPITCLATVYKVLTSILRAKINEHIDTNSIMSASQNGSRNGSRGTKELLLIDIAISQQVRRSRKDLSTCWIDYKKAYDSVPHTWLMRVLELYKVDATLRTFLMSCMGQWRTVFRYPGCRNIQRNSEPIRIERGIFRGDSLSPLWFCLALNPLSTLLEDSGLGYRLRRGSQVISHLLYMDDLKLFAPNNLQLMELLKVTETFSSAIRMEFGVDKCAVMHVKRGEIVESVGTKLSDSINLRTLSASETYKYLGMSEALGINVADMKQSLKERFFGRLKKVFNSLLSGGNKVRAFNGWVMPVLMYSFGILKWTQTELDALDRRVRTLLTAYRMHHPRSSVMRLYIPRKCGGRGFLNAKTLHNREICSLREYFLEADVGMHRDVVAVDKGLTPFSLAKENWRKPVVLDTNDRMEVWQSKELHGRFFRALHGPDVDLLASVAWLRSGDLFGETEGFVCAIMDEVIMTNNYRRFIVKDGTVDICRACHRPGESIRHIISGCSRLANEEYLHRHNLVARIIHQQLALKYSLVESEVPYYRYVPDPVLENGNITLYWDRSIITDRTIVANKPDIVVVDRTERRAMIVDITVPHDGNVRKD

SEQ ID NO: 29759 - protein, 1104 aa, Abrostola tripartita
MKWSQQINENVMRAYYGSTEGGTNLTAYRDRMLALFQDLEPAVNVSAQRLSDQVRVILRNHRLDDATLDRLRSEVHSSPVTCRPVHVVVPPIGPPPCDMEADDRATTVSTQYNDILRSTLEDTIREYRVSPPGLRPRLPRLPMHNKNKAMISALDSLLSSYFEGSEDLCDPHSILYCAAATACRVANVKCFDSSTATRPKPAVPAWQCRIESRIAEARTLIGKLTAFREGNIRPRVMHFVRRAFAGVDINPREYATRATERIDFYKQKVYAWASRIRRYKRRVDRFSQNRIFNQDQRWVYRNWERSAQGVSDGHLPDDDVTNAFWRSIWSVPVNHTEGSWMLDVEQSCESIPEMGTITISPQDVASAVRPMSNWKSPGPDGLHNFWIKWLRSSHGCLASQFQSAIEVGSLPQFLTTGSTHLLHKTGSTTDPKNFRPITCLPTIYKLLTSILRAKITKHIDDNNIMSASQNGCKNGSRGTKELLLIDMTICQQVRRSKKDLSTCWIDYKKAYDSVPHTWLMRVLELYKIDTTLRTFLLSCMRQWRTVLHYPGCRDIQQDGEPIRIERGIFQGDSLSPLWFCLALNPLSTLLENSGLGYSLRRRSQVISHLLYMDDLKLFAPSRFQLIKLLKITEAFSNSIRMEFGVDKCAVMHVKRGGIIESQGIQLSDSINLRSLSATETYKYLGMSEALGINVVDMKQSLKERFFGRLNKVLKSLLSGGNKVRAFNGWVMPTLMYSFGILKWTQTELDALDRRVRTLLTSNRMHHPRSSVMRLYIPRKCGGRGFLNAKTLHNREVCSLREYFLRAEVGMHREVVAVDKGLTPLFLAKENWCKPVVLSVNDRRDVWQSKELHGRFYKALHGPNVDLLSSVSWLRFGDLFGETEGFVCAIMDEVIMTNNYRKYILKNGTVDICRACHRPGESLRHIMSGCSRLANGEYLHRHNQVARIIHQQLALKYKLVDSEMPYYRYVPDPVLENDHITLYWDRSIITDRTIVANKPDIVVIDRLERRAMIVDITIPHDENLVKAERDKQIKYLDLAHEVVDMWEVDSAIIVPIVVSANGLMAKSLDQHLKRLTLGGWVKGLMQKAVLLDTARIVRRFLSLEP

SEQ ID NO: 29760 - protein, 1194 aa, Autographa gamma
MLTRSRARKPARPPSPDPSPSSASQLPDHVPAPAPAVASSSSDEYYSPPTSPTPVRRQGRRRPPCSLAPSGQPASNRAPAPGGDVRRMKWTLSINENVMRAYYGATEGGTNLTAYRARMLSLFQALEPGVSVSAQRLSDQVRVIQRNHRLDDSTLDRLRSEIQHSPATSTSPPVAAPVSGAPLTAPSDGEEEDGAITVSTQCNELIRSTLEDAIRVYRRSPPDQRPRLPRLPMHNRNKAIMGALDSLLPVYFESSEDLRDTHSILYCAALTACRVANVAMCHSNIATRPKPAVPAWQCRIEQRVAEARTLIAKLKAFKQGNSRPRVMRFVRRAYAGTDISPSEFIARVTERIDLFKQKVCAWANRIRRYKRRAERFHLNRMFQKDQRWVHRLWERPVSAMDGGCLPDGDATNSFWRSIWSVPVTHSEGGWMREVEQVCEPIQEMGAITISPQDVANAVRPMANWKTPGPDGLQNFWLKWLRSSHSSLASQFQSAVESASLPQFLTTGSTHLLHKTGSATDPKNYRPITCLPTVYKLLTSILRAKINEHIVNFSIMSASQNGCRSGSRGTKELLLIDTAICQQVRRSKKDLSTCWIDYKKAYDSVPHTWLMRVLELYKINTTLRAFLMSCMGQWSTVLHYPGCRDIQQGGEPIRIERGIFQGDSLSPLWFCLALNPLSTLLENSGLGYSLRRGGQVISHLLYMDDLKLFATSGFQLMELLKITESFSNSISMEFGVDKCAVMHVKRGGIVESQGIQLSDSINLRSLSATDTYKYLGMSEALGINVADVKQSLQARFFGRLNKVLKSVLSGGNRVRAFNGWVMPVLMYSFGVLKWTQTELDALDRRVRTLLTANRMHHPRSSVMRLYIPRKCGGRGFLNAKTLHNREVCNLREYFLQVDVGMHRDVVVVDKGFTPLSLGKENWHKPVVLSVKDREDVWQSKELHGRYYRTLHGPDVDFLASVAWLRFGDLFGETEGFVCAIMDEVIMTNNYRKYIIKDGTVDICRACHCPGESLRHIISGCSRLANGEYLHRHNQVARIIHQQLALRYKLVESEVPYYRYVPDPVLENGRVTLYWDRSIITDRTIVANKPDIVVIDRSERRAIIVDVTIPHDENLVKAEKEKQLKYLDLAHEVVDMWEVDSAMIVPIVVTANGIIAKSLDQHLKRLSLGTWVKGLIQKAVLLDTARIVRRFLSLES

SEQ ID NO: 29761 - protein, 1202 aa, Griposia aprilina
MLTRSARTRARPPPPDASLSSASPPPVSSPIVSAVTTPVAVVASSSSDEYFSPPTSPTPVRRQGRGRPPRSLGLRGHPAPSRVPAAGGCVQRMKWTQSMNENVMRAYYRSTEGGTNLTAYRDRMLSLFQELEPTINVSAQRLSDQVRVIQRSHRLDDAALDRLRSELNNHIISTPAQTAVQASSIDEIQPRSNHGVEVEDDRVASVSSQCNARLRSALEDAFREYRSTPTELRPRLPRLPMHKKNRALVCALDSQLKNVFESSENLIDTHSILYCAAVAACRLANVRFPNCDGATRPKPAVPAWQCRIKRRIDGARVLIGKLHCFREGNNRPRVMRFVRRAFSGTGISPREYMSHATERIDFLKQKVCAWASRIRRYKRRVDRYTQNRMFQSDERWVYRAWERPEQNVTDECRPDDATTSTFWRSIWSVPVCHVEADWMRDVGRACETVPEMDAVLITPLDVARAVRPLPNWKSPGPDGLHNFWLKWLISSHACLASQYQSSLESGSLPQFLTTGVTHLLHKSGSPTDPKNYRPITCLSTVYKLLTSILRAKINTHIESNSIMSASQNGCRNGSRGTKELLLIDMAISQQVRRSRRDLSTCWIDYKKAYDSVPHTWLMRVLELYKIDTTLRTFLRSCMGQWRTVLRYPGCRQIQANDEPVWIKRGIFQGDSLSPLWFCLALNPLSTLLEDSGLGYRLRKDGQVISHLLYMDDLKLFAPNKLQLMELLKVTETFSSTIRMEFGVDKCAVMHVKRGEVMEPEGIQLSDSIHLRSLSSSESYKYLGMSEALGINVADMKQSLRERFFGRLKKVLISLLSGGNKVRAFNGWVMPVLMYSFGILKWTQTELDALDRRVRTLLTANRMHHPRSSVMRLYIPRKCGGRGFLNAKTLHNREVCSLREYFLKAEVGMHRDVVAVDKGFTPLSMAKENWRKPVVLTTDDRKEVWQSKELHGRFYRALHEPGVDFLASVSWLRFGDLFGETEGFVCAIMDEVILTNNYRRHIMKDGTVDMCRACHRPGESIRHIVSGCSRLANGEYLHRHNQVARIIHQQLALKYKLVDSEVPYYKYVPDPVLENDHITLYWDRSIITDRTIVANKPDIVVIDRLARRTMIIDITIPHDENLVKAEKEKQIKYLDLAHEVVEMWNVSSAVIVPIVVSANGLMAKSLDQHLSRLSLDGWVKGLIQKAVLLDTARIVRRFLSLEP

SEQ ID NO: 29762 - protein, 1202 aa, Griposia aprilina
MLTRSARTRARPPPPDSSLSSASLPPVSSPIVSAVTTPVAVVASSSSDEYFSPPTSPTPVRRQGRGRPPRSLGLRGHPAPSRVPAAGGCVQRMKWTQSMNENVMRAYYRSTEGGTNLTAYRDRMLSLFQELEPTINVSAQRLSDQVRVIQRSHRLDDAALDRLRSELNNHIISTPAQTAVQASTIDEIQPRSNHGVEVEDDRVASVSSQCNARLRSALEDAFREYRSTPTELRPRLPRLPMHKKNRALVCALDSQLKNVFESSENLIDTHSILYCAAVAACRLANVRFPNCDGATRPKPAVPAWQCRIERRIDGARVLIGKLHCFREGNNRPRVMRFVRRAFSGTGISPREYMSHATERIDFLKQKVCAWASRIRRYKRRVDRYTQNRMFQSDERWVYRAWERPEQNVTDECRPDDATTSTFWRSIWSVPVCHVEADWMRDVGRACETVPEMDAVLITPLDVARAVRPLPNWKSPGPDGLHNFWLKWLISSHACLASQYQSSLESGSLPQFLTTGVTHLLHKSGSPTDPKNYRPITCLSTVYKLLTSILRAKINAHIESNSIMSASQNGCRNGSRGTKELLLIDMAISQQVRRSRRDLSTCWIDYKKAYDSVPHTWLMRVLELYKIDTTLRTFLRSCMGQWRTVLRYPGCRQIQANDEPVWIKRGIFQGDSLSPLWFCLALNPLSTLLEDSGLGYRLRKDGQVISHLLYMDDLKLFAPNKLQLMELLKVTETFSSTIRMEFGVDKCAVMHVKRGEVMEPEGIQLSDSIHLRSLSSSESYKYLGMSEALGINVADMKQSLRERFFGRLKKVLISLLSGGNKVRAFNGWVMPVLMYSFGILKWTQTELDALDRRVRTLLTANRMHHPRSSVMRLYIPRKCGGRGFLNAKTLHNREVCSLREYFLKAEVGMHRDVVAVDKGFTPLSMAKENWRKPVVLTTDDRKEVWQSKELHGRFYRALHEPGVDFLASVSWLRFGDLFGETEGFVCAIMDEVILTNNYRRHIMKDGTVDMCRACHRPGESIRHIVSGCSRLANGEYLHRHNQVARIIHQQLALKYKLVDSEVPYYKYVPDPVLENDHITLYWDRSIITDRTIVANKPDIVVIDRLARRTMIIDITIPHDENLVKAEKEKQIKYLDLAHEVVEMWNVSSAVIVPIVVSANGLMAKSLDQHLSRLSLDGWVKGLIQKAVLLDTARIVRRFLSLEP

SEQ ID NO: 29763 - protein, 1200 aa, Mythimna ferrago
MLTRSRARRLETHPTTSGSSLNSASQPPGPAPAVSPVIPEAAVASSSSDEYFSPPTTPPPARRRGRGRPPACLGPRGPPASDRVPAAGGSVQRMRWTLSINENVMRSYFGATEGGINLTAYRGRMLSLFQVLEPAVNVSVQRLSDQVRVIQRNRMLDDAVLDRLRLESQSSRVSAATPSAAAQRQPSAAPRPDHVGDADDDAAISVSTQCNERLRGALEDAFREYRSIPPELRPRLPRLPMHKRNRALVCALDSQLSICFDSSEDLADTHSILYCAAVAACRVAHVKFRNCNRATRPAVPAWQCRIERRIGEARALIGKLICFREGNTRPRVMRFVRRAFSGTDISPRDYLPCVTERIDFLKQKIYAWANRIRRYKRRVERYTQNRTFQSNERWVYRAWERPDQGVTDTRLPDDDAMCSFWRSIWSAPVSHTEGDWIREVERACDLLPEMGAITISPQDVARAVRPLPNWKSPGPDGLHNFWLKGFQGSHARLASQFQSALESGSLPQFLTTGITHLLHKSGSTAEPKNYRPITCLPTVYKVLTSILRAKINSHIETNSIMSVSQNGCRNGSRGTKELLLIDIAISQQVRRSRKNLSACWIDYKKAYDSVPHTWLMRVLELYKVDATLRTFLMSCMGQWRTVLHYPGCRQIWENSEPIRIERGIFQGDSLSPLWFCLALNPLSTLLEGSGLGYRLKRGGQVISHLLYMDDLKLFAPNNLQLMELLKITENFSSAIRMDFGVDKCAVIHVKRGEIMESEGIQLSDSIHLRSLSSTETFKYLGMSEALDINTDDMKQSLKERFFGRLNKVLNSLLSGGNKVRAFNGWVMPVLMYSFGILKWTQTELDALDRRVRTLLTANRMHHPRSSVMRLYIPRKCGGRGFLNAKSLHNREVCSLREYFLAVDVGMHRDVVAVDKGLTPLSLANENWRKPLVLDTNDRRKVWQGKELHGRFYRALHGPDVDLLASVSWLRFGDLFGETEGFVFAIMDEVMMTNNYRKYIVKDGTVDICRACHRPGESIRHIISGCSRLANGDYLHRHNLVARIIHQQLALKYNLVESEVPYYRYVPDPVLDNGSITLYWDRSIITDRTIVANKPDIVVIDRLERRTMIVDIAVPHDENLVKAEKDKQIKYLDLAREVVDMWEVDKAIIVPIVVTANGLIAKSLEQHLRRLSLGSWIKGQIQKAVLLDTARIVRRFLSQEP

SEQ ID NO: 29764 - protein, 1200 aa, Mythimna ferrago
MLTRSRARRLETHPTTSGSSLNSASQPPGPAPAVSPVIPEAAVASSSSDEYFSPPTTPPPARRRGRGRPPASLGPRGPPASDRVPAVGGSVQRMRWTSSINENVMRSYFGATEGGINQTAYRGRMLSLFQVLEPAVNVSVQRLSDQVRVIQRNRMLDDAVLDRLRLESQSSRVLAATPSAAAQRQPSAAPRPDHVGDADDDAAISVSTQCNERLRGALEDAFREYRSIPPELRPRLPRLPMHKRNRALVCALDSQLSICFDSSEDLADTHSILYCAAVAACRVAHVKFPNCNRATRPAVPAWQCRIERRIGEARALIGKLICFREGNTRPRVMRFVRRAFSGTDISPRDYLPCVTERIDFLKQKIYAWANRIRRYKRRVERYTQNRTFQSNERWVYRAWERPDQGVTDTRLPDDDAMCSFWRSIWSAPVSHTEGDWIREVERACDLLPEMGAITISPQDVARAVRPLPNWKSPGPDGLHNFWLKWFQGSHARLASQFQSALESGSLPLFLTTGITHLLHKSGSTAEPKNYRPITCLPTVYKVLTSILRAKINSHIETNSIMSVSQNGCRSGSRGTKELLLIDIAISQQVRRSRKNLSACWIDYKKAYDSVPHTWLMRVLELYKVDATLRTFLMSCMGQWRTVLHYPGCRQIWENSEPIRIERGIFQGDSLSALWFCLALNPLSTLLEGSGLGYRLKRGGQVISHLLYMDDLKLFAPNNLQLMELLKVTETFSSAIRMDFDVDKCAVIHVKRGEIMESEGIQLSDSIHLRSLSSTETYKYLGMSEALGINTDDVKQSLKERFFGRLNKVLNSLLSGGNKVRAFNGWVMPVLMYSFGILKWTQTELDALDRRVRTLLTANRMHHPRSSVMRLYIPRKCGGRGFLNAKSLHNREVCSLREYLLAVDVGMHRDVVAVDKGLTPLSLANENWRKPLVVDTNDRREVWQGKELHGRFYRALHGPDVDLLASVSWLRFGDLFGETEGFVFAIMDEVMMTNNYRKYIVKDGTVDICRACHRPGESIRHIISGCSRLANGDYLHRHNLVARIIHQQLALKYNLVESEVPYYRYVPDPVLDNGSITLYWDRSIITDRTIVANKPDIVVIDRLERRTMIVDIAVPHDENLVKAEKDKQIKYLDLAREVVDMWEVDRAIIVPIVVTANGLIAKSLEQHLRRLSLGSWIKGLIQKAVLLDTARIVRRFLSQEP

SEQ ID NO: 29765 - protein, 1203 aa, Agrochola circellaris
MLTRSAAHRARLPPPDSPLSSASPPPVPSPIVSAASTPAAVVASSSSDEYFSPPTSPIPVRRQGRGRPPRSLGLRGQPAPSRVPAAGGCVQRMRWTQSMNENVMRAYYGSTEGGTNLTAYRVRMLSLFQELEPTANVSAQRLSDQVRVIQRNHRLDDAALDRLRSEVLSNHIVSTPAQTAAQASSIDAIPPRSNHGVAEEDDRAATVSSQCNVRLRSALEDAFREYRYTPTELRPRLPRLPMHKKNRALVCALDLQLRNYFENSEDLIDTHSILYCAAVAACRLANVKFPNCDGVTRPKPAVPAWQCRIEQRIDGARALIGKLYCFREGNTRPRVMRFVRRAFLGTGISPREYMPRVTERIDFLKQKVCAWASRIRRYKRRVERYTQNRMFQSDERWVYRAWERPEQNVADVCRPDDAATSAFWRNIWSVPVCHTEADWMRDVERVCETIPEMEKIEITPLDIARAVRPLPNWKSPGPDGLHNFWLKWLISSHTCLASRFQSSLESGSLPQFLTTGVTHLLHKSGSPAEPKNYRPITCLSTVYKLLTSILRAKINTHIDNNSIMSASQNGCRNGSRGTKELLLIDMAISQQVRRSRKDLSTCWIDYKKAYDSVPHTWLMRVLELYKIDATLRTFLMSCMGQWRTVLRYPGFRQIQGNDEPVWIKRGIFQGDSLSPLWFCLALNPLSTLLEDSGLGYRLRRGGQVISHLLYMDDLKLFAPNKLRLMELLKVTETFSSAIRMEFGVDKCAVMHVKRGEIMESEGTQLSESIHLRSLSSSESYKYLGMSEALGINVADMKQSLKERFFGRLKKVLISLLSGGNKVRAFNGWVMPVLMYSFGILKWTQTELDALDRRVRTLLTANRMHHPRSSVMRLYIPRKCGGRGFLNAKTLHNREVCNLREYFLKAEVGMHRDVVAVDKGLTPLSMAKENWHKPVVLTTDDRKEVWQSKELHGRFYRALHEPGVDFLASVSWLRFGDLFGETEGFVCAIMDEVILTNNYRRYIMKDGTVDVCRACHRPGESIRHIISGCCRLANGEYLHRHNQVARIIHQQLALKYKLVVSEVPYYKYVPDPVLENDHVTLYWDRSIITDRTIAANKPDIVVIDRLARRAMIVDVTIPHDGNLVKAEKEKQIKYLDLAHEVVDMWNVSSAIIVPIVVTANGLMAESLDQHLSRLSLGGWIKGLIQKAVLLDTARIVRRFLSLQP

SEQ ID NO: 29766 - protein, 868 aa, Amphipyra tragopoginis
MRFVRRAFSGTDVSPREYISRVTERIDFLKQKVYAWASRIRRYRRRVDRYNQNRMFRSDERWVYRTWERPDQSVGAAHLPDDDATNSFWRNIWSVPVTHTEGDWMRDVERMCEPILDMGAILISPQDVAGAVRPLPNWKSPGPDGLHNFWLKWLRSSHARLASQFQSSLETGTLPQFLTTGVTHLLHKSGSTAEPKNYRPITCLPTVYKVLTSILRTKINNHIDNNSIMSASQNGCRNGSRGTKELLLIDMAISQQVRRSRKDLSTCWIDYKKAFDSVPHTWLMRVLELYKVNTTLRTFLTSCMGQWRTVLHYPGCQQIQGIGEPIRIERSIFQGDSLSPLWFCLALNPLSTLLEGSGLGYRLRRGGQVISHLLFMDDLKLFAPNNLQLLELLKVTETFSNSIRMEFGVDKCAVMHVKRGRIMESVGTQLSDSIHLRSLSSTETYKYLGMSEALGINETDMKQSLRERFYGRLKKVLNSLLSGGNKVRAFNGWVMPVLMYSFGILKWTQTELDALDRRVRTLLTANRMHHPRSSVMRLYIPRKCGGRGFLNAKTLHNREVCSLREYFSQTEVGMHRDVVAVDKGLTPLSLAKENWRKPVVLDTNGRKDVWRSKELHGRFYRALHGPDVDFLASVAWLRFGDLFGETAGFVCAIMDEVMMTNNYRKYVVKDGTVDICRACHCPGESIRHIVSGCSRLANGEYLHRHNLVARIIHQQLALKYNLVDAEVPYYKYVPDPVLENGHVTLYWNRSIITDRTIVANKPDIVVIDRSERLTMIVDITVPHDENLVKAEKDKEIKYQDLAHEVVAMWDVDSAVIVPIVVTANGLIAKSLDQHLKRLSLGGWIKGLIQKAVLLDTARIVRRFLSLRP

SEQ ID NO: 29767 - protein, 1205 aa, Amphipyra tragopoginis
MLTRSRAKTLQRTHPTPSASSLSSASQPPEPASIVSDVTPAAAVASSSSDEYFSPATTPPPARRRGRGRPPACLGPRGPPASDRVPAPGGSVQRMRWTQSMNENCMRAYFGATEGGTNLTAYRGRMLSLFQTLEPAVNVSAQRLSDQVRVIQRDHRLDDAALDRLRDEMQNSHATPPPSQIRTQPLVPPAVPLQPNHADEEEEDRAISAGTQYSEIMRSALEDALREFRSTPPELRPRLPRLPMHNKNRALVCALDSLLSNVLESSEDLGDTHSILYCAAVAACRVAHVKFPNDNRATRPKSTVPAWQCRIERRIDEARVLIGKLTCFREGNRRPRVMRFVRRAFSGTDISPGEYVSRITERIDFLKQKVCAWANRIRRYRRRVDRYTQNRIFQSDQRWVYRTWERSDQGVSDTHLPDNDVMNAFWRNIWSVPVTHTEGDWMQEVQRACEPIQEMGAVTIGPQDVTSAVRPMPNWKSPGPDGLHNFWIKWLRSSHARLASQFQSSLESGSLPSFLTTGVTHLLFKSGSTAEPKNYRPITCLPTVYKLLTSILRAKINNHIDNNAIMSDSQNGCRNGSRGTKELLLIDMAISQQVRRSRKDLSTCWIDYKKAYDSVPHTWLMRVLELYKINATLRAFLMSCMGQWRTVLHYPGCRQIQGNGELIRIERGIFQGDSLSPLWFCLALNPLSTLLEGSGLGYRLRRGGQVISHLLYMDDLKLFAPNNLQLVELLKVTETFSNSIRMEFGVDKCAVMHVQRGRIMESVGTQLSDSIHLRSLSSTETYKYLGMSEALGINEADMKQSLKERFFGRLIKVLKSLLSGGNKVRAFNGWVMPVLMYSFGILRWTQTELDALDRRVRTLLTAYRMHHPRSSVMRLYIPRKCGGRGFLNAKTLHNREVCSLREYFSQADVGMHRDVVAVDKGLTPLSLAKENWRKPVVLDTNGRREVWRSKELHGRFYRALHGPDVDFLASVAWLRFGDLFGETEGFVCAIMDEVMMSNNYRKYVVKDGTVDICRACHCPGESIRHIVSGCSRLANGEYLHRHNLVARIIHQQLALKYNLVDTEVPYYKYVPDPVLENGHVTLYWDRSIITDRTIVANKPDVVVIDRLERRTMIVDIAVPHDENLVKAENDKKIKYLDLAHEVVDMWDVDSAVIVPIVVTANGLIAKSLDQHLMRLSLGSWIKGLIQKAVLLDTARIVRKFLSLEP

SEQ ID NO: 29768 - protein, 1202 aa, Amphipyra tragopoginis
MLTRSRARARDNQAHLPPPDSSPSSASQQQGLNPASPAAAVASSSSDEYYSPPSSPPPARRRGGTRPPVGLGLRGPLASDRVPAPGGIVPRMKWTQKMNESVMRAYYGATEGGTNLTAYRSRMLSLFQVLEPAVNVSAQRLSDQVRVIQRGHMLDDTVLDRLRSEVQSSPVISPSSQVLEQQQNLAAALPRPNRADEEDDDRAANVSTQCNDELRSALEDAMREYRYTRSDLRPRIPRLPMHRKNRALVCALDSLLSNYFDGSEDLGDTHSILYCAAVAACRVAHVKFTDNERATRPKNAVPAWQCRIERRISEARALIGKLVCFREGNTRPRVMRFVRRAFSGTDVSPREYTSRVTERIDFLKQKVYAWANRIRRYRRRVDRYTQNRLFQSDERWVYRTWERPDQRVSDTRLPDNDVMNTFWRNIWSVPVAHTEGDWMQEVQRACEPIQEMGDIIISPQDVASAVRPMSNWKSPGPDGLHNFWLKWLRSSHARLASQFQSSLESGSLPQFLTTGVTHLLHKSGSTAEPKNYRPITCLPTVYKVLTSILRTKINNHIDNNSIMSASQNGCRNGSRGTKELLLIDMAISQQVRRSRKDLSTCWIDYKKAYDSVPHTWLMRVLELYKVNTTLCAFLTSCMGQWRTVLRYPGCRQIQGIGEPIRIERGIFQGDSLSPLWFCLALNPLSTMLEGSGLGYRLRRGGQVISHLLYMDDLKLFAPNNLQLMELLKVTETFSNSIRMEFGVDKCAVMHVKLGRIMESVGTQLSDSVQLRSLSSTETYKYLGMSEALGVNETDMKQSLKERFFGRLKKVFNSLLSGGNKVRAFNGWVMPVLMYSFGILKWTQTELDAMDRRVRSLLTANRMHHPRSSVMRLYIPRKCGGRGFLNAKTLHNREVCSLREYFSQADVGMHRDVVAVDKGFTPLSLAKENWRKPVVLDTNGRREVWRSKELHGRFYRALHGPDVDFLASVAWLRFGDLFGETEGFVCAIMDEVMMTNNYRKYIVKDGTVDICRACHCPGESIRHIVSGCSRLANGEYLHRHNLVARIIHQQLALKYNLVDAEVPYYRYVPDPVLENGHVTLYWDRSIITDRTIVANKPDIVVIDRSERLTMIVDIKVPHDENLVKAEKDKEIKYQDLAHEVVAMWDVDSAIIVPRVVTANGLIAKSLDQHLKRLSLGSWIKGLIQKAVLLDTARIVRKFLSLRP

SEQ ID NO: 29769 - protein, 999 aa, Autographa pulchrina
MTVSTQCSELIRSTLEDAIRDYRTSPPDQRPRLPRLPMHNRNKAIMGALDSLLPIYFESSEDLRDTHSILYCAALTACRVANVAICYSNIAARPKPAVPAWQCRIEQRVAEARTLIAKLIAFKQGNSRPRVMRFVRRAFAGTDISSSEYTARVTERIDLLKQKVCAWASRIRRYKRRVERFYLNRMFQKDQRWVYRAWERPASGVDGGCLPDGDATNSFWRSIWSVPVSHSEGGWMREVEQVCEPIQEMGAITISPQDVANAVRPMANWKTPGPDGLQNFWLKWLRSSHGCLASQFQSAVESASLPQFLTTGSTHLLHKTGSATDPKNYRPITCLPTVYKLLTSILRAKINEHVVSFSIMSASQNGCRSGSRGTKELLLIDTAICQQVRRSKKDLSTCWIDYKKAYDSVPHTWLMRVLELYKINATLRAFLVSCMGQWSTVLHYPGCRDIQQGGEPIRIERGIFQGDSLSPLWFCLALNPLSTLLENSRLGYSLRRGSQVISHLLYMDDLKLFANSGLQLMKLLKITESFSNSIRMEFGVDKCAVMHVKRGGVVESQGIQLSDSINLRSLSATETYKYLGMSEALGINAADVKQSLQARFFGRLNKVLKSVLSGGNKVRAFNGWVMPVLMYSFGVLKWTQTELDALDRRVRTLLTANRMHHPRSSVMRLYIPRKCGGRGFLNAKTLHNREVCNLREYFLQVDVGMHRDVVVVDKGLTPLSLGKENWHKPVVLSVKDREVVWQSKELHGRYYRTLHGSDVDFLASVAWLRFGDLFGETEGFVCAIMDEVIMTNNYRKYIIKDGTVDICRACHCPGESLRHIISGCSRLANGEYLHRHNQVARIIHQQLALRYKLVESEVPYYRYVPDPVLENGRVTLYWDRSIITDRTIVANKPDIVVIDRSERRAIIVDITIPHDENLVKAEKEKQLKYLDLAHEVVDMWEVDSAIIVPIVVTANGIIAKSLDQHLKRLSLGAWVKGLMQKAVLLDTARIVRRFLSLEP

SEQ ID NO: 29770 - protein, 1200 aa, Mythimna impura
MLTRAAARRARHPPPGSPLSSASPPPDLESPVSPAAAVASSSSDEYFSPPTSPTPVRRQRRGRPPKSLGSRGQPAPSRVPAAGGCVQRMRWTQSMNENVMRAYYGSTEGGTNLTAYRDRMLSLFQDLEPTVNVSAQRLSDQVRVIQRNHRLDDATLDRLRSEVLSNQIVSTSIQTQTAATPTTNAISPRSNPNNDDADDRVVTVSSQCNDELRSALEDALREYRTTPTELRPRLPRLPMHKKNRALVCTLDSLLKNNFESSENLVDTHSILYCGAVAACRLANINFPNIDGTIRPKPAVPAWQYRIERRIDGARVLIGKLHCFREGNTRPRVMRFVRRAFLGTGISPQEYMSRVTERIDFLKQKVCAWASRIRRYKRRVDRYSQNRMFQSDERWVYRAWERPEQNVIDGCRPDDFATITFWRNIWSVPVSHTEGDWMRDVERVCEAIPEMEKVVITPADVAKAVRPLPNWKSPGPDGLQNFWLKWFSNSHAPLASQFQSTLESGSLPEYLTTGVTHLLHKTGNPVEPKNYRPITCLSTVYKLLTSILRAKINRHIENNLIMSASQNGCRNGSRGTKELLLIDMAISQQARRSRKDLSTCWIDYKKAYDSVPHTWLMRVLELYKVDMTLRTFLESCMRQWKTVLRYPGCRPIQGNDEPIRIKRGIFQGDSLSPLWFCLALNPLSTLLEESGLGYRLRRGGQAISHLLYMDDLKLFAPSNLQLMELLKVTETFSSAIRMEFGVDKCAAMHVKRGEIMESEGIQLPDSIHLRSLSSTETYRYLGMSEALGINNADMKQSLKERFFGRLKKVLNSLLSGGNKVRAFNGWVMPVLMYSFGILKWTQTELDALDRRVRTLLTANRMHHPRSSVMRLYISRKCGGRGFLNAKTLHNREVCSLREYFLKTDVGMHRDVVAVDKGLTPLSMAKEDWRKPVILTTDDRKEIWKGKELHGRFYRALHEPDVDFLASVAWLRFSDLFGETEGFICAIMDEVILTNNYRRYIMKDGTVDVCRACHRPGESIRHIISGCSRLANGEYLHRHNQVARIIHQQLALKYNLVDSEVPYYKYVPDPVLENDHVTLYWDRSIITDRTIVANKPDIVVIDRLARRAVIVDVTIPHDENLVKAEKEKQIKYLDLAHEVVDMWNVDSAVIVPMVVTANGLIAKSFDDHLSKLSLRGWIKGLIQKAVLLDTARIVRRFLSLEP

SEQ ID NO: 29771 - protein, 1073 aa, Mamestra brassicae
MLSLFQVLEPAVNVSAQRLSDQVRVIQRNRMLDDSVLDRLRMEMCGHVITPPLQTVAPPQSQISSHADEASNDRVTNVSTQCNEELRSALECAIREYRYIPPELRPRLPRLPMHNKTRALVAALDSQLSNYFDDCEDLTDTHSIMYCAAVAACRVAHVKMTNDRVTRPKPAVPAWQCRIERRIGGARALIGKLICFREGNTRPRVMRFVRRAFSGTDISPRDYMSRVTERIDFLKQKVNAWANRIRRYRRRVERYTQNRTFRSNERWVYRVWEQPDHGVTDTRLPDDDAMCSFWRNIWSVPVSHTEGDWIREVERACDPLPEMGAITISPQDVARAVRPLPNWKSPGPDGLHNFWIKWLQRSHARLASQYQSALESGSLPKFLTTGVTHLLHKSGSTAEPKNYRPITCLPTVYKVLTSILRAKINNHINSSNIMSVSQNGCRNGSRGTKELLLIDMAISQQVRRSRKDLSTCWIDYKKAYDSVPHTWLRRVLELYKIDTMLRTFLMSCMGQWRTVLRYPGCRNIQRNSEPVRIERGIFQGDSLSPLWFCLALNPLSTLLENSGLGYRLKRGGQVISHLLYMDDLKLFAPSNLQLMELLKVTETFSSAIRMEFGVDKCAVMHVKRGEIMESVGIQLSDSINLRSLSSTETYKYLGMSEALGINVTDMKQSLKERFFGRLKKVFNSLLSGGNKVRAFNGWVMPVLMYSFGVLKWTQTELDALDRRVRTLLTAYRMHRPRSSVMRLYIPRKCGGRGFLNAKTLHNREICSLREYFLAVDVGIHRDVVAVDKGLTPLSLANENWRKPAVLDTDDRRAVWQSKELHGRYFRALHGPDVDQLASVAWLRFGDLFGETEGFVCAIMDEVIMTNNYRRFIVKDGTVDICRACHRPGESIRHIVSGCSRLANGEYLHRHNLVAKIIHQQLALKYSLVESEVPYYRYAPDPVLDNGNITLYWDRSIITDRTIVANKPDIVVVDRIERRAMIVDITVPHDENLVKAEKDKQIKYIDLAREVVDIWDVDSAIIVPIVVSANGLIATSLDQHLRMLSLGSWIKGLIQKAVLLDTARIVRRFLSLEP

SEQ ID NO: 29772 - protein, 1194 aa, Autographa gamma
MLTRSRARKPARPPSPDPSPSSASQLPDHVPAPAPAVASSSSDEYYSPPTSPTPVRRQGRRRPPCSLAPSGQPASNRAPAPGGDVRRMKWTLSINENVMRAYYGATEGGTNLTAYRARMLSLFQALEPGVSVSAQRLSDQVRVIQRNHRLDDSTLDRLRSEIQHSPATSTSPPVAAPVSGAPLTAPSDGEEEDGAITVSTQCNELIRSTLEDAIRVYRRSPPDQRPRLPRLPMHNRNKAIMGALDSLLPVYFESSEDLRDTHSILYCAALTACRVANVAMCHSNIATRPKPAVPAWQCRIEQRVAEARTLIAKLKAFKQGNSRPRVMRFVRRAYAGTDISPSEFIARVTERIDLFKQRVCAWANRIRRYKRRAERFHLNRMFQKDQRWVHRLWERPVSAMDGGCLPDGDATNSFWRSIWSVPVTHSEGGWMREVEQVCEPIQEMGAITISPQDVANAVRPMASWKTPGPDGLQNFWLKWLRSSHSCLASQFQSAVESASLPQFLTTGSTHLLHKTGSATDPKNYRPITCLPTVYKLLTSILRAKINEHIVNFSIMSASQNGCRSGSRGTKELLLIDTAICQQVRRSKKDLSTCWIDYKKAYDSVPHTWLMRVLDLYKINTTLRAFLMSCMGQWSTVLHYPGCRDIQQGGEPIRIERGIFQGDSLSPLWFCLALNPLSTLLENSGLGYSLRRGGQVISHLLYMDDLKLFATSGFQLMELLKITESFSNSISMEFGVDKCAVMHVKRGGIVESQGIQLSDSINLRSLSATDTYKYLGMSEALGINVADVKQSLQARFFGRLNKVLKSVLSGGNRVRAFNGWVMPVLMYSFGVLKWTQTELDALDRRVRTLLTANRMHHPRSSVMRLYIPRKCGGRGFLNAKTLHNREVCNLREYFLQVDVGMHRDVVVVDKGFTPLSLGKENWHKPVVLSVKDREDVWQSKELHGRYYRTLHGPDVDFLASVAWLRFGDLFGETEGFVCAIMDEVIMTNNYRKYIIKDGTVDICRACHCPGESLRHIISGCSRLANGEYLHRHNQVARIIHQQLALRYKLVESEVPYYRYVPDPVLENGRVTLYWDRSIITDRTIVANKPDIVVIDRSERRAIIVDVTIPHDENLVKAEKEKQLKYLDLAHEVVDMWEVDSAMIVPIVVTANGIIAKSLDQHLKRLSLGTWVKGLIQKAVLLDTARIVRRFLSLES

SEQ ID NO: 29773 - protein, 935 aa, Omphaloscelis lunosa
MQNSFTSNPPPSQNVVQAPAAVPLQANQHEEEEDGRAISADNLCNVELRSTLEDAIREYRFTSPDLRPRLPRLPMNKRNRALVCALDELLPNFTESSANLCDTHSILYCTAVAACRIARVKFPNTDRSVRPKPVAPAWQCRIECRINEARVLIGKLICFREGNTRPRVMRFVRRAFSGTSISPREYVSHVTERIDFLKQKVYTCANRIRRYRRRVDRYTQNRMFQNDERWVYRTWERPTPNQGVTDTRLPNSDAMKAFWQSIWSVPVSHTEGDWMRVVEQACDPIPHMEAISITPLDVARALRPLPNWKSPGPDGLHNFWLKWLQRSHTCLATQFQSSLDTGSLPLFFTTGVTHLLHKSGSTAEPKNYRPITCLPTIYKVLTSILRAKISHHINNNLIMSVSQNGCKNGSRGTKELLLIDMTISQQIRKSRKDLSTCWIDYKKAYDSVPHTWLMRVLELYKIDATLRTFLMSCMQQCRTVLLYPGCRQIRGIDEPIRIERGIFQGDSLSPLWFCLALNPLSTLLEDSGLGYRLRRGGQVISHLLYMDDLKLFAPNNLRLMELLKITETFSSAIRMEFGVDKCAVMQVKRGEIMESVGTQLADSIHLRSLSSTETYKYLGMSEALGINVTDMKQSLKERFFGRLNKVLNSLLSGGNKVRAFNGWVMPVLMYSFGILKWTQTELDALDRKVRTLLTANRMHHPRSSVMRLYIPRKCGGRGFLNAKTLHNREIYSLREYFLQTNVGMHRDVVAVDKGLTPLSLAKENWRKPTVLDTNDRKEIWQGKELHGRFFRALHGPDVDFLTSVSWLRFGDLFGETEGFVCAIMDEVIMTNNYRKYIVKDGTVDICRACHQPGESIRHIVSGCFRLANGEYLHRHNLVARIIHQQLALQYNLIESEVPYYRYVPDPVLENGHTTLYWDRSIITDRTIVAKPISLI

SEQ ID NO: 29774 - protein, 967 aa, Apamea monoglypha
MQSSHVIAPQSQTAAVLPQSNTSHADEGSNDRATNVSIQCNEEFRNALEGAIREYRFMSPELRPRLPRLPMHNKNRALVAVLDAQLSNHFDVCEDLTDTHSILYCAAEAACRVAHVKFSSDSRATRPKPAIPAWQCRIERRIGGARALIGKLICFREGNTRPRVMRFVRRAFSGTDISSQDYLSRVTERIDFLKQKAYAWANRIRRYKRRVERYTQNRTFQSDERWVYRGWERPDQGVANTCLPDDDAVYSLWRSIWSAPVSHTEGDWAREVERACDPIPEMEAITICPQDVARAVRPLPNWKSPGPDGLHNFWIKWFSRSHARLASQFQTALESGSLPQFLTTGVTHLLHKSGSTAEPKNYRPITCLPTVYKVLTSILRAKINKHIDTNSIMSASQNGCRNGSRGTKELLLIDMAINQQVRRSRKDLSTCWIDYKKAYDSVPHTWLMRVLDLYKVDATLRTFLMSCMGQWRTVLRYPGCRNIQRNSEPIRIERGIFQGDSLSPLWFCLALNPLSTLLEDSGLGYRLRRGDQVISHLLYMDDLKLFAPNNLQLMELLKVTETFSSAIRMEFGVDKCAVMHVKRGEIVESVGTQLSDSTNLRALSASESYKYLGMSEALGINVTDMKQSLKERFFGRLKKVLNSLLSGGNKVRAFNSWVMPVLMYSFGILKWTQTELEALDRRVRTLLTANRMHHPRSSVMRLYIPRKCGGRGFLNAKTLHNREICSLREYFLETDVGMHRDVVAVDKGLTPLSLAKENWRKTVVLDTNDRMEVWQCKELHGRFYRALHGPDVDLLASVAWLRFGDLFGETEGFVCAIMVEVMMTNNIRRFIVKNGTVDICRPCHRPGESIRHIISGCSRLANGEYLHRHNLVARIIHQQLALKYSLVESEVPYYRYVPDPVLENGNITLYWDRSIITDRTIVANKPDIVVVDRSERRAMIVDITVPHDENLVKAEKDKQIKYLDLAR

SEQ ID NO: 29775 - protein, 1093 aa, Furcula furcula
MLTRNRAHPRPPDSSPRSASQPLGPSADGSLAAVASSGSDEYFSPPTSPPPVRRRRGRPPRVLGSLEQPAPNRVLAPGGVVRRMRWTSSINENVMRAYYEATERGTNLTAYRLRMLSLFQALEPAVNVSAQRLSDQVRAIQRGHMLDDAVLDRLRSEVQGSRVAPCIPSSQAVAPAVNIVPAPRPATNSDDHRDDMTTDVSTNLNTQLRSTLEDVVREYRIMPLNLRPRLPRLPMHKRNRALVCALDSLLSSYFDSSEDLADAHSLLYCAAMTACRVARVKFPSTDAATRPRPAVPAWQFRIECRIGESRVLIGKLNCFREGNTRPRVMRFVRRAFSGTGIDPREYLSRVTERIDFLKQKVCAWANRIRRYKARVDRYSQNNMFQRDQRWVYRSWERSSQIEGDGRRPDDSAMTTFWRNIWSVPVTHSEGDWMKDVEQICEPLPEMGAITIRPQDVADAVRPMPNWKAPGPDGLHNFWLKWIRSSHICLASLFQSALESGSLPEFMTMGITHLLHKTSSTTDPKNYRPITCLPTVYKTLTSILRAKIYRHVEDNSIMSASQNGCRSGARGTKELLLIDMAICQQARRNRKDLSTCWIDYKKAYDSVPHTWLMRVLELYKVNPTLRTFLASCMRQWRTVLLYPGSRQILGNGDPIRIERGIFQGDSLSPLWFCLALNPLSTLLRGSGLGCRLRRGGQVISHLLYMDDLKLFAPTELQLMGLLKVTETFSNSISMEFGVDKCAVMHVKRGRMVESRSVQLLDTTDLRTLSATETYKYLGMSQALGINETDMKQSLRERFLGRLRKVLKSLLSGGNRVRAYNGWVMPVLMYSFGILKWTQTELDTLDRTVRTLLTTYRMHHPRSSVMRLYIPRKCGGRGFLNAKTLHNREICNLREYFLHCGGVMHTDVVAVDNGLTPLSLAKGNWRKPVVLTTGNREAVWQSKELHGRFYRALHGPDVDFSASVAWLRFGDLFGETEGFVCAIMDEVVMTNNYRKYILRDGTIDICRACHRPGESLRHIISGCSRLANGEYLHRHNQVARIIHQQLALKYRLVMSEVPYWFRYIPVVCTGTSSGGWPYHVILGSIYHHRQDYCCQ

SEQ ID NO: 29776 - protein, 1202 aa, Amphipyra berbera
MLTRSRTRTTEQRSARPPPPDSPLSSASQPPELGLPVTPAAAASSSSSDEYFSPPTSPRPVRRQGRGRPPNSLGPRGPPAPSRVLAAGGYVQRMKWTQSINENVMRAYYGSTEGGTNLTAYRVRMLTLFQELEPAINVSAQRLSDQVRVIQRNHRLDDAALDRLRLEVQNSRAIPVPSQTAVHQLINVAPPRSDRVDGDEDDGAVTVSSQYNDRLRSALEDAIRECRANPESRPRLPRLPMHNKNRALVCALDSLLASYFESSEDLGDTHSILYCAAVAACRVANVKFNNSERATRPKLAVPAWQCRIERRIDETRALIGKLICFREGNTRPRVMRFVRRAFSGTGISPREYTSRATERIDFLKQKVCAWASRIRRYKRRVERYTQNRMFQCDQRWVYRAWERPDQSVSGGRLPDDDAMSSFWRSIWSVPVIHTEGDWMRDIERTCESIEEMGEIVISPQDVAGAVRPLPNWKSPGPDGLHNFWIKWLRSSHARLASQFQSSLESGSLPQFLTTGVTHLLHKSGSTAEPKNYRPITCLPTVYKLLTSILRSKINTHIGNNSVLSSSQNGCRNGSRGTKELLLIDTAISQQVRRSQKSLSTCWIDYKKAYDSVPHTWLMRVLELYKINTTLRTFLRSCMGQWRTVLRYPGCQPIRRSGEPIRIERGIFQGDSLSPLWFCLALNPLSTLLEGSGLGYPLRRGGQVVSHLLYMDDLKLFAPTKLQLVDLLKVTETFSNSIRMEFGVDKCAVMHVRRGRIMESEGLQLSDFIHLSPLSANDTYKYLGMSEGLGISEADMKQSLRERFFGRLKKVLKSLLSGGNKVRAFNGWVMPVLMYSFGILKWTQTELDALDRRVRTLLTANRMHHPRSSVMRLYIPRKCGGRGLLNAKTLHNREVCSLREFFLHADAGMHRDVVAVDKGLTPLSLARENWRKPVVLSTNDRREIWQSKELHGRFYRALHGPDVDFLASVSWLRFGDLFGETEGFVCAIMDEVIMTNNYRKYIVKDGTVDICRACHCPGESLRHIISGCSRLANGEYLHRHNQVARIIHQQLALKYNLVESEVPYYRYVPDPVLENGRITLYWDRSIITDRTIVANKPDIVVIDRSERRTMIVDVTIPHDGNLVKAEKDKQIKYLDLAHEVVNMWDVESATIVPIVVTANGLMAKSLDKHLMRLSLGGWIKGLIQKAVLLDTARIVRRFLSLEP

SEQ ID NO: 29777 - protein, 1207 aa, Amphipyra berbera
MLTRSRAKALSETTRPRSSAPSLSSASQSPDSSIVSDVTPAAAVASSSSDEFFSPPTSPLPPPVRRRGRGRPPASIGPRGPPTSDRVPAPGGSVQRMRWTLTMNENCMRAYFGATEGGTNLTAYRGRMLSLFQVLEPTINVSAQRLSNQVRVIQRDHRLTDAALDRLRSEVQSNRIISLQSQTAAQPQTPTVVPPLHIHADEESDDRVTNVSTQCNEQLRSALELAIREYRFTPPNIRPRIPRLPMHRKNRALMCALDSLLSSYFDNSGNLEDTHSILYCAAVAACRVAHAKFDNNDRATRPKPAVPAWQCRIERRINEARALIGKLICFREGNTRPRVMRFVRRAFSGTDINPRDYLSRVTERIDFLKQKVYAWANRIRRYKRRVERYTQNRMFHSDERWVYRTWERPDHDVNDTHPPDNDVMNTFWRNIWSMPVTHTEGDWMHEVQRACEPIEEMGDITIVPQDVTSAVRPMANWKSPGPDGLHNFWIKWLRSSHARLASQFQSSLESGSLPEFLTTGVTHLLHKSGSTAEPKNYRPITCLLTVYKLLTSILKAKINSHIINNSIMSVSQNGCKNRSRGTKELLLIDMAISQQVRRSRKDLSTCWIDYKKAYDSVPHTWLMRVLELYKVNTTLCAFLTSCMGQWRTVLHYPGCRQIQGRGEPIRIERGIFQGDSLSLLWFCLALNPLSTLLEDSGLGYRLRRGGQVISHLLYMDDLKLFAPNNLQLVKLLKVTETFSNSIRMEFGVDKCAIMHVKRGGIMESVGTQLSDSIHLRSLSSTETYKYLGMSEALGINETDMKQSLRERFYGRLKKVLKSLLSGGNKVHAFNGWVMPVLMYSFGILKWTQTELDALDRRVRTLLTAYRMHHPRSSVMRLYIPRKCGGRGFLNAKTLHNREVCSLREYFLHADVGMHRDVVAVDKGFTPLPLAKENWRKPIVLDTNGRREVWQSKELHGRFYRALHGPDVDFLASVAWLRFGDLFGETEGFVCAIMDEVILTNNYRKYIVKDGTVDICQACHCPGESIRHIISGCSRLANGEYLHRHNLVARIIHQQLALKYNLVDAEVPYYKYVPDPVLENGHITLYWDRSIITDRTIVANKPDIVVIDRSERLTMIVDVTVPHDENLVKAEKDKEIKYQDLAHEVVAMWEVDSAVIVPIVVTANGLIAKSLDQHLMRLSLGSWVRGLIQKAVLLDTARIVRKFLSLRP

SEQ ID NO: 29778 - protein, 1003 aa, Noctua janthe
MLSLFQVLEPIVNVSAQRLSDQVRVIQRNHMLDDAALDRLRSEVLSNRIVLTPAQTAVQASAIDATPPRSNPAVVEEDDRVAMVSSQCNDRLRSALEDALREYRSTPTKLRPRLPRLPMHNKNRALVCALDSQLKNIFESSENLVDTHSILYCGAVAACRLANVKFPNDDVAIRPKPAVPTWQRRIECRIDEARVLIGKLHCFREGNTRPRVMRFVRRAFSGTGISPQEYMSRVTERIDFLKQKVYAWANRIRRYKRRVDRYSQNRIFQNDERWVYRAWERPEQNMTDVCRPDDAATSSFWRSIWSVPVCHTEADWMRDVERACEPIPEMEPILITPIDIARAVRPLPNWKSPGPDGLHNFWLKWLSSSHTCLASQFQSSLESGSLPQFLTTGVTHLLHKSGSPAEPKNYRPITCLSTVYKLLTSILRVKINTHIDKNFIMSASQNGCRNGSRGTKELLLIDMAISQQVRRSRKDLLTCWIDYKKAYDSVPHTWLMRVLELYKIDATLRAFLESCMGQWRTVLRYPGCRQIQGNDEPVWIKRGIFQGDSLSPLWFCLALNPLSTLLEDSGLGYRLRRGGQVISHLLYMDDLKLFAPNKLRLMELLKVTETFSNAIRMEFGVDKCAVMYVKRGEIMESEGIQLSDSIHLRSLSSSESYKYLGMSESFGINVTDMKQSLRERFFGRLNKVLNSLLSGGNKVRAFNGWVMPVLMYSFGVLKWTQTELDALDRRVRTLLTANRMHHPRSSVMRLYIPRKCGDRGFLNVKTLHNREICSLREYFLKTEVGMHRDVIAVDKGLTPLSMAKENWRKPVVLTTDDRKEVWQGKELHGRFYRALHGPDVDFLASVSWLRFGDLFGETEGFVCAIMDEVMLTNNYRKYIMKDGTVDVCRACHRPGESIRLIISGCSRLANGEYLHRHNQVARIIHQQLALKYKLVESEVPYYKYVPDPVLEKDHVTLYWDRSIITDRTIVANKPDIVVIDRLARRVMIVDVTIPHDENLVKAE

SEQ ID NO: 29779 - protein, 1200 aa, Mythimna ferrago
MLTRSRARRLETHPTTSGSSLNSASQPPGPAPAVSPVIPEAAVASSSSDEYFSPPTTPPPARRRGRGRPPASLGPRGPPASDRVPAVGGSVQRMRWTSSINENVMRSYFGATEGGINLTAYRGRMLSLFQVLEPAVNVSVQRLSDQVRVIQRNRMLDDAVLDRLRLESQSSRVSAATPSAAAQCQPSAAPRPDHVGDADDDAAISVSTQCNERLRGALEDAFREYRSIPPELRPRLPRLPMHKRNRALVCALDSQLSICFDSSEDLADTHSILYCAAVAACRVAHVKFPNCNRATRPAVPAWQCRIERRIGEARALIGKLICFREGNTRPRVMRFVRRAFSGTDISPRDYLPCVTERIDFLKQKMYAWANRIRRYKRRVERYTQNRTFQSNERWVYRAWERPDQGVTDTRLPDDDAMCSFWRSIWSAPVSHTEGDWIREVERACDLLPEMGAITISPQDVARAVRPLPNWKSPVPDGLHNFWLKWFQGSHARLASQFQSALESGSLPQFLTTGITHLLHKSGSTAEPKNYRPITCLPTVYKVLTSILRAKINSHIETNSIMSVSQNGCRNGSRGTKELLLIDIAISQQVRRSRKNLSACWIDYKKAYDSVPHTWLMRVLELYKVDATLRTFLMSCMGQWRTVLHYPGCRQIWENSEPIRIERGIFQGDSLSPLWFCLALNPLSTLLEGFGLGYRLKRGGQVISHLLYMDDLKLFAPNNLQLIELLKVTETFSSAIRMDFGVDKCAVIHVKRGEIMESEGIQLSDSIHLRSLSSTETYKYLGMSEALGINTDDVKQSLKERFFGRLNKVLNSLLSGGNKVRAFNGWVMPVLMYSFGILKWTQTELDALDRRVRTLLTANRMHHPRSSVMRLYIPRKCGGRGFLNAKSLHNREVCSLREYFLAVDVGMHRDVVAVDKGLTPLSLANENWRKPLVLDTNDRREVWQGKELHGRFYRALHGPDVDLLASVSWLRFGDLFGETEGFVFAIMDEVMMTNNYRKYIVKDGTVDICRACHRPGESIRHIISGCSRLANGDYLHRHNLVARIIHQQLALKYNLVESEVPYYRYVPDPVLDNGSITLYWDRSIITDRTIVANKPDIVVIDRLERRTMIVDIAVPHDENLVKAEKDKQIKYLDLAREVVDMWEVDRAIIVPIVVTANGLIAKSLEQHLRRLSLGSWIKGLIQKAVLLDTARIVRRFLSQEP

SEQ ID NO: 29780 - protein, 1162 aa, Eilema depressum
MLTRSQARKNASAPVTSPDSSLSSAAQPSPTEPAASSSSSSDEFFSPPTSPTPVRRPGRGRPPASLEPRRPPASNRAPAAGGNVRRMRWTTSINENVMRAYFAATGGGTNLTAYRDRMLLVFQGLEPTLNVSAQRLSDQVRAIQRCHLLDSSVLERIRSDLQNSDVIPPPPQAPLLTPRVQGFTQVTEPDSGDGELDNVAFSVSTQYNDLIRNTLECAIRDYRSMHYQIRPRLPRLPVHKRNIALVCALDSLLPIYLDNSENLGDTHSILYCAAIAACRVAGIRFPESNTTTRPNSGKPRWQCRIECRIAEARALIGKLICFRSGNTRPRVMRFVNRAFSGTGISPRDYAARVIERIDFLKQKVYAWANRLKRYKKRCDRYTLNRTFQRDERWVYRSWERPDLVDDVHLPDIDATNTFWRNIWSVPVAHTEGDWMREVKRSCEAIETMEPVIITEDDIACVVRSLPNWKAAGPDGLHNFWLKWLRSSHVRLASQFQSALESGSLPNFMTTGVTHLLFKSGSAVDPRNYRPITCLPTVYKLLTSVLRVKITNHITGNSILSYSQNGCRSGARGTKEHLIIDAAINQQVRRNRKDMATCWIDYKKAYDSVPHTWLLRVLELYKVDTTLCTFLKACMGQWRTALRYPGCRHIRDDGELIKIERGIFQGDSLSPLWFCLALNPLSTLLEDSGLGYCLRRGGQVISHLLYMDDLKLYAPNSLRLMELLKVTETFSNSIRMEFEVDKCAVMQVKRGGIVESEGIELSDSTKLRSLSANDTYKYLGMSQALGINEAGMKQSLRERFFCRLKKVLNSLLSGGNKVRAYNDWVIPVLTYSFGILRWTQTELEALDRRVRTLLTAYRMHHPRSSVMRLYIPRKCGGRGFLNVKNLHNREIYNLREYFLKVDVDVHRDVVAVDNGLTSLALAKENWRKPAILSIDDRKEVWRSKELHGRFYRALYGPDIDLKASVSWLRFGDLFGETEGFVCAITDEVVMTNNYRRYILKDGTVDICRACHRPGESLRHIISGCSRLANGEYLHRHNLVARIIHQQLALKYKLVDSEVPYYRYVPDPVLDDGRVTLYWDRSIITDRTILANKPDIVVIDRSERRAIIVDITIPHDENLVKAEKDKQIKYLDLAREVVDMWAVDSAIVVPIVVSAHGLIAKRTS

SEQ ID NO: 29781 - protein, 1132 aa, Eupsilia transversa
MGLRGQPAPSRVPAAGGCVQRMRWTQSMNENVMRAYYGSTEGGINLTAYRVRMLSLFQELEPTVNVSAQRLSDQVRVIQRNHRLDDAELDRLRSEVLSNHIIPSPAQTAELATPSNVIPPRSNRGLEQEDDRVATVSSQCNDRLRNALEDAFREYRYTPTELRPRLPRLPMHKKNRALVCALDSQLKNFFESSEDLIDTHSILYCAAVAAGRLANVKFPNCDAATRPKPAVPAWQCRIERRIDGARVLIGKLYCFREGNTRPRVMRFVRRAFSGTGISPQEYMSRVTERIDFLKQKVCAWASRIRRYKRRVDRYTQNRMFQSDERWVYRAWERPEQNVADVCRPDDAATSAFWRSIWSVPVCHAEAGWMHGVERVCEAIPEMEAVIITPLDVARAVRPLPNWKSPGPDGLHTFWLKWLISSHTRLASQFQSSLESGSLPQFLTTGVTHLLHKSGSSAEPKNYRPITCLSTVYKLLTSILRAKINSHIDSHSIMSASQNGCRNGSRGTKELLLIDMAISQQVRRSRKDLSTCWIDYKKAYDSVPHTWLMRVLELYKIDATLRTFLMSCMGQWRTVLRYPGCRQIQGNDEPVWIKRGIFQGDSLSPLWFCLALNPLSTLLEESGLGYRLRRGGQVISHLLYMDDLKLFAHNKLRLMELLKVTETFSSAIRMEFGVDKCAVMHVKRGEIMESEGTQLSDSIHLRSLSPTESYKYLGMSEALGINVADMKQALKERFFGRLKKVLISLLSGGNKVRAFNGWVMPVLMYSFGILKWTQTELDALDRRVRTLLTANRMHHPRSSVMRLYIPRKCGGRGFLNAKTLHNREVCSLREYFLKTEEGMHRDVVAVDKGLTPLSMAKENWRKPVVLTTDDRKEVWQSKELHGRFYRVLHEPGVDFLASVSWLRFGDLFGETEGFVCAIMDEVILTNNYRRHIMKDGTVDVCRACHRPGESIRHIISGCSRLANGEYLHRHNQVARIIHQQLALKYKLADSEVPYYKYAPDPVLENDHVTLYWDRSIITDRTIVANKPDIVVIDRLARRAMIVDVTIPHDENLVKAEKEKQIKYLDLAHEVVDMWNVSSAIIVPIVVTANGLMAESLDQHLLRLSLGGWIKGLIQKAVLLDTARIVRRFLSLQP

SEQ ID NO: 29782 - protein, 1206 aa, Amphipyra tragopoginis
MLTRARARAREDNAHPPPPDSSLSSASQPPESSPTVSAVTPAAAVASSSSDEYFSPPTSPPPARRRGGRRPPDRLGPRGPLASDRVPAPGGKVPRMKWTQKINESVMRAYYGATEGGTNLTAYRGQMLSLFQVLEPAVNVSAQRLSDQVRVIQRGHMLDDTVLDRLRSEVQGSPVISPSLQVLDEPQNSAATLPRPNHAGEEDDDRATNVSTQCNEKLRSTLEDAMREYRFIRPDLRPRIPRLPMHRKNRALVCALDSLLSNYFDGSEDLGDTHSILYCAAVAACRVAHIKFTDNERATRPKNAVPAWQCRIERRIAEARALIGKLVCFREGNTRPRVMRFVRRAFLGTDVSPREYMSRVTERIDFLKQKVCAWANRIRRYRRRVDRYTQNRLFQSDERWVYRTWERPDQCVSDTRLPDNDVMNAFWRNIWSVPVTHTEGDWMQEVQRACEPIQEMGDIIISPQDVASAVRPMSNWKSPGPDGLHNFWLKWLRSSHARLASQFQSSLESGSLPQFLTTGITHLLHKSGSTAEPKNYRPITCLPTVYKVLTSILRAKINNHIDNNSIMSASQNGCRNGSRGTKELLLIDMAISQQVRRSRKDLWTCWIDYKKAYDSVPHTWLMRVLELYKINTTLCAFLTSCMRQWRTVLRYPGCRQIQGIGEPIRIERGIFQGDSLSPLWFCLALNPLSTLLEESGLGYRLRRGGQVISHLLYMDDLKLFAPNNLQLLKLLKVTETFSNSIRMEFGVDKCAVMHVKRGRIMESVGTQLSDSIQLRSLSSTETYKYLGMSEALGVNETDMKQSLKERFFGRLKKVFNSLLSGGNKVRAFNGWVMPVLMYSFGILKWTQTELDALNRRVRSLLTANRMHHPRSSVMRLYIPRKCGGRGFLNAKTLHNREVCSLREYFSQADVGMHRDVVAVDKGFTPLSLAKENWRKPVVLDTNGRREVWRSKELHGRFYRALHGPDVDFLASVAWLRFGDLFGETEGFVCAIMDEVMMTNNYRKYIVKDGTVDICRACHCPGESIRHIVSGCSRLANGEYLHRHNLVARIIHQQLALKYNLVDAEVPYYKYVPDPVLENGHITLYWDRSIITDRTIVANKPDIVVIDRSERLTMIVDITVPHDENLVKAEKDKEIKYQDLAHEVVAMWDVDSAIIVPIVVTANGLIAKSLDQHLKRLSLGSWIKGLMQKAVLLDTARIVRRFLSLRP

SEQ ID NO: 29783 - protein, 1106 aa, Amphipyra tragopoginis
MLTRSRAKAQNTRPPSSASSLSSASQPPEPASIVSDVTPAATVASSSSDEYFSPATSPSPPPARHRGRGRPPTCLGPRGPPASDRVPAPGGSVQRMRWTQSMNENCMRAYFGATEGGTNLTAYRGRMLSLFQALEPAVNVSAQRLSDQVRVIQRDHRLDDAALDRLRAEMQNSQAAPLSSQIRTQTLVPPAVPLESNYADEEGEDRAISAGTQYSEIMRSALEDALREFRSTPPELRPRLPRLPMHNKNRALVCALDSLLPNVFESSEDLGDTHSILYCAAVAACHVAHVKFPNDNRATRPKSAVPAWQSRIERRIDEARVLIGKLTCFREGNRRPRVMRFVRRTFSGTDIGPGEYVSRVTERIDFLKQKVYAWANRIRRYRRRVDRYTQNRIFQSDQRWVYRTWERPDQGVSDTHLPDNDVMNAFWRNIWSVPVTHTEGDWMQEVQRACEPIQEMGAVTIGPQDVTSAVRPMPNWKSPGPDGLHNFWIKWLRSSHARLASQFQSSLESGSLPAFLTTGITHLLFKSGSTAEPKNYRPITCLPTVYKLLTSILRAKLNHHIDSNAIMCATQNGCKNGSRGTKELLLIDMAISQQVRRSRKDLSTCWIDYKKAYDSVPHTWLMRVLELYKINATLRTFLMSCMGQWRTVLHYPGCRQIQGNGELTRIERGIFQGDSLSPLWFCLALNPLSTLLEGSGLGYRLRRGGQVISHLLYMDDLKLFAPNNLQLVELLKVTETFSNSIRMEFGVDKCAVMHVKRGRIMESVGTQLSDSINLRSLSSTETYKYLGMSEALGINEADMKQSLRERFFGRLIKVLKSLLSGGNKVRAFNGWVMPVLMYSFGILRWTQTELDALDRRVRTLLTAYRMHHPRSSVMRLYIPRKCGGRGFLNAKTLHNREVCSLREYFSQADVGMHRDVVAVDKGLTPLSLAKENWRKPVVLDAKGRMEVWRSKELHGRFYRALHGPDVDFLASVAWLRFGDLFGETEGFVCAIMDEVMMTNNYRKYIVKDGTVDICRACHCPGESIRHIVSGCSRLANGEYLHRHNLVARIIHQQLALKYNLVDTEVPYYKYVPDPVLENGHVTLYWDRSIITDRTIVANKPDIVVID

SEQ ID NO: 29784 - protein, 868 aa, Amphipyra tragopoginis
MRFVRRAFSGTDVSPREYMSRVTERIDFLKQKVYAWANRIRRYRRRVDRYTQNRLFQSDERWVYRTWERPDQRVSDTRLPDNDVMNTFWRNIWSVPVAHTEGDWMQEVQRACEPIQEMGDIIISPQDVASAVRPMSNWKSPGPDGLHNFWLKWLRSSHARLASQFQSSLESGSLPQFLTTGVTHLLHKSGSTAEPKNYRPITCLPTVYKVLTSILRTKINNHIDNNSIMSASQNGCRNGSRGTKELLLIDMAISQQVRRSRKDLSTCWIDYKKAYDSVPHTWLMRVLELYKVNTTLCAFLTSCMGQWRTVLRYPGCRQIQGIGEPIRIERGIFQGDSLSPLWFCLALNPLSTLLEGSGLGYRLRRGGQVISHLLYMDDLKLFAPNNLRLLELLKVTETFSNSIRMEFGVDKCAVMHVKRGRIMESVGTQLSDSIQLRSLSSTETYKYLGMSEASGVNETDMKQSLKERFFGRLKKVFNSLLSGGNKVRAFNGWVMPVLMYSFGILKWTQTELDALDRRVRSLLTANRMHHPRSSVMRLYIPRKCGGRGFLNAKTLHNREVCSLREYFSQADVGMHRDVVAVDKGFTPLSLAKENWRKPVVLDTNGRREVWRSKELHGRFYRALHGPDVDFLASVAWLRFGDLFGETEGFVCAIMDEVMMTNNYRKYIVKDGTVDICRACHCPGESIRHIVSGCSRLANGEYLHRHNLVARIIHQQLALKYNLVDAEVPYYKYVPDPVLENGHVTLYWDRSIITDRTIVANKPDIVVIDRSERLTMIVDITVPHDENLVKAEKDKEIKYQDLAHEVVAMWDVDSAIIVPIVVTANGLIAKSLDQHLKRLSLGSWIKGLIQKAVLLDTARIVRKFLSLRP

SEQ ID NO: 29785 - protein, 899 aa, Mythimna impura
MHKKNRALMCALDSLLENVFESSVNLADTHSILYCGVIAACRLANVKLPSCDGPTRPKPAAPAWQCRIEKRIDGARALIGKLYCFREGNTRPRVMRYVRHAFSGTGISPREYLSRVTERIDFLKQKVCAWANRIRRYKRRVDRYSQNRMFQSDERWVYRAWERPEQNVTDVTRPDAVATNTFWRNIWSVPVCHTEDSWMREVVRVCEAIPEMEKVIISPIDVARTVRPLPNWKSPGPDGLQNFWLKWYSSSHALLASQFQSSLESGSLPQFLTTGVTHLLHKTGSTAEPKNYRPITCLSTVYKLLTSILRTKINQHIDSNSIMSASQNGCRNGSRGTKELLLIDMTISQQVRRSRKDLSTCWIDYKKAYDSVPHTWLMRVLELYKIDATLRTFLESCMGQWNTVPRYPGCRSIRRDDEPIWIKRGIFQGDSLSPLWFCLALNPLSTLLEESGLGYRLRRDGQVLSHLLYMDDLKLIAPNKLRLMELLKVTETFSSAIRMEFGVDKCAVMHVKRGEIMESEGIQLSDSIHLRSLSSTETYKYLGMSEALGINVADMKQSLKVRFFGRLKKVLNSLLSGGNKVRAFNGWVMPVLMYSFGILKWTQTELDALDRRVRTLLTANRMHHPRSSVMRLYIPRKCGGRGFLNAKTLHNREVCSLREYFLKTDVGMYRDVVAVDKGLTPLSMAKENWRKPVVLTTDDRKEVWKGKELHGRFYRALHEPDVDFLASVAWLRFSNLFRETEGFVCAIMDEVILTNNYRRHIMKDGTVDVCRACHRPGESIRHIISGCSRLANGEYLHRHNQVARIIHQQLALKYNLVDSEVPYYRYVPDPVLENDHVTLYWDRSIITDRTIVANKPDIVVIDRLARRAVIVDVTIPHDENLVKAVSFFALPLYQTLSRM

SEQ ID NO: 29786 - protein, 1200 aa, Mythimna impura
MLTRAAARRARHPPPGSPLSSASPPPDLGSPVSPVAAVASSSSDEYFSPPSSPTPVRRPGRGRPPKSLGPGGQPAPSRVPAAGGCVQRMRWTQSMNENVMRAYYGSTEGGTNLTAYRDRMLSLFQDLEPTVNVSAQRLSDQVRVIQRNHRLDDATLDRLRSEVLSNQIVSTSIQTQTAATPTTNAISPRSNPNNDDADDRVVTVSSQCNDELRSALEDALREYRTTPTELRPRLPRLPMHKKNRALVCTLDSLLKNNFESSENLVDTHSILYCGAVAACRLANINFPNIDGTIRPKPAVPAWQYRIERRIDGARVLIGKLHCFREGNTRPRVMRFVRRAFLGTGISPQEYMSRVTERIDFLKQKVCAWASRIRRYKRRVDRYSQNRMFQSDERWVYRAWERPEQNVIDGRRPDDFATITFWRNIWSVPVSHTEGDWMRDVERVCEAIPEMEKVVITPADVAKAVRPLPNWKSPGPDGLQNFWLKWFSNSHAPLASQFQSTLESGSLPEYLTTGITHLLHKTGNPVEPKNYRPITCLSTVYKLLTSILRAKINRHIENNLIMSASQNGCRNGSRGTKELLLIDMAISQQARRSRKDLSTCWIDYKKAYDSVPHTWLMRVLELYKVDMTLRTFLESCMRQWKTVLRYPGCRPIQGNDEPIRIKRGIFQGDSLSPLWFCLALNPLSTLLEESGLGYRLRRGGQAISHLLYMDDLKLFAPSNLQLMELLKVTETFSSAIRMEFGVDKCAAMHVKRGEIMESEGIQLPDSIHLRSLSSTETYRYLGMSEALGINNADMKQSLKERFFGRLKKVLNSLLSGGNKVRAFNGWVMPVLMYSFGILKWTQTELDALDRRVRTLLTANWMHHPRSSVMRLYISRKCGGRGFLNAKTLHNREVCSLREYFLKTDVGMHRDVVAVDKGLTPLSMAKEDWRKPVILTTDDRKEIWKGKELHGRFYRALHEPDVDFLASVAWLRFSDLFGETEGFICAIMDEVILTNNYRRYIMKDGTVDVCRACHRPGESIRHIISGCSRLANGEYLHRHNQVARIIHQQLALKYNLVDSEVPYYKYVPDPVLENDHVTLYWDRSIITDRTIVANKPDIVVIDRLARRAVIVDVTIPHDENLVKAEKEKQIKYLDLAHEVVDMWNVDSAVIVPMVVTANGLIAKSFDDHLSKLSLRGWIKGLIQKAVLLDTARIVRRFLSLEP

SEQ ID NO: 29787 - protein, 1195 aa, Notodonta dromedarius
MLTRLQARLRPPGLLPRSASQPLGLIQDETLTTAAASSESDEYFSPPSSPPPVRRRRGRPPGNLGTLGQPALNRILVPGGVVRRMRWTSSINENVMRAYYEATEGGTNLTAYRGRMLSLFQILEPAVNVSAQRLSDQVRVIQRGHMLADSLLDQLRSEALSSRVVPVASSQPVSLPVTTVESWPAVGGDTDRNDTASEVSTQYDGILRSTLEDVVREYRFVPPHVRPRLPRLPMHNKNRALVCSTNMLLSSYFESSENLMDTHSLLYCTAIAVCRVARVKFPDTDVATRPKPAVPAWQCRIERRINEARIFIGKLSCFRAGNTRPRVMRFVRRIFSGTNVGPQEYLNHVTERIDFLKQKVYAWANRIRRYKARVDRYYQNSMFQRDQRWVYRSWEQSSQRDGEVHRPDDDDMIKFWRNIWSVPMTHSEGGWIGDVEQVCEPIQEMDKITIEAKDVANAVRSLPNWKAPGPDGLHNFWLKWLRSSHACLASQFQSALESRLLPEFITTGVTHLLHKSGSTTDPKNYRPITCLPTIYKTLTSVLREKICRHIDDNSIMSASQNGCRSGARGTKELLLIDMAICQQVRRNRKDLSTCWIDYKKAYDSVPHTWLMRVLELYKVNSTLRAFLATCMGQWRTVLLYPGSRRILGNGDPIRIERGIFQGDSLSPLWFCLAMNPLSTLLGGSGLGFRLRRGGQVISHLLYMDDLKLFAPTELQLTGLLKVTETFSKSIRMEFGVDKCAVMHVKKGRMVESRCIRLSDSIQLRSLSGTETYRYLGMSQALGICETDMKQSVRERFLGRLKKVLKSVLSGGNKVRAYNGWVMPVLIYSFGILKWSQTELDTLDRTVRTLLTAHRMHHPRSSVMRLYIPRKCGGRGFLNAKTLHNREVFNLREYFLHAVGEMHADVVTVDNGLTPLSLGKENWRRPVVLTTDDRMAVWQGKELHGRYYRALHGPDVDLAASVAWLQFGDLFGETEGFVCAIMDEVVMTNNYRRFIIRDGTIDICRACHRPGESLRHIISGCSRLANGEYLHRHNQVARIVHQQLALKYRLVASEVPYYRYVPEPVLEDGHITLYWDRSIITDRTIVANRPDIVLIDRQERHAMLVDVTVPHDGNLVKAEKDKECKYLDLVHEVVDMWDIDTAIIVPIVVSAHGLIGKSLDKHLKRLSLGTWIKGQIQKAVLLETARIVRKFLSLEP

SEQ ID NO: 29788 - protein, 1016 aa, Phlogophora meticulosa
MDTIHQRKRHALILWGTEGGSILTAYRVRMLSLFQVLEPAVNVSAQRLSDQVRVIQRNHMLDDVVLHRLRTEMQSSRVITSPSHTVVPPQYNIVLSSFADGEGSDKVTNVSTQCNEELRSALEGAIREYRFMLPALRPRLPRLPMHNKNRALVAALDSQLSNYFDNCDDLTDAHSILYCAAVAACRVAHVKFPNDIATRPKPAVPAWQCRIERRIAGARALIGKLVCYREGNTRPRVMRYVRRAFLGTDISPRGYMSRVTERIDFLKQKVYAWASRIRRYKRRVERYTQNRTFQSNERWVYRAWERPVQGVTDTHLPDDDVMCSFWRNIWSVPVSHTEGDWTREVERACDPIPQMGAITISPQDVARAVRPLPNWKSPGPDGLHNFWIKWLQKSHARLASQFQSALETGSLPQFLTTGITHLLHKSGSTAEPKNYRPITCLRTVYKVLTSILRVKINNHIDSNSIMSASQNGCRNGSRGTKELLLIDTAISQQVRRSRKDLSTCWIDYKKAYDSVPHTWLKRVLELYKVDATLRTFLTSCMGQWRTVLCYPGCRQIQRNSEPIRIERGIFQGDSLSPLWFCLALNPLSTLLEDSGLGYRLKRGGQVVSHLLYMDDLKLFAPSDLQLMELLKVTKTFSSAIRMEFNVDKCAVMHVKRGKIVESVGTQLPDFINFRALSPIETYKYLGMSEALGINAADMKQSLRERFFGRLKKVCNSLLSGGNKVRAFNGWVMPVLMYSFGILKWTQTELDALDRRVRTFLTASRMHHPRSSVMRLYIPRKCGGRGFLNAKTLHNREICSLRDYFLETDVGMHRDVVAVDQGLTPLSLAKENWRKPVVLDTNDRKEVWQSKELHGRFFQALYGSDVDQLASVSWLRFGDLFGETEGFVCAIMDEVIMTNNYRRFIVKDGTVDICRACHRPGESIRHIISGCSRLANEEYLHRHNLVARIIHKQLALKYSLVESEVPYYKYVPDPVLENGSVTLYWDRSIITDRTIVGNKPDIVVMDRIKRRATIINY

SEQ ID NO: 29789 - protein, 1209 aa, Xestia xanthographa
MITRSRAKQHQEAHPPSPGSSLSSALQPPGRATPVSIVSPVAAVASSSSDEFFSPPSTPSPSPRRGRRRGRGRPPAGLGPRGQQAPSRVPAAGGNVSRIRWTQSMNENVMRAYYGATEGGINLTAYRGRMLSLFQVLEPGVSASAQRLSDQVRVIQRNHMLDDTVLDRLRSESRSNLVTPASPLIAVQVQNVSSAPPRSDRDGEEDDSEVISVSTQCNAQLRSALESAFREYRSTPPELRPRLPRLPMHNKNKALMCALDSQLSNCFDSSKDLTDTHSILYCGAVAAYRVAHVKFPNNDGATRPKLAVPAWQCRIERRIGEARALIGKLICFREGNTRPRVMRFVRRAFSGTDISFRDYLVRVTERIDSLKQKICAWASRIRRYKRRVERYTQNRTFQSDERWVYRAWERPDQGVTDTRLPDDIAMYSFWRNIWSVPVTHTEGDWTREVEQACDPIPEMGAIIISPQDVARAVRPLPNWKSPGPDGLHNFWIKWFQRSHARLASQFQSALESGSLPQFLTTGITHLLHKSGSAAEPKNYRPITCLPTVYKVLTSILRAKINQHIDSNSIMSASQNGCRNGSRGTKELLLIDMAISQQVRRSRKNLSTCWIDYKKAYDSVPHTWLMRVLELYKIDATLRTFLMSCMGHWRTVLRYPGCRQIQGNSEPIRIERGIFQGDSLSPLWFCLALNPLSTLLERSGLGYLLRRDGQVISHLLYMDDLKLFAPNNFQLMKLLKVTETFSSAIRMEFGVDKCAVMHVKRGEIMESEGTQLSDSIHLRSLSSTETYKYLGMSEALGINTADMKQSLRERFFGRLNKVLGSLLSGGNKVRAFNGWVMPVLMYSFGILKWTQTELDALDRRVRTLLTANRMHHPRSSVMRLYISRKCGGRGFLSAKTLHNREVYSLREYFLEAEGEMHRDVVSVDKGLTPLSLANGNWRKPKVLDTNDRKVEWQGKELHGRFYRALHGPDVDFLASVSWLRFGDLFGETEGFICAIMDEVMMTNNYRKYIVKDGTVDICRACHRPGESIRHIISGCSSLANGEYLHRHNLVARIIHQQLALKYNLVESEVPYYKYAPDPVLDNGHITLYWDRPITTDRTVVANRPDIVVIDRLERRTMIVDITIPHDENLVKAEKDKQFKYLDLAREVVDMWDVGTAVIVPIVVSANGLIAKSLDQHLRRLSLGSWIKGLIQKAVLLDTARIVRRFLSQEP

SEQ ID NO: 29790 - protein, 1093 aa, Xestia xanthographa
MLTRAAARRARLPSPESSLSSASPPPDPGSPVSPVAAVASSSSDEYFSPPTSPPPVRRAGRGRPPTSLGLRGQQAPSRVPATGGCVQRMKWTQSINENVMRAYYGSTEGGTNLTAYRVRMLSLFQDLEPTVNVSAQRLSDQVRVIQRNHRLDDAALDRLRSEVLSNLIILTPTQTAVHTSVNNVTLPRSNPDVVEEDDRVATVSSQCNYRLRSALEDAFREYRSTPTELIPRLPRLPMHKKNRALVSALDSQLKNIFESSENLVDTHSILFFGAVAACRLANVKFPNCDVATRPKPAVPAWQCRIERRIDEARVLIGKLYCFREGNTRPRVMRFVRRAFSGTEISPQEYMSRVTERIDFLKQKVYAWANRIRRYKRRVDRYSQNRMFQSDERWVYRAWERPEQNMTDVCRPDDAATSSFWRSIWSVPVCHTESDWMRDVERVCEPIPEMEPILITPLDIAKAVRPLPNWKSPGPDGLHNFWLKWFSSSHTCLASQFQSSLESGSLPQFLTTGVTHLLHKSGSPAEPKNYRPITCLSTIYKLLTSILRVKINTHIDKNSIMSASQNGCRNGSRGTKELLLIDMAISQQVRRSRKDLSTCWIDYKKAYDSVPHTWLMRVLELYKIDTTLRAFLESCMGQWKTVLRYPGCRQIQGSDEPVWIKRGIFQGDSLSPLWFCLALNPLSTLLENSGLGCRLRKDGQVISHLLYMDDLKLFAPNKLRLMELLKVTETFSSAIRMEFGVDKCAVMYVKRGEIMESEGLQLSESIHLRSLSSSETYKYLGMSEALGINVTDMKQSLKERFFGRLRKVLNSLLSGGNKVRAFNGWVMPVLMYSFGILKWTQTELDALDRRVRTLLTETRMHHPRSSVMRLYIPRKCGGRGFLNAKTLHNREVCSLREYFLKAEVGMHRDVVAVDKGLTPLSMAKENWHKPEVLTTDDRKEVWQGKELHGRFYRALHGPDVDFLASVFWLRFGDLFGETEGFVCAIMDEVMLTNNYRKYIMKDGTVDVCRACHLSGESIRHIISGCSRLANGEYLHRHNQVARIIHQQLALKYKLVESEVPYYKYPTQFSKVTMSRCTGIGLSLLTGLLSPINLT

SEQ ID NO: 29791 - protein, 1192 aa, Limenitis camilla
MLTRARAKNERSPTSPGSSDNSTSQVPEHTEEVVAVVSSSSDEYFSPPTSPSPVRRPGRGRPPRSLGPRGQPASRQVPAIDGYVQRMKWTQCINENVMRAYYGSTEGGTNLTAYRDRMLSLFQKLEPSINVSAQRLSDQVRIILRNHRLNDTVLERIRSEVHDSRVIPSSIQATLPGPSPPSPNQRDEEEDDTTITAGKKYDELLRSALEDAIREYRYTSDEIRPRLPRLPMHKKNRALVCTLDSLLPMYFESSEDLKDTHSILFCAAVAVCRVAHVKLVNTETTRPKPDVAAWQSRIERRIDETRVLIGKLYSFREGNTRPRVMRFVRRAFSGTEICPPEYMARVTERIDTLKQKIYAWANRIRRYRRRVDRYSQNRMFQKDQKWVYRTWERPDQNVDDIHRPDDDDTNKFWRSIWSVSVDHTEGDWMREIRQTREPLQAMEHISITCKDVADAVRSVPNWKSPGPDGLHNFWLKWLRSSHACLASQFQSALESGSLPQFLTTGITHLLHKSGSTTEPKNYRPITCLPTVYKLLTSILRDKIDSHITKNAIMSVSQNGCRNRSRGTKELLLIDMTISQQVRRSRKDLSTCWIDYKKAYDSVPHGWLMRVLELYKVDATLCAFLGSCMRQWRTVLRYPGCRPIQGNNEPIRIKRGIFQGDSLSPLWFCLALNPLSTLLENSGLGYRLRRGGQVISHLLYMDDLKLFVPTKLQLIELLKITKTFSNSIRMEFGVDKCAVMHVKRGKIEESEGIQLSDSVNLRSLSADETYKYLGMSEALGIIEIDMKQSVRERFLARLRKVLKSLLSGGNKVRAYNGWVMPILMYSFGILKWTQKELDDLDRKVRALLTTYRMHHPRSSVMRLYIPRKCGGRGFLNAKTLHNREVCNLREYFLQTDVGMHRDVVAMDKGLTPLSLAKENWRKPIVLSTDNRKEVWKSKELHGRFYRALHGDEVDFKASVSWLRFGNLFGETEGFVCAIMDEVIMTRNYRRYIVRDGTVDICRACHSSGESLRHIISGCPRLANGEYLHRHNQVAKIIHQQLALRYGLVESEVPYYRYAPDPVLENGHVTLYWDRTIITDRTIIANKPDIVVIDRSERCTMIVDVTIPHDGNLVKAEKDKQMKYLDLAHEIVDMWDVDSAVVVPIVVTANGLIAKSLDQHLKRLELDGWVKGLMQKAVLLDTARIVRKFLSLEP

SEQ ID NO: 29792 - protein, 1137 aa, Noctua fimbriata
MLTRAAARRARLPPPDPSLSSASPPPESSPIVSAVTPAVAVASSSSDEYFSPPTSPTPVRRQGRGRPPRSLGLRGHPAPSRVPAAGGCVQRMRWTHSINENVMRAYYGSTEGGTNLTAYRVGMLSLFQVLEPTVNVSAQRLSDQVRVIQRNHMLDDAVLDRLRSEVLSNRIVLTPAQTAVQASVIDATPPRFNPAAVEEDDRVAVVSSQCNDRLRSALEDALREYRSTPTELRPRLPRLPMHNKNRALVCALDSQLKNIFESSENLVDTHSILYCGAVAACRLANVKFPNCDVATRPKPTVPAWQRRIERRIDGARVLIGKLHCFREGNTRPRVMRFVRRAFSGTGISPQEYMSRVTERIDFLKQKVYAWANRIRRYKRRVDRYSQNRMFQSDERWVYRAWERPELNMTDVCRPDDATTSSFWRSIWSVPVCHTEADWMRDVERVCEPIPEMEPILITPLDIARAVRPLPNWKSPGPDGLHNFWLKWLSSSHTCLASQFQSSLESGSLPQFLTTGVTHLLHKSGSPAEPKNYRPITCLSTVYKLLTSILRAKINTHIDKNSIMSASQNGCRNGSRGTKELLLIDMAISQQVRRSRKDMSTCWIDYKKAYDSVPHTWLMRVLELYKIDATLRAFLESCMGQWRTVLRYPGCRQIQGNDEPVWIKRGIFQGDSLSPLWFCLALNPLSTLLEDSGLGYRLRRGGQVISHLLYMDDLKLFAPNKLRLTELLKVTETFSSAIRMEFGVDKCAVMYVKQGEIMESEGIQLSDSIHLRTLSSTESYKYLGMSEALGINVTDMKQSLKERFFGRLNKVLHSLLSGGNKVRAFNGWVMPVLMYSFGVLKWTQTELDALDRRVRTLLTANRMHHPRSSVMRLYIPRKCGGRRFLNAKSLHNREMCSLREYFLKVEVGMHRDVVAVDKGLTPLSMAKENWRKPEVLTTDDRKEVWQGKELHGRFYRALHGPDVDFLASVSWLRFGDLFGETEGFVCAIMDEVMLTNNYRKYIMKDGTVDVCRACHRPGESIRHIISGCSRLANGEYLHRHNQVARIIHQQLALKYKLVESEVPYYKYVPDPVLEKDHVTLYWDQSIITDRTIVANKPDIVVIDRSARRVMIVDVTIPHDENLVKAEKEKQIKYLDLAH

SEQ ID NO: 29793 - protein, 1201 aa, Mesoligia furuncula
MLTRLAARRARLPPPDSSLSSAPPPPESSPTVSAVTPAVAVASSSSDEYFSPPTSPTPVRRQGRGRPPNSLGLRGHPAPSRVPAAGGCVQRMRWTQSMNENVMRAYYRSTEGGINLTAYRDRMLSLFQELEPTVNVSAQRLSDQVRVIQRKHRLDDIALDRLRSEVLSNHIVSTSAQTAAQASTVDAIPPRSNHVEEEDDRVDTVSSQCNVRLRSALEDALCEYRSTPTELRPRLPRLPMHKKNRALVCALDSQLKNFFESSEDLVDTHSILYCAAVAACRLANVKFPSCDGATRPKPAVPTWQRRIERRIDGARVLIGKLYCFREGNTRPRVMRFVRRAFSGTGISPREYISRVTERIDFLKQKVCAWASRIRRYKRRVDRYTQNRMFQSDERWVYRAWERPEQNVTDVYRPDDATTSAFWCSIWSVPVCHTEAGWMRDVERVCESVPEMETVLITPSDVAKAVRPLPNWKSPGPDGLHNFWLKWLISSHTCLASQFQSSLESGSLPQFLTTGVTHLLHKSGSPAEPKNYRPITCLSTVYKLLTSILRAKINTHIQSNSIMSASQNGCRNGSRGTKELLLIDMAISQQVRRSRKDLSTCWIDYKKAYDSVPHTWLMKVLELYKIDATLRTFLESCMRQWKTVLRYPGCRQIQGNDEPVWIKRGIFQGDSLSPLWFCLALNPLSTLLEDSGLGYRLRRDGQVISHLLYMDDLKLFAPNKLRLMELLKVTETFSSAIRMEFGVDKCAVMHVKRGEIMESEGIQLSDSISLRSLSSSESYKYLGMSEALGINDADMKQSLKERFFCRLKKVLISLLSGGNKVRAFNGWVMPVLMYSFGILKWTQTELDALDRRVRTLLTANRMHHPRSSVMRLYIPRKCGGRGFLNAKTLHNREVCSLREYFLKAEVGMHRDVVAVDKGLTPLSMAKENWRKPVVLSTDDRKKVWQSKELHGRFYRALHEPGVDFIASVSWLRFGDLFGETEGFVCAIMDEVMLTNNYRRHIMKDGTVDVCRACHRPGESIRHIISGCSRLANGEYLHRHNQVARIIHQQLALKYKLVDSEVPYYRYVPDPVLENDHVTLYWDRSIITDRTIVANKPDIVVIDRLARRTMIVDVTIPHDGNLVKAEKEKQIKYLDLAHEVVDMWNVSSAVIVPIVVSANGLMAESLDQHLSRLSLGGWIKGLIQKAVLLDTARIVRRFLSLES

SEQ ID NO: 29794 - protein, 1201 aa, Mesoligia furuncula
MLTRLAARRARLPPPDSSLSSAPPPPESSPIVSAVTPAVAVASSSSDEYFSPPTSPTPVRRQGRGRPPNSLGLRGHPAPSRVPATGGCVQRMRWTQSMNENVMRAYYRSTEGGINLTAYRDRMLSLFQELEPTVNVSAQRLSDQVRVIQRNHRLDDIALDRLRSEVLSNHIVSTSAQTAAQASTVDAIPPRSNHVEEEDDRVDTVSSQCNVRLRSALEDALCEYRSTPTELRPRLPRLPMHKKNRALVCALDSQLKNFFESSEDLVDTHSILYCAAVAACRLANVKFPSCDGATRPKPAVPAWQRRIERRIDGTRVLIGKLYCFREGNTRPRVMRFVRRAFSGTGISPREYISRVTERIDFLKQKVCAWASRIRRYKRRVDRYTQNRMFQSDERWVYRAWERPEQNVTDVYRPDDATTSAFWCSIWSVPVCHTEAGWMRDVERVCESVPEMETVLITPSDVAKAVRPLPNWKSPGPDGLHNFWLKWLISSHTCLASQFQSSLESGSLPQFLTTGVTHLLHKSGSPAEPKNYRPITCLSTVYKLLTSILRAKINTHIECNSIMSASQNGCRNGSRGTKELLLIDMAISQQVRRSRKNLSTCWIDYKKAYDSVPHTWLMKVLELYKIDATLRTFLESCMRQWKTVLRYPGCRQIQGNDEPVWIKRGIFQGDSLSPLWFCLALNPLSTLLEDSGLGYRLRRDGQVISHLLYMDDLKLFAPNKLRLMELLKVTETFSSAIRMEFGVDKCAVMHVKRGEIMESEGIQLSDSISLRSLSSSESYKYLGMSEALGINDADMKQSLKERFFCRLKKVLISLLSGGNKVRAFNGWVMPVLMYSFGILKWTQTELDALDRRVRTLLTANRMHHPRSSVMRLYIPRKSGGRGFLNAKTLHNREVCSLRDYFLKAEVGMHRDVVAVDKGLTPLSMAKENWRKPVVLSTDDRKKVWQSKELHGRFYRALHEPGVDFLASISWLRFGDLFGETEGFVCAIMDEVILTNNYRRHIMRDGTVDVCRACHRPGESIRHIISGCSRLANGEYLHRHNQVARIIHQQLALKYKLVDSEVLYYKYVPDPVLENDHVTLYWDRSIITDRTIVANKPDIVVIDRLARRTMIVDVTIPHDGNLVKAEKEKQIKYLDLAHEVVDMWNVSSAIIVPIVVSANGLMAESLDQHLSRLSLGGWIKGLIQKAVLLDTARIVRRFLSLEP

SEQ ID NO: 29795 - protein, 1190 aa, Lymantria dispar
MITRSQTKAACIPPPGSSQSSASKQAASISATEEASSSSSSDEYFSPPTSPRPAPRRGRGRPPFCLGPRGPPASHRAPASGGNVQRMRWTQSINENVMRAYFEATEGGIKLTAYRDRMLLLFQNLEPIINVTAQRLSDQVRAIQRCNLLDAAALDRLRSESIQISRVTPIPTPVSTIDVRQSAPPSAAEGDDMTDSMDTRYNEEVRKALECAIREYRFEPQEIRPRLPRLPMHRKNRLLVGTLDSFLIDYVNNSNSISDTHSILYCAAIAACRIAGLNFLKNESTMRYKEAKPAWQCRIECRISKARVLIGKLSSFRTGNTRPKVMRFVKRAFLGTGIKAEDYSARVTERIDFLKQKIYAWASRIRRYKKRVNRYSVNRMFESDHKSVYRNWERPCQDVDDGQPDTKATNSYWHSIWSMPVVHSEGDWMRDVKQACENIPQMKEVSINQQDVADAVRPLSNWKSPGLDGLHNFWLKWLRSGHARLASHFQSALVTGTLPEFMTTGITHLLHKAGSTTVPSNYRPITCLPSVYKLLTSILRNKISKHIQLNSVMSLSQNGCRNGGRGTKELLLIDTAISQQVRRLRKDLSICWIDYKKAFDSVPHTWLLRVLELYKINSTLCAFLKSCMGQWKTFLRYPACRLSQGGGEPIYIRRGIFQGDSLSPLWFCLALNPLSTLLGHSGLGCRLRRGGQIVSHLLYMDDLKLFAPTHIQMAELLKVTETFSNSIKMEFGVDKCAVMHVKRGEVVENHRSEIFNTPQFRPLHVMDTYKYLGMSQALNINETDMKRALRERFFGRLKKVLNSLLSGGNKVRAYNAWVMPILMYSFGILKWTQTELDTLDRKVRTLLTSHRMHHPRSSIMRLYIPRKCGGRGFLNAKTLHNREVCNLRDYFLKMTSGVHLDVVTIDNGLTPLGLAKENWRRPVVLSTIDRKNVWQSKELHGRYCGALNAPDVDTPASVTWLRFGNLFGETEGFVCAIADEVIKTNNYRKYILRDGTADICRACHLPGESLRHIVSGCSRLANGEYLHRHNQVARIIHQQLALLHKLVSVEVPYYKYVPEPVLENGRVTLYWDRSIITDRTIVANKPDIVVIDRLQRRAMIVDITVPHDGNLVKAEKDKQIKYQDLAHEIVDMWDVDSAIVVPIVISTNGLIAKSLNQHLKRLALGSWIAGLMQKAVLLNTARIVRKFLSL

SEQ ID NO: 29796 - protein, 1090 aa, Amphipyra berbera
MLTRSRAKALTETTRPRSSAPSLSSASQPPDSSIVSDVTPATAVASSSSDEYFSPPTSPPPARQRGRGRPPDSLRPRGPLASDRVPAAGGSVQRMRWTPTMNENCMRAYFGATEGGTNLTAYRGRMLSLFQVLEPTVNVSAQRLSDQVRVIQRDHRLTDAALDRLRSEVQSNAIISLQSQTAAQPRTPTVVPPLPTHANEESDDRVTNVSTQCYEQLRSALELAIREYRFTPPNIRPRIPRLPMHRKNRALMCALDSLLSSYFDNSENLEDTHSILYCAAVAACRVAHAKFDNNDKATRPKPAVPAWQCRIERRINEARALIGKLICFREGNTRPRVMRFVRRAFSGTDINPRDYMSRVTERIDFLKQKVYAWANRIRRYKRRVERYTQNRMFHSDERWVYRTWERPDHDVSDAHPPDNDVMNTFWRNIWSMPVTHTEGDWMQEVQRACEPIKEMGDITIVPQDVTSAVRPMANWKSPGPDGLHNFWIKWLHSSHARLASQFQSSLESGSLPEFLTTGVTHLLHKSGSTAEPKNYRPITCLPTVYKLLTSILRAKINSHILYNSIMSVSQNGCKNGSRGTKELLLIDMAISQQVRRSRKDLSTCWIDYKKAYDSVPHTWLMRVLELYKVNTTLCAFLTSCMGQWRTVLHYPGCRQIQGRGEPIRIERGIFQGDSLSPLWFCLALNPLSTLLEGSGLGYRLRRGGQVISHLLYMDDLKLFAPNNLQLMKLLKVTETFSNSIRMEFGVDKCAVMHVKRGGIMESVGTQLSDSIHLRSLSSTETYKYLGMSEALGINETDMKQSLRERFYGRLKKVLKSLLSGGNKVRAFNGWVMPVLMYSFGILKWTQTELDALDRRVRTLLTAYRMHHPRSSVMRLYIPRKCGGRGFLNAKTLHNREVCSLREYFLQADVGMHRDVVAVDKGFTPLSLAKENWRKPVVLDTNGRREVWQSKELHGRFYRALHGPDVDFLASVAWLRFGDLFGETEGFVCAIMDEVMMTNNYRKYIVKDGTVDICRACHCPGASIRHIISGCSRLANGEYLHRHNLVARIIHQQLALKYNLVDAEVPYYKYVPDPVLENGHITLYCCRHVGG

SEQ ID NO: 29797 - protein, 1015 aa, Amphipyra berbera
MVYMRSDRVDGDEDDGAVTVSSQYNDRLRSALEDAIRECRANPESRPRLPRLPMHNKNRALVCALDSLLASYFESSEDLGDTHSILYCAAVAACRVANVKFNNSERATRPKLAVPAWQCRIERRIDETRALIGKLICFREGNTRPRVMRFVRRAFSGTGISPREYTSRATERIDFLKQKVCAWASRIRRYKRRVERYTQNRMFQCDQRWVYRAWERPDQSVSGGRLPDDDAMSSFWRSIWSVPVIHTEGDWMRDIERTCESIEEMGEIVISPQDVAGAVRPLPNWKSPGPDGLHNFWIKWLRSSHARLASQFQSSLESGSLPQFLTTGVTHLLHKSGSTAEPKNYRPITCLPTVYKLLTSILRSKINTHIGNNSVLSSSQNGCRNGSRGTKELLLIDTAISQQVRRSQKSLSTCWIDYKKAYDSVPHTWLMRVLELYKINTTLRTFLRSCMGQWRTVLRYPGCQPIRGSGEPIRIERGIFQGDSLSPLWFCLALNPLSTLLEGSGLGYPLRRGGQVVSHLLYMDDLKLFAPTKLQLVDLLKVTETFSNSIRMEFGVDKCAVMHVRRGRIMESEGLQLSDSIHLSPLSANDTYKYLGMSEGLGISEADMKQSLRERFFGRLKKVLKSILSAGNKVRAFNGWVMPVLMYSFGILKWTQTELDALDRRVRTLLTANRMHHPRSSVMRLYIPRKCGGRGLLNAKTLHNREVCSLREFFLHADAGMHRDVVAVDKGLTPLSLARENWRKPVVLSTNDRREIWQSKELHGRFYRALHGPDVDFLASVSWLRFGDLFGETEGFVCAIMDEVIMTNNYRKYIVKDGTVDICRACHCPGESLRHIISGCSRLANGEYLHRHNQVARIIHQQLALKYNLVESEVPYYRYVPDPVLENGRITLYWDRSIITDRTIVANKPDIVVIDRSERRTMIVDVTIPHDGNLVKAEKDKQIKYLDLAHEVVNMWDVESATIVPIVVTANGLMAKSLDKHLMRLSLGGWIKGLIQKAVLLDTARIVRRFLSLEP

SEQ ID NO: 29798 - protein, 1197 aa, Eilema sororculum
MLTRAKAKQATNYAQPTPSDSLCSSASQPPESTSPRPATVEASSSDEYFSPPTSPTPVRRPGRGRPPSSLGSRGPPASNRAPAAGGNVRRMRWTSSMNENVMRAYFAATGGGTNLTAYRDRMLILFQDLEPTVNVSAQRLSDQVRAIQRCHLLDSSVLERLRSDLQNNDIIPLLPQAVMQEVPQETQPVHTDCELDNIATSVSTQYIDQIRNALECAVRDYRSMNYQIRPRLPRLPVHKRNIALVCALDSLLPNYLDNSEHLGDTHSILYCAAYAACRVAGVKFPECNTAIRPKSGKPRWQCRIERRIAETRALIGKLICFRSGNTRPRVMRFVNRVFSGTGVSPSDYTSRVTERIDFLKQKVYAWANRIKRYKKRCDRYTLNRTFQRDERWVYRNWERADSVGDEHFPDVAATNTFWRNIWSVPVAHTEGDWVRKVKRSCEAIETMEPIIISEDDIACVVRSLPNWKAAGPDGLHNFWLKWLRSSHARLASQFQSALESGSLPSFMTTGITHLLYKSGCAMNPKNYRPITCLPTVYKLLTSVLRVKITSHITRNSILSYSQNGCRSGARGTKELLIIDTAVNQQVRRNRRDMATCWIDYKKAYDSVPHTWLLRVLELYKVDTTLCTFLKACMGQWSTALRYPGCRHIPDDGELIKIERGIFQGDSLSPLWFCLALNPLSTMLEDSGLGYCLRRGSQVISHLLYMDDLKLFAPNNRQLMELLKITETFSTSIRMEFGVDKCAVMHVKKGEIVESEGIELSDSTKLRSLSVNNNYKYLGMSQALGVNESGMKQSLRERFFCRLKKVLKSLLSGGNKVRAYNDWVIPVLTYSFGILRWTQTELEALDRRVRTLLTAYRMHHPRSSVMRLYIPRKFGGRGFLNIKTLHNREICNLREYFLKVNVDVHRDVVAVDRGLTPLALAKENWRKPAILSINDRKEVWKSKELHGRFHRALYGPDVDSKASVSWLRFGDLFGETEGFVCAITDEVVMTNNYRRYILKDGTVDICRACHRPGESLRHIISGCSRLANGEYLHRHNQVARIVHQQLALKYKLVDSEVPYYRYVPDPVLDDGRVTLYWDRSIITDRTIIANKPDIVVIDRLERRAIIIDVTIPHDENLVKAEKDKQIKYLDLAHEVVDMWNVDSAIIVPIVVSVHGLIAKSLDQHLKRLALDSWVKGLMQKAVILDTARIVRRFLSLEP

SEQ ID NO: 29799 - protein, 983 aa, Agrochola circellaris
MRFGSIGTPRPNLDPDYHAYLCTKKNRALVCALDSQLRNYFDNSEDLIDTHSILYCAAVAACRLANVKFPNYDGVTRPKPAVPAWQCRIEQRIDGARALIGKLYCFREGNTRPRVMRFVRRAFSGTGISPREYMPRVTERIDFLKQKVCAWASRIRRYKRRVERYTQNRMFQSDERWVYRAWERPEQNVADVCRPDDAATSAFWRSIWSVPVCHAEADWMQDVERVCETIPEMDKIEITPLDIAKAVRPLPNWKSPGPDGLHNFWLKWLISSHTSLASQFQSSLESGSLPQFLTTGVTHLLHKSGSPAEPKNYRPITCLSTVYKLLTSILRAKINTHIDNNSIMSASQNGCRNGSRGTKELLLIDMAISQQVRRSRKDLSTCWIDYKKAYDSVPHTWLMRVLELYKIDATLRTFLISCMGQWRTVLRYPGCRQIQGNDEPVWIKRGIFQGDSLSPLWFCLALNPLSTLLEDSGLGYRLRRGGQVISHLLYMDDLKLFAPNKLRLMELLKVTETFSSAIRMEFGVDKCAVMHVKRGEIMESEGTQLSESIHLRSLSSSESYKYLGMSEALGINVADMKQSLKERFFGRLKKVLISLLSGGNKVRAFNGWIMPVLMYSFGILKWTQTELDALDRRVRTLLTANRMHHPRSSVMRLYIPRKCGGRGFLNAKTLHNREVCNLREYFLKAEVGMHRDVVAVDKGLTPLSMAKENWHKPVVLTTDDRKEVWQSKELHGRFYRALHEPGVDFLASVSELRFGDLFGETEGFVCAIMDEVILTNNYRRYIMKDGTVDVCRACLRPGESIRHIISGCSRLANGEYLHRHNQVARIIHQQLALKYKLVVSEVPYYKYVPDPVLENDHVTMYWDRSIITDRTIVANKPDIVVIDRLARSAMIVDVTIPHDGNLVKAEKEKQIKYLDLAHEVVDMWNVSSAIIVPIVVTANGLMAESLDQHLSRLSLGGWIKGLIQKAVLLDTARIVRRFLSLQP

SEQ ID NO: 29800 - protein, 1203 aa, Amphipyra tragopoginis
MLTRARAREKVARPRSPDPSLRSASQPPESSPSVSAVTPAAAVASSSSDEYFSPPSSPPPVRRRGGARPPACLGPQGQPASNRVPAAGGNVSRMRWTQSINENVMRAYYGATEGGINLTAYRDRMLLLSRVLEPAINVSTQRLSDQVRVIQRNRRLDDTVLERLRSEVQNNRAVTPPVQAVVQAQLPAVTPRPSHGDGEGDGGVIEVSNQCSDELRSALEGAILEYRATPPELRPRLPRLPMHKKNRALVCALDSLLSNYFDGSEDLADTHSILYCAAIAACRVANVKFTDNERATRPKPAVPAWQCRIERRIGGARALIGKLICFREGNTRPRVMRFVRRAFSGTGISPRDYMSRIRERIDFLKQKVYAWANRIRRYKRRVERYTLNRTFQSDQRRVYRTWERPDPCGSDVRLPDDEAMSSFWRSIWSVPVAHTEGDWMRDIERACEPIPEMGAIIISPQDVAGAARPLPNWKSPGPDGLHNFWLKWLRSSHACLASQFQSSLESGSLPQFLTTGATHLLYKSGSTAEPKNYRPITCLPTVYKLLTSILRVKISNHIDNNSIMSASQNGCRNGSRGTKELLLIDMTISQQVRRSRKDLSTCWIDYKKAYDSVPHTWLMRVLELYKINTTLRTFLMSCMRQWRTVLRYPGCREIRGRGEPVRIERGIFQGDSLSPLWFCLALNPLSTLLEGTRLGYRLRREGQVISHLLYMDDLKLFAPTDLRLMELLKVTENFSSSIRMEFGVDKCAVMHVKRGGIVESEGTQLSNSIQLRSLSPTETYRYLGMSEALGISEADMRQSLRERFFGRLNKVLRSLLSGGNRVRAFNGWVMPVLMYSFGILKWTQTDLDALDRRVRALLTTHRMHHPRSSVMRLYIPRKCGGRGFLNAKTLHNREVCSLREYFLQAEGEMHRDVVAVDKGLTPLALAKENWRKPAVLSTNDREEVWQSKELHGRFYRALHGPDVDFPASVSWLRFGDLFGETEGFVCAIMDEVMMTNNYRKYIVKDGTVDICRACHRPGESIRHIISGCSRLANGEYLHRHNLVARIIHQQLALKYNLVESEVPYYRYVPDPVLENGHVTLYWDRSIITDRTIVANKPDIVVIDRSERRTMIVDITVPHDENLVKAEKDKQIKYLDLAHEVVGMWDVDSAVIVPIVVTANGLIAKSLDQHLKRLSLGGWIKGLIQKAVLLDTARIVRRFLSLEP

SEQ ID NO: 29801 - protein, 1200 aa, Amphipyra tragopoginis
MLTRSKARARDAHPPPPDSSPSSASQQQGLDPASPAAAVASSSSDEYYSPPSSPPPARRRGGTRPPGGLGLRGPLASDRVPAPGGIVPRMKWTQKMNESVMRAYYGATEGGTNLTAYRSRMLSLFQVLEPAVNVSAQRLSDQVRVIQRGHMLDDTVLDRLRSEVQSSPVISPSSQVLEQQQNLAAALPRPNRADEEDDDRVANVSTQCNDELRSALEDAMREYRYTRSDLRPRIPRLPMHRKNRALVCALDSLLSNYFDGSEDLGDTHSILYCAAVAACRVAHVKFTDNERATRPKNAVPAWQCRIERRISEARALIGKLVCFREGNTRPRVMRFVRRAFSGTDVSPREYMSRVTERIDFLKQKVYAWANRIRRYRRRVDRYTQNRLFQSDERWVYRTWERPDQRVSDTRLPDNDVMNTFWRNIWSVPVAHTEGDWMQEVQRACEPIQEMGDIIISPQDVASAVRPMSNWKSPGPDGLHNFWLKWLRSSHARLASQFQSSLESGSLPQFLTTGVTHLLHKSGSTAEPKNYRPITCLPTVYKVLTSILRTKINNHIDNNSIMSASQNGCRNGSRGTKELLLIDMAISQQVRRSRKDLSTCWIDYKKAYDSVPHTWLMRVLELYKVNTTLCAFLTSCMGQWRTVLRYPGCRQIQGIGEPIRIERGIFQGDSLSPLWFCLALNPLSTLLEGSGLGYRLRRGGQVISHLLYMDDLKLFAPNNLRLLELLKVTETFSNSIRMEFGVDKCAVMHVKRGRIMESVGTQLSDSIQLRSLSSTETYKYLGMSEALGVNETDMKQSLKERFFGRLKKVFNSLLSGGNKVRAFNGWVMPVLMYSFGILKWTQTELDALDRRVRSLLTANRMHHPRSSVMRLYIPRKCGGRGFLNAKTLHNREVCSLREYFSQADVGMHRDVVAVDKGFTPLSLAKENWRKPVVLDTNGRREVWRSKELHGRFYRALHGPDVDFLASVAWLRFGDLFGETEGFVCAIMDEVMMTNNYRKYIVKDGTVDICRACHCPGESIRHIVSGCSRLANGEYLHRHNLVARIIHQQLALKYNLVDAEVPYYKYVPDPVLENGHVTLYWDRSIITDRTIVANKPDIVVIDRSERLTMIVDITVPHDENLVKAEKDKEIKYQDLAHEVVAMWDVDSAIIVPIVVTANGLIAKSLDQHLKRLSLGSWIKGLIQKAVLLDTARIVRKFLSLRP

SEQ ID NO: 29802 - protein, 1202 aa, Amphipyra tragopoginis
MMLTRSQARARNYYAHPPPPDSSPSSASQQQELDPAPPAAAVASSSSDEYFSPPSSPPPVRRRGGARPPACLGPRGQPAPNRVPAAGGNVSRMRWTQSINENVMRAYYGATEGGINLTAYRDRMLSLFQVLEPAINVSTQRLSDQVRVIQRNRRLDDTVLERLRSEVQNNRTVTTPLQAAEQPQLPAVSPRPIHVDEAGDGEVIVVSNQCSDELRSALEGAILEYRATPPELKPRLPRLPMHKKNRALVCALDSLLSNYFDGSKDLGDTHSILYCAAIAACRVANVKLTENERATRPKPAVPAWQYRIERRIDGARALIGKLICFREGNTRPRVMRFVRRAFSGTDISPRDYMSRVTERIDFLKQKVYAWANRIRRYKRRVERYTQNRTFQSDQRRVYRAWERSVPGVGDMRLPDDDAMSSFWRSIWSVSVAHAEGDWTRDIERACEPIPEMGEITISPQDVATAARPLPNWKSPGPDGLHNFWLKWLRSSHARLASQFQSSLESGSLPQFLTTGVTHLLYKSGSAAEPKNYRPITCLPTVYKLLTSILRVKISNHIDNNSILSPSQNGCRNGSRGTKELLLIDMTISQQVRRSRKDVSTCWIDYKKAYDSVPHTWLMRVLELYKINTTLRTFLMSCMGQWRTGLRYPGCRQIRGRGEPIRIERGIFQGDSLSPLWFCLALNPLSTLLEGTGLGYRLRREGQVISHLLYMDDLKLFAPTNLQLMELLKVTENFSNSIRMEFGVDKCAVMHVKRGRIMESEGIQLSNSIQLRSLSPTETYKYLGMSEALGIREADMRQSLMERFFGRLNKVLKSLLSGGNKVRAFNGWVMPVLKYSFGILKWTQTDLDALDRRVRALLTTHRMHHPRSSVMRLYIPRKCGGRGFLNAKTLHNREVCSLREYFLQAEGEMHRDVVAVDGGLTPLALAKENWRKPTVLSTNDREEVWQSKELHGRFYRALHGPDVDFSASVSWLRFGDLFGETEGFVCAIMDEVMMTNNYRKYIVKDGTVDICRACHRPGESIRHIISGCSRLANGEYLHRHNLVARIIHQQLALKYNLVESEVPYYRYVPDPVLENGHATLYWDRSIITDRTIVANKPDIVVIDRAERRTVIVDITVPHDENLVKAEKEKQIKYLDLAHEVVSMWDVDSAVIVPIVVTANGLIAKNLDQHLMRLSLGGWIKGLIQKAVLLDTARIVRRFLSLEP

SEQ ID NO: 29803 - protein, 1202 aa, Amphipyra tragopoginis
MLTRSRARARDNQAHLPPPDSSPSSASQQQGLNPASPAAAVASSSSDEYYSPPSSPPPARRRGGTRPPVGLGLRGPLASDRVPAPGGIVPRMKWTQKMNESVMRAYYGATEGGTNLTAYRSRMLSLFQVLEPAVNVSAQRLSDQVRVIQRGHMLDDTVLDRLRSEVQSSPVISPSSQVLEQQQNLAAALPRPNRADEEDDDRAANVSTQCNDELRSALEDAMREYRYTRSDLRPRIPRLPMHRKNRALVCALDSLLSNYFDGSEDLGDTHSILYCAAVAACRVAHVKFTDNERATRPKNAVPAWQCRIERRISEARALIGKLVCFREGNTRPRVMRFVRRAFSGTDVSPREYMSRVTERIDFLKQKVYAWANRIRRYRRRVDRYTQNRLFQSDERWVYRTWERPDQRVGDTRLPDNGVMNTFWRNIWSVPVAHTEGDWMQEVQRACEPIQEMGDIIISPQDVASAVRPMSNWKSPGPDGLHNFWLKWLRSSHARLASQFQSSLESGSLPQFLTTGVTHLLHKSGSTAEPKNYRPITCLPTVYKVLTSILRTKINNHIDNNSIMSASQNGCRNGSRGTKELLLIDMAISQQVRRSRKDLSTCWIDYKKAYDSVPHTWLMRVLELYKVNTTLCAFLTSCMGQWRTVLRYPGCRQIQGIGEPIRIERGIFQGDSLSPLWFCLALNPLSTLLEGSGLGYRLRRGGQVISHLLYMDDLKLFAPNNLRLLELLKVTETFSNSIRMEFGVDKCAVMHVKRGRIMESVGTQLSDSIQLRSLSSTETYKYLGMSEALGVNETDMKQSLKERFFGRLKKVFNSLLSGGNKVRAFNGWVMPVLMYSFGILKWTQTELDALDRRVRSLLTANRMHHPRSSVMRLYIPRKCGGRGFLNAKTLHNREVCSLREYFSQADVGMHRDVVAVDKGFTPLSLAKENWRKPVVLDTNGRREVWRSKELHGRFYRALHGPDVDFLASVAWLRFGDLFGETEGFVCAIMDEVMMTNNYRKYIVKDGTVDICRACHCPGESIRHIVSGCSRLANGEYLHRHNLVARIIHQQLALKYNLVDAEVPYYKYVPDPVLENGHVTLYWDRSIITDRTIVANKPDIVVIDRSERLTMIVDITVPHDENLVKAEKDKEIKYQDLAHEVVAMWDVDSAIIVPIVVTANGLIAKSLDQHLKRLSLGSWIKGLIQKAVLLDTARIVRKFLSLRP

SEQ ID NO: 29804 - protein, 981 aa, Amphipyra tragopoginis
MREYRYTRSDLRPRIPRLPMHRKNRALVCALDSLLSNYFDGSEDLGDTHSILYCAAVAACRVAHVKFTDNERATRPKNAVPAWQCRIERRIAEARALIGKLVCFREGNTRPRVMRFVRRAFSGTDVSPREYMSRVTERIDFLKQKVYAWASRIRRYRRRVDRYTQNRLFQSDERWVYRTWERPDQRVSDTHLPDNDVMNTFWRNVWSVPVAHTEGDWMQEVQRACEPIQEMGDIIISPQDVASAVRPMSNWKSPGPDGLHNFWLKWLRSSHARLASQFQSSLESGSLPQFLTTGVTHLLHKSGSTAEPKNYRPITCLPTVYKVLTSILRAKINNHIDNNSIMSASQNGCRNGSRGTKELLLIDMAISQQVRRSRKDLSTCWIDYKKAYDSVPHTWLMRVLELYKVNTTLCAFLTSCMGQWRTVLRYPGCRQIQGIGEPIRIERGIFQGDSLSPLWFCLALNPLSTLLEGSGLGYRLRRGGQVISHLLYMDDLKLFAPNNLQLLELLKVTETFSNSIRMEFGVDKCAVMHVKRGRIMESVGTQLSDSIHLRSLSSTETYKYLGMSEALGINEADMKQSLRERFYGRLKKVLNSLLSGGNKVRAFNGWVMPVLMYSFGILKWTQTELDALDRRVRSLLTANRMHHPCSSVMRLYIPRKCGGRGFLNAKTLHNREVCSLREYFSQADMGMHRDVVAVDKGFTPLSLAKENWRKPVVLDTNGRMEVWRSKELHGRFYRALHGPDVDFLASVAWLRFGDLFGETEGFVCAIMDEVMMTNNYRKYIVRDGTVDICRACHCPGESIRHIVSGCSRLANGEYLHRHNLVARIIHQQLALKYNLVDAEVPYYRYVPDPVLENGHVTLYWDRSIITDRTVVANKPDIVVIDRSERLTMIVDITVPHDENLVKAEKDKEIKYQDLAHEVVATWDVDSAIIVPIVVSANGLIAKSLDQHLKRLSLGSWIGGLVQKAVLLDTARIVRRFLSLRP

SEQ ID NO: 29805 - protein, 1200 aa, Mythimna impura
MLTRAAARRARHPPPGSPLSSASPPPDLESPVSPAAAVASSSSDEYFSPPTSPTPVRRQRRGRPPKSLGSRGQPAPSRVPAAGGCVQRMRWTQSMNENVMRAYYGSTEGGTNLTAYRDRMLSLFQDLEPTVNVSAQRLSDQVRVIQRNDRLDDATLDRLRSEVLSNQIVSTSIQTQTAATPTTNAISLRSNPNNDDADDRVVTVSSQCNDELRSALEDALREYRTTPTELRPRLPRLPMHKKNRALVCTLDSLLKNNFESSENLVDTHSILYCGAVAACRLANINFPNIDGTIRPKPAVPAWQYRIERRIDGARVLIGKLHCFREGNTRPRVMRFVRRAFLGTGISPQEYMSRVTERIDFLKQKVCAWASRIRRYKRRVDRYSQNRMFQSDERWVYRAWERPEQNVIDGRRPDDFATITFWRNIWSVPVSHTEGDWMRDVERVCEAIPEMEKVVITPADVAKAVRPLPNWKSPGPDGLQNFWLKWFSNSHAPLALQFQSTLESGSLPEYLTTGVTHLLHKTGNPVEPKNYRPITCLSTVYKLLTSILRAKINRHIENNLIMSASQNGCRNGSRGTKELLLIDMAISQQARRSRKDLSTCWIDYKKAYDSVPHTWLMRVLELYKVDMTLRTFLESCMRQWKTVLRYPGCRPIQGNDEPIRIKRGIFQGDSLSPLWFCLALNPLSTLLEELGLGYRLRRGGQAISHLLYMDDLKLFAPSNLQLMELLKVTETFSSAIRMEFGVDKCAAMHVKRGEIMESEGIQLPDSIHLRSLSSTETYRYLGMSEALGINNADMKQSLKERFFGRLKKVLNSLLSGGNKVRAFNGWVMPVLMYSFGILKWTQTELDALDRRVRTLLTASRMHHPRSSVMRLYISRKCGGRGFLNAKTLHNREVCSLREYFLKTDVGMHRDVVAVDKGLTPLSMAKEDWRKPVILTTDDRKEIWKGKELHGRFYRALHEPDVDFLASVAWLRFSDLFGETEGFICAIMDEVILTNNYRRYIMKDGTVDVCRACHRPGESIRHIISGCSRLANGEYLHRHNQVARIIHQQLALKYNLVDSEVPYYKYVPDPVLENDHVTLYWDRSIITDRTIVANKPDIVVIDRLARRAVIVDVTIPHDENLVKAEKEKQIKYLDLAHEVVDMWNVDSAVIVPMVVTANGLIAKSFDDHLSKLSLRGWIKGLIQKAVLLDTARIVRRFLSLEP

SEQ ID NO: 29806 - protein, 1202 aa, Phlogophora meticulosa
MLTRSRARVLNAPTTSSGSSLSSASQLPGPAPDVSPVTPAAAVASSSSDEYYSPPTSPPPVRRCGRGRPPASLGLRGPPASARVPASGGSVQRMRWTQSINENVMRSYYGATEGGTNLTAYRGRMLSLFQVLEPAVNVSAQRLSDQVRVIQRNHMLDDAVLDRLRLNSRSNRVTPASPPVAVQLQNLPSVSPRPDYVGEEDDDAAISVSSQCNVRLRSALEDAFREYRSTPPGLRQRLPRLPMHKKNKALMSALDSLLSNSFDSSRDLADTHSILYCAAVAACRVANVKFPNSVRSTRPAIPAWQCRIERRIGEARVLIGKLICFREGNTRPRVMRFVRRAFSGTDISSRDYLTRVTERIDFLKQKICAWANRIRRYKRRVERYTQNRTFRSDERWVYRTWERLDQGVTDTFLPDDEAMCLFWRSIWSVPVSHTEGDWTREVERMCEPLPEMGAINISPQDVACAVRPLPNWKSPGSDGLHNFWIKWLKSSHARLASQFQSALESGSLPQFLTTGITHLLHKSGSTAEPKNYRPITCLPTVYKVLTSILRSKINNHIDSTSIMSVSQNGCKNGSRGTKELLLIDMAISQQVRRSRKDLSTCWIDYKKAYDSVPHTWLMRVLELYKIDATLRTFLKSCMGQWRTVLHYPGCRQFQENSEPIRIERGIFQGDSLSPLWFCLALNPLSTLLEGSGLGYRLRRGGQVISHLLYMDDLKLFAHNNLQLMKLLKVTETFSSAIRMDFGVDKCAVMHVKRGGIVESAGTQLSDSIYLRSLSSTETYKYLGMSEALGINTADMKQSLKERFFGRLNKVLNSLLSGGNKVRAFNSWVMPVLMYSFGILKWTQTELDALDRRVRTLLTANRMHHPRSSVMRLYISRKCGGRGFLNAKTLHNSEVCSLREYFLEADVGIHRDVVAMDKALTPLSLANENWRKPIVLDTTDRMEIWKSKELHGRFYRVLHGPDVDLSASVSWLRFGDLFGETEGFVCAIMDEVIMTNNYRKYIVKDGTVDICRACHRPGESIRHIISGCSRLANGDYLHRHNLVAKIIHQQLALKYNLVESEVPYYKYVPDPVLENGNITLYWDRSIITDRTIVANKPDIVVIDRSDRRTMIVDITVPHDENLVKAEKEKQIKYLDLAREVVDMWDVNTAVIVPIVVTANGIIAKSLDQHLRRLSLGSWIKGLIQKAVLLDTARIVRRFLSQEP

SEQ ID NO: 29807 - protein, 1105 aa, Xestia xanthographa
MNENVMRAYYGATEGGINLTAYRGRMLSLFQVLEPGVSASAQRLSDQVRVIQRNHMLDDTVLDRLRSESRSNLVTPASPLIAVQVQNVSSAPPRSDRDGEEDDSEVISVSTQCNAQLRSALESAFREYRSTPPELRPRLPRLPMHNKNKALMCALDSQLSNCFDSSKDLTDTHSILYCGAVAACRVAHVKFPNNDGATRPKLAVPAWQCRIERRIGEARALIGKLICFREGNTRPRVMRFVRRAFSGTDISFRDYLARVTERIDSLKQKICAWASRIRRYKRRVERYTQNRTFQSDERWVYRAWERPDQGVTDTRLPDDSAMYSFWRNIWSVPVSHTEGDWTREVEQACDPIPEMGAIIISPQDVARAVRPLPNWKSPGPDGLHNFWIKWFQRSHARLASQFQSALESGSLPQFLTTGITHLLHKSGSAAEPKNYRPITCLPTVYKVLTSILRAKINQHIDSNSIMSASQNGCRNGSRGTKELLLIDMAISQQVRRSRKNLSTCWIDYKKAYDSVPHTWLMRVLELYKIDATLRTFLMSCMGHWRTVLRYPGCRQIQGNSEPIRIERGIFQGDSLSPLWFCLALNPLSTLLERSGLGYLLRREGQVISHLLYMDDLKLFAPNNFQLMKLLKVTETFSSAIRMEFGVDKCAVMHVKRGEIMESEGTQLSDSIHLRSLSSTETYKYLGMSEALGINTADMKQSLRERFFGRLNKVLGSLLSGGNKVRAFNGWVMPVLMYSFGILKWTQTELDALDRRVRTLLTANRMHHPRSSVMRLYISRKCGGRDFLSAKTLHNREVYSLREYFLEAEGEMHRDVVSVDKGLTPLSLANGNWRKPKVLDTNDRKVEWQGKELHGRFYRALHGPDVDFLASVSWLRFGDLFGETEGFICAIMDEVMMTNNYRKYIVKDGTVDICRACHRPGESIRHIISGCSSLANGEYLHRHNLVARIIHQQLALKYNLVESEVPYYKYAPDPVLDNGHITLYWDRPITTDRTVVANRPDIVVIDRLERRTMIVDITIPHDENLVKAEKDKQFKYLDLAREVVDMWDVGTAVIVPIVVSANGLIAKSLDQHLRRLSLGSWIKGLIQKAVLLDTARIVRRFLSQEP

SEQ ID NO: 29808 - protein, 1209 aa, Xestia xanthographa
MITRSRAKQHQEAHPPSPGSSLSSASQPPGRATPVSIVSPVAAVASSSSDEFFSPPSTPSPSPRRGRRRGRGRPPAGLGPRGQQAPSRVPAAGGNVSRIRWTQSMNENVMRAYYGATEGGINLTAYRGRMLSLFQVLEPGVSASAQRLSDQVRVIQRNHMLDDTVLDRLRSESRSNLVTPASPLIAVQVQNVSSAPPRSDRDGEEDDSEVISVSTQCNAQLRSALESAFREYRSTPPELRPRLPRLPMHNKNKALMCALDSQLSNCFDSSKDLTDTHSILYCGAVAACRVAHVKFPNNDGATRPKLAVPAWQCRIERRIGEARALIGKLICFREGNTRPRVMRFVRRAFSGTDISFRDYLARVTERIDSLKQKICAWASRIRRYKRRVERYTQNRTFQSDERWVYRAWERPDQGVTDTRLPDDSAMYSFWRNIWSVPVSHTEGDWTREVEQACDPIPEMGAIIISPQDVARAVRPLPNWKSPGPDGLHNFWIKWFQRSHARLASQFQSALESGSLPQFLTTGITHLLHKSGSAAEPKNYRPITCLPTVYKVLTSILRAKINQHIDSNSIMSASQNGCRNGSRGTKELLLIDMAISQQVRRSRKNLSICWIDYKKAYDSVPHTWLMRVLELYKIDATLRTFLMSCMGHWRTVLRYPGCRQIQGNSEPIRIERGIFQGDSLSPLWFCLALNPLSTLLERSGLGYLLRRDGQVISHLLYMDDLKLFAPNNFQLMKLLKVTETFSSAIRMEFGVDKCAVMHVKRGEIMESEGTQLSDSIHLRSLSSTETYKYLGMSEALGINTADMKQSLRERFFGRLNKVLGSLLSGGNKVRAFNGWVMPVLMYSFGILKWTQTELDALDRRVRTLLTANRMHHPRSSVMRLYISRKCGGRGFLSAKTLHNREVYSLREYFLEAEGEMHRDVVSVDKGLTPLSLANGNWRKPKVLDTNDRKVEWQGKELHGRFYRALHGPDVDFLASVSWLRFGDLFGETEGFICAIMDEVMMTNNYRKYIVKDGTVDICRACHRPGESIRHIISGCSSLANGEYLHRHNLVARIIHQQLALKYNLVESEVPYYKYAPDPVLDNGHITLYWDRPITTDRTVVANRPDIVVIDRLERRTMIVDITIPHDENLVKAEKDKQFKYLDLAREVVDMWDVGTAVIVPIVVSANGLIAKSLDQHLRRLSLGSWIKGLIQKAVLLDTARIVRRFLSQEP

SEQ ID NO: 29809 - protein, 1080 aa, Cosmia trapezina
MLSLFQELEPTVNVSAQRLSDLVRVIQRNHRLDDAALDRLRSEILNDRIVSTPAQTAVQASIIDAVPPRSTHVVGEGDDRVATVSNQSNDRLRSALEDAFREYRSTPTELRPRLPRLPMHKKNRALVCALDSQLKDFFESSEDLVDTQSILYCAAVAACRLANVKFPNCDGATRPKPAEPAWQCRIERRIDGARVLIGKLYCFREGNTRPRVMRFVRRAFSGTGISPPEYMSRVTERIDFLKQKVCAWASRIRRYERRVDRYTQNRIFQSDERWVYRAWERPEQNVTDVCRPDDTITSAFWRSIWSVPVCHAEAGWMQDVERVCEAIPEMEAVLITPLDVARAVRPLPNWKSPGPDGLHNFWIKWLISSHTRLASQFQSSLESGSLPQFLTTGVTHLLHKSGSPAEPKNYRPITCLSTIYKLLTFILRAKINMHIENNSIMSASQNGCRNGSRGTKELLLIDMAISQQVRRSRKDLSTCWIDYKKAYDSVPHTWLMRVLELYKIDATLRTFLGSCMGQWRTVLRYPGCRRIQGNDEPVWIKRGIFQGDSSSPLWFCLALNPLSTLLEDSGLGYRLRRGGQVISHLLYMDDLKLFAPNKLRLMELLKVTETFSSAIRMEFGVDKCAVMHVKRGEIMESEGIQLSDSIHLRSLSSSETYKYLGMSEALGINVADMKQSLKERFFGRLKKVLISLLSGGNKVRAFNGWVMPVLMYSFGILKWTQTELDALDRRVRTLLTANRMHHPRSSVMRLYIPRKCGGRGFLNAKTLHNREVCSLREYFLKADVGMHRDVVAVDKGLTPLSMANENWRKPVVLTTDDRKKVWQSKELHGRFYRALHEPGVDFLASVSWLRFGDLFGETEGFVCAIMDEVILTNNYRRHIMRDGTVDVCRACHRPGESIRHIVSGCSRLANGEYLHRHNQVARIIHQQLALKYKLVDSEVPYYRYVPDPVLENDHVTLYWDRSIITDRTIVANKPDIVVIDRLARRAMIVDVTIPHDENLVKAEKEKQIKYLDLAHEVVDMWNVSSAIIVPIVVTANGLMAESLDQHLLRLSLGGWIKGQIQKAVLLDTARIVRRFLSLQP

SEQ ID NO: 29810 - protein, 1090 aa, Mamestra brassicae
MLTRAAARQARLPPPASSLSSASPPPEPSPTVSAVIPAVAVASSSSEEYFSPPTSPLPARRRRGRRPPDGLGPRGPPASDRVPAPGGSVQRMRWTQTINENVMRSYYGATEGGTNLTAYRGRMLSLFQVLEPAVNVSAQRLSDQVRVILRNRMLDDAVLDRLRLESRSGRVSPASPPAAVQIQSSVSPRPNNVGEDDDDGAISMSTHCNERLRSALEDAFREYRSTPPELRPRPPRLPMHNKNKALVCALDSQLTNCFDSSEDLADTLYCAAAAACHLAHVKFPKSDRATRPAVPAWQCKIERRIGEARALIGKLICFREGNTRRRVMRFVRRAFSETDTSPRDYLTRVTERIDFLKQKIYAWANRIRRYKRRVERYTQNRTFQSNERWVYRAWERPDQGVTDTRLPDDDVMCSFWRNIWSVPVSHTEGDWTREVERACDPIPEMGAITISPQDVARAVRPLPNWKSPGPDWLHNFWIKWFKRSHARLASQFQSALESGSLPQFLTTGITHLLHKSGSTAEPQNYRPITCLPTVYKVLTSILRAKINSHIETNSIMSASQNGCRNRSRGTKELLLMDIAISQQVRRSRRDLSTCWIDYKKAYDSEPHTWLMRVLELYKVDAVLRTFLMSCMGQWRTVLRYPGCRQIQVNSDPIRIERGIFQGDSLSPLWFCLALNPLSTLLEGSGQGYRLRRGGQVISHLLYMDDLKLFAPNNLQLMKLLKVTETFSSAISMEFGVDKCAVMHVKRGEIMESVRTQLSDSINLRSLSSTETYKYLGMSEALGINAADVKQSLKERFFGRLNKVLNSLLSGGNKVHAFNGWVMPVLMYSFGILKWTQTELDALDRRVRSLLTANRMHHPRSSVMRLYIPRKCGVRGFLNAKTLHNREICNLREFFLEADVGMHRDVVAVDKGLTALSLANENWRKPVVLDTNDRREVWQSKELHGRFYRVLHGPDVDFLASVAWLHFGDLFGKTEGFVCAIMDEVMMTNNYRKYIVKDGTVDICRACHRPGESIRHIISGCSSLANGDYLHRHNLVARIIHQQLALKYNLVESEVPYYRYVPDPVLENGNCTCIGIGLSSLTGLLLPISLT

SEQ ID NO: 29811 - protein, 1192 aa, Abrostola tripartita
MITRSRAKIAQSTSPDSSPRSASQLPDQQALHSPASAVASSSSDEYFSPPTSPTPVRRQRRGRPPTSLGLRGQLAPNRVPASGGCVQRMKWSQQINENVMRAYYGSTEGGTNLTAYRDRMLALFQDLEPAVNVSAQRLSDQVRVILRNHRLDDATLDRLRSEVHSSPVTCRPVHVVVPPIGPPPCDMEADDRATTVSTQYNDILRSTLEDTIREYRVSPPGLRPRLPRLPMHNKNKAMISALDSLLSSYFEGSEDLCDAHSILYCAAATACRVANVKCFDSSTATRPKPAVPAWQCRIESRITEARTLIGKLTAFREGNIRPRVMRFVRRAFAGVDINPREYATRATERIDFYKQKVYAWASRIRRYKRRVDRFSQNRIFNQDQRWVYRNWERSAQGVSDGHLPDDGVTNAFWRSIWSVPVNHTEGSWMLDVEQSCESIPEMGTITISPQDVASAVRPMSNWKSPGPDGLHNFWIKWLRSSHGCLASQFQSAIEVGSLPQFLTTGSTHLLHKTGSTTDPKNFRPITCLPTIYKLLTSILRAKITKHIDDNNIMSASQNGCKNGSRGTKELLLIDMTICQQVRRSKKDLSTCWIDYKKAYDSVPHTWLMRVLELYKIDTTLRTFLLSCMRQWRTVLHYPGCRDIQQDGEPIRIERGIFQGDSLSPLWFCLALNPLSTLLENSGLGYSLRRRSQVISHLLYMDDLKLFAPSRFQLIKLLKITEAFSNSIRMEFGVDKCAVMHVKRGGIIESQGIQLSDSINLRSLSATETYKYLGMSEALGINVVDMKQSLKERFFGRLNKVLKSLLSGGNKVRAFNGWVMPTLMYSFGILKWTQTELDALDRRVRTLLTSNRMHHPRSSVMRLYIPRKCGGRGFLNAKTLHNREVCSLREYFLRAEVGMHREVVAVDKGLTPLFLAKENWCKPVVLSVNDRRDVWQSKELHGRFYKALHGPNVDLLSSVSWLRFGDLFGETEGFVCAIMDEVIMTNNYRKYILKDGTVDICRACHRPGESLRHIMSGCSRLANGEYLHRHNQVARIIHQQLALKYKLVDSEMPYYRYVPDPVLENDHITLYWDRSIITDRTIVANKPDIVVIDRLERRAMIVDITIPHDENLVKAERDKQIKYLDLAHEVVDMWEVDSAIIVPIVVSANGLMAKSLDQHLKRLTLGGWVKGLMQKAVLLDTARIVRRFLSLEP

SEQ ID NO: 29812 - protein, 1107 aa, Autographa gamma
MKWTLSINENVMRAYYGATEGGTNLTAYRARMLSLFQALEPGVSVSAQRLSDQVRVIQRNHRLDDSTLDRLRSEIQHSPATSTSPPVAAPVSGAPLTTPSDGEEEDGAITVSTQCNELIRSTLEDAIRVYRRSPPDQRPRLPRLPMHNRNKAIMGALDSLLPVYFESSEDLRDTHSILYCAALTACRVANVAMCHNNIATRPKPAVPAWQCRIEQRVAEARTLIAKLKAFKQGNSRPRVMRFVRRAYAGIDISPSEFIARVTERIDLFKQRVCAWANRIRRYKRRAERFHLNRMFQKDQRWVHRLWERPVSAMDGGCLPDGDATNSFWRSIWSVPVTHSEGGWMREVEQVCEPIQEMGAITISPQDVANAVRPMANWKTPGPDGLQNFWLKWLRSSHSCLASQFQSAVESASLPQFLTTGSTHLLHKTGSATDPKNYRPITCLPTVYKLLTSILRAKINEHIVNFSIMSASQNGCRSGSRGTKELLLIDTAICQQVRRSKKDLSTCWIDYKKAYDSVPHTWLMRVLELYKINTTLRAFLMSCMGQWSTVLHYPGCRDIQQGGEPIRIERGIFQGDSLSPLWFCLALNPLSTLLENSGLGYSLRRGGQVISHLLYMDDLKLFATSGFQLMELLKITESFSNSISMEFGVDKCAVMHVKRGGIVESQGIQLSDSINLRSLSATDTYKYLGMSEALGINVADVKQSLQARFFGRLNKVLKSVLSGGNRVRAFNGWVMPVLMYSFGVLKWTQTELDALDRRVRTLLTANRMHHPRSSVMRLYIPRKCGGRGFLNAKTLHNREVCNLREYFLQVDVGMHRDVVVVDKGFTPLSLGKENWHKPVVLSVKDREDVWQSKELHGRYYRTLHGPDVDFLASVAWLRFGDLFGETEGFVCAIMDEVIMTNNYRKYIIKDGTVDICRACHCPGESLRHIISGCSRLANGEYLHRHNQVARIIHQQLALRYKLVESEVPYYRYVPDPVLENGRVTLYWDRSIITDRTIVANKPDIVVIDRSERRAIIVDVTIPHDENLVKAEKEKQLKYLDLAHEVVDMWEVDSAMIVPIVVTANGIIAKSLDQHLKRLSLGTWVKGLIQKAVLLDTARIVRRFLSLES

SEQ ID NO: 29813 - protein, 1201 aa, Mesoligia furuncula
MLTRLAARRARLPPPDSSLSSAPPTPESSPIVSAVTPAVAVASSSSDEYFSPPTSPTPVRQQGRGRPPNSLGLRGHPAPSRVPATGGCVQRMRWTQSMNENVMRAYYRSTDGGINLTAYRDRMLSLFQELEPTVNVSAQRLSDQVRVIQRNHRLDDIALDRLRSEVLSNHIVSTSAQTAAQASTVDAILPRSNHVEEEDDRVDTVSSQCNVRLRSALEDALCEYRSTPTELRPRLPRLPMHKKNRALVCALDSQLKNFFESSEDLVDTHSILYCAAVAACRLANVKFPSCDGATRPKPAVPAWQRRIERRIDGTRVLIGKLYCFREGNTRPRVMRFVRRAFSGTGISPREYISRVTERIDFLKQKVCAWASRIRRYKRRVDRYTQNRMFQSDERWVYRAWERPEQNVTDVYRPDDATTSAFWCSIWSVPVCHTEAGWMRDVERVCESVPEMETVLITPSDVAKAVRPLPNWKSPGPDGLHNFWLKWLISSHTCLASQFQSSLESGSLPQFLTTGVTHLLHKSGSPAEPKNYRPITCLSTVYKLLTSILRAKINTHIESNSIMSASQNGCRNGSRGTKELLLIDMAISQQVRRSRKDLLTCWIDYKKAYDSVPHTWLMKVLELYKIDATLRTFLESCMRQWKTVLRYPGCRQIQGNDEPVWIKRGIFQGDSLSPLWFCLALNPLSTLLEDSGLGYRLRRDGQVISHLLYMDDLKLFAPNKLRLMELLKVTETFSSAIRMEFGVDKCAVMHVKRGEIMESEGIQLSDSISLRSLSSSESYKYLGMTEALGINDADMKQSLKERFFCRLKKVLISLLSGGNKVRAFNGWVMPVLMYSFGILKWTQTELDALDRRVRTLLTANRMHHPRSSMMRLYIPRKSGGRGFLNAKTLHNREVCSLREYFVKAEVGMHRDMVAVDKGLTPLSMAKENWRKPVVLSTDDRKKVWQSKELHGRFYRALHEPGVDFLASISWLRFGDLFGETEDFVCAIMDEVILTNNYRRHIMRDGTVDVCRACHRPGESIRHIISGCSRLANGEYLHRHNQVARIIHQQLALKYKLVDSEVPYYKYVPDPVLENDHVTLYWDRSIITDRSIVANKPDIVVIDRLARRTMIVDVTIPHDGNLVKAEKEKQIKYLDLAHEVVDMWNVSSAIIVPIVVSANGLMAESLDQHLSRLSLGGWIKGLIQKAVLLDTARIVRRFLSLEP

SEQ ID NO: 29814 - protein, 924 aa, Mesoligia furuncula
MKRQKLGARFQLVVSYGEEPARNSMVTLFKNNWLLQCFQIIVGMGGQRRPVNKQCLQSPHIYQTFTKQESIKRINNKNNKRIDFLKQKVCAWASRIRRYKRRVDRYTQNRMFQSDERWVYRAWERPEQNVTDVYRPDDATTSAFWCSIWSVPVCHTEAGWMRDVERVCESVPEMETVLITPSDVAKAVRPLPNWKSPGPDGLHNFWLKWLISSHTCLASQFQSSLESGSLPQFLTTGVTHLLHKSGSPAEPKNYRPITCLSTVYKLLTSILRAKINTHIESNSIMSASQNGCRNGSRGTKELLLIDMAISQQVRRSRKDLSTCWIDYKKAYDSVPHTWLMKVLELYKIDATLRTFLESCMRQWKTVLRYPGCRQIQGNDEPVWIKRGIFQGDSLSPLWFCLALNPLSTLLEDSGLGYRLRRDGQVISHLLYMDDLKLFAPNKLRLMELLKVTETFSSAIRMEFGVDKCAVMHVKRGEIMESEGIQLSDSISLRSLSSSESYKYLGMSEALGINDADMKQSLKERFFCRLKKVLISLLSGGNKVRAFNGWVMPVLMYSFGILKWTQTELDALDRRVRTLLTANRMHHPRSSVMRLYIPRKCGGRGFLNAKTLHNREVCSLRGYFLKAEVGMHRDVVAVDKGLTPLSMAKENWRKPVVLSTDDRKEVWQSKELHGRFYRALHEPGVDFIASVSWLRFGDLFGETEGFVCAIMDEVILTNNYRRHIMKDGTVDVCRACHRPGESIRHIISGCSRLANGEYLHRHNQVARIIHQQLALKYKLVDSEVPYYKYVPDPVLENDHVTLYWDRSIITDRTIVANKPDIVVIDRLARRTMIVDVTIPHDGNLVKAEKEKQIKYLDLAHEVVDMWNVSSAVIVPIVVSANGLMAESLDQHLSRLSLGGWIKGLIQKAVLLDTARIVRRFLSLEP

SEQ ID NO: 29815 - protein, 1136 aa, Amphipyra berbera
MTAMLTRSRAKAITQSTRPRSSAPSLSSASQPPDSSIVSDVTPAAAVASSSSDEFFSPPTSPLPPPARRRGRGRPPASIGPRGPPASDRVPAPGGSVQRMRWTLTMNENCMRAYFGATEGGTNLTACRGRMLSLFQVLEPTVNVSAQRLSDQVRVIQRDHRLTDAALDRLRSEVQSNRIISLQSQTAAQPQAPTVVPPLPIHADEESDDRVTNVSTQCNDQLRSALELAIREYRFTPPNIRPRIPRLPMHRKNRALMCALDSLLSSYFDNSENLEDTHSILYCAAVAACRVAHAKFDNNDRATRPKPAVPAWQCRIERRINEARALIGKLICFREGNTRPRVMRFVRRAFSGTDINPRDYLSRVTERIDFLKQKVYAWANRIRRYKRRVERYTQNRMFHSDERWVYRTWERPDHDVSDTHLPDNDVMNTFWRNIWSMPVTHIEGDWMQEVQRACEPIEEMGDITIVPQDVTSAVRPMANWKSPGPDGLHNFWLKWLRSSHARLASQFQSSLESGSFPEFLTTGVTHLLHKSGSTAEPKNYRPITCLPTVYKLLTSILRAKINSHIINNSIMSVSQNGCKNGSRGTKELLLIDMAISQQVRRSRKDLSTCWIDYKKAYDSVPHTWLMRVLELYKVNTTLCAFLTSCMGQWRTVLHYPGCRQIQGRGEPIRIERGIFQGDSLSPLWFCLALNPLSTLLEGSGLGYRLRRGGQVISHLLYMDDLKLFAPNNLQLVKLLKVTETFSNSIRMEFGVDKCAVMHVKRGGIMESVGTQLSDSIHLRSLSSTETYKYLGMSEALGINETDMKQSLRERFYGRLKKVLKSLLSGGNKVRAFNGWVMPVLMYSFGILKWTQTELDALDRRVRTLLTAYRMHHPRSSVMRLYIPRKCGGRGFLNAKTLHNREVCSLREYFLHADVGMHRDVVAVDKGFTPLSLAKENWRKPVVLDTNGRREVWQSKELHGRFYRALHGPDVDFLASVAWLRFGDLFGETEGFVCAIMDEVILTNNYRKYIVKDGTVDICRACHCPGESIRHIISGCSRLANGEYLHRHNLVARIIHQQLALKYNLVDAEVPYYKYVPDPVLENGHITLYWDRSIITDRTIVANKPDIVVIDRSERLAMIVDITVPHDENLVKAEKDK

SEQ ID NO: 29816 - protein, 1203 aa, Eupsilia transversa
MLTRLAVRRARLPPPDSPLSSASPPPVPSPIVSAVSTPAAVVASSSSDEYFSPPTSPTPVRRQGRGRPPKSLGLRGQPAPSRVPAAGGCVQRMRWTQSMNENVMRAYYGSTEGGINLTAYRVRMLSLFQELEPTVNVSAQRLSDQVRVIQRNHRLDDAELDRLRSEVLSNHIIPSPAQTAELATPSNVIPPRSNRGLEQEDDRVATVSSQCNDRLRNALEDAFREYRYTPTELRPRLPRLPMHKKNRALVCALDSQLKNFFESSEDLIDTHSILYCAAVAACRLANVKFPNCDAATRPKPAVPAWQCRIERRIDGARVLIGKLYCFREGNPRPRVMRFVRRAFSGTGISPQEYMSRVTERIDFLKQKVCAWASRIRRYKRRVDRYTQNRMFQSDERWVYRAWERPEQNVADVCRPDDAATSAFWRSIRSVPVCHAEAGWMHGVERVCEAIPEMEAVIITPLDVARAVRPLPNWKSPGPDGLHNFWLKWLISSHTRLASQFQSSLESGSLPQFLTTGVTHLLHKSGSPAEPKNYRPITCLSTVYKLLTSILRAKINSHIDSHSIMSASQNGCRNGSRGSKELLLIDMAISQQVRRSYKDLSTCWIDYKKAYDSVPHTWLMRVLELYKIDATLRTFLMSCMGQWRTVLRYPGCRQIQGNDEPVWIKRGIFQGDSLSPLWFCLALNPLSTLLEESGLGYRLRRGGQVISHLLYMDDLKLFAHNKLRLMELLKVTETFSSAIRMEFGVDKCAVMHVKRGEIMESEGTQLSDSIHLRSLSATESYKYLGMSEALGINVADMKQALKERFFGRLKKVLISLLSGGNKVRAFNGWVMPVLMYSFGILKWTQTELDALDRRVRTLLTANRMHHPRSSVMRLYIPRKCGGRGFLNAKTLHNREVCSLREYFLKTEEGMHRDVVAVDKGLTPLSMAKENWRKPVVLTTDDRKEVWQSKELHGRFYRVLHEPGVDFLASVSWLRFGDLFGETEGFVCAIMDEVILTNNYRRHIMKDGTVDVCRACHRPGESIRHIISGCSRLANGEYLHRHNQVARIIHQQLALKYKLANSEVPYYKYVPDPVLENDHVTLYWDRSIITDRTIVANKPDIVVIDRLARRAMIVDVTIPHDENLVKAEKEKQIKYLDLAHEVVDMWNVSSAIIVPIVVTANGLMAESLDQHLLRLSLGGWMKGLIQKAVLLDTARIVRRFLSLQP

SEQ ID NO: 29817 - protein, 1202 aa, Amphipyra tragopoginis
MLTRSRARARDNQAHLPPPDSSPSSASQQQGLNPASPAAAVASSSSDEYYSPPSSPPPARRRGGTRPPVGLGLRGPLASDRVPAPGGIVPRMKWTQKMNESVMRAYYGATEGGTNLTAYRGRMLSLFQVLEPAVNVSAQRLSDQVRVIQRGHMLDDTVLDRLRSEVQSSPVISPSSQVLEQQQNLAAALPRPNRADEEDDDRAANVSTQCNDELRSALEDAMREYRYIRSDLRPRIPRLPMHRKSRALVCALDSLLSNYFDGSEDLGDTHSILYCAAVAACRVAHVKFTDNERATRPKNAVPAWQCRIERRISEARALIGKLVCFREGNTRPRVMRFVRRAFSGTDVSPREYMSRVTERIDFLKQKVYAWANRIRRYRRRVDRYTQNRLFQSDERWVYRTWERPDQRVSDTRLPDNDVMNTFWRNIWSVPVAHTEGDWMQEVQRACEPIQEMGDIIISPQDVASAVRPMSNWKSPGPDGLHNFWLKWLRSSHARLASQFQSSLESGSLPQFLTTGVTHLLHKSGSTAEPKNYRPITCLPTVYKVLTSILRTKINNHIDNNSIMSASQNGCRNGSRGTKELLLIDMAISQQVRRSRKDLSTCWIDYKKAYDSVPHTWLMRVLELYKVNTTLCAFLTSCMGQWRTVLRYPGCRQIQGIGEPIRIERGIFQGDSLSPLWFCLALNPLSTLLEGSGLGYRLRRGGQVISHLLYMDDLKLFAPNNLRLLELLKVTETFSNSIRMEFGVDKCAVMHVKRGRIMESVGTQLSDSIQLRSLSSTETYKYLGMSEALGVNETDMKQSLRERFFGRLKKVFNSLLSGGNKVRAFNGWVMPVLMYSFGILKWTQTELDALDRRVRSLLTANRMHHPRSSVMRLYIPRKCGGRGFLNAKTLHNREVCSLREYFSQADVGMHRDVVAVDKGFTPLSLAKENWRKPVVLDANGRREVWRSKELHGRFYRALHGPDVDFLASVAWLRFGDLFGETEGFVCAIMDEVMMTNNYRKYVVKDGTVDICRACHCPGESIRHIVSGCSRLANGEYLHRHNLVARIIHQQLALKYNLVDAEVPYYRYVPDPVLENGHVTLYWDRSIITDRTIVANKPDIVVIDRSERLTMIVDITVPHDENLVKAEKDKEIKYQDLAHEVVAMWDVDSAIIVPIVVTANGLIAKSLDQHLKRLSLGGWIKGLIQKAVLLDTARIVRKFLSLRP

SEQ ID NO: 29818 - protein, 1201 aa, Amphipyra tragopoginis
MLTRARNRTPRPPPPDSPLSSASQPPESSPTVSAVTPAAAVASSSSDEYFSPPTSPTPVRRQGRRRPPNSLGPRGPPAPSRVLATGGCVQRMKWTQKINENVMRAYYGSTEGGTNLTAYRVRMLTLFQELEPAINVSAQRLSDQVRVIQRNHRLDDAALDRLRLEVQNSHVTPVPSQTAVHQLNISVVPPRSDCVDGDVDDRAVTVSSQYNDQLRSALEDAIREYRANPELRPRLPRLPMHNKNRALVCALDSLLSSYFESSEDLCDTHSILYCAAVAACRLANVKFNNSERATRPKPAVPVWQCRIERRIDEARALIGKLICFREGNTRPRVMRFVRRAFSGTGIRPREYMSRVTERIDFLKQKVYAWASRIRRYKRRVERYTLNRMFQCDQRWVYRAWERPDQGVNDGRLPDDDAMNSFWRSIWSVPVIHTEGDWTRDIERACEPIEEMGEILISPQDVASAVRPLPNWKSPGPDGLHNFWIKWLRNSHARLASQFQSSLESGSLPQFFTTGVTHLLHKSGSTAEPKNYRPITCLPTVYKLLTSILRTKINTHVENNSIMSPSQNGCGNGSRGTKELLLIDMAISQQVRRSRKNLSTCWIDYKKAYDSVPHTWLMRVLELYKINATLRTFLMSCMGQWRTVLRYPGCRTIRGSDEPISIERGIFQGDSLSPLWFCLALNPLSTLLEGSRLGYPLRRGGQVVSHLLYMDDLKLFAPTKLQLVELLKVTETFSNSIRMEFGVDKCAVMHVRRGGIMESEGLQLSDSIHLRSLSANDTYKYLGMSEGLDISEADMKQSLKERFFGRLKKVLKSLLSGGNKVRAFNGWVMPVLMYSFGILKWTQTELDALDRRVRTLLTANRMHHPRSSVMRLYIPRKCGGRGLLNAKTLHNREVCSLREYFLHADAGMHRDVVAVDKGLTPLNLAKENWRKPVVLSTNDRREVWQSKELHGRFYRALHGPDVDFLASVSWLRFGDLFGETEGFVCAIMDEVIMTNNYRRYIVKDGTVDICRACHCPGESLRHIISGCSRLANGEYLHRHNQVARIIHQQLALKYNLVESEVPYYKYVPDPVLENGHITLYWDRSIITDRTIVANKPDIVVIDRSERRTMIVDVTIPHDENLVKAEKDKQIKYLDLAHEVVNMWDVDSATIVPIVVTANGLMAKSLDQHLKRLSLGGWIKGLMQKAVLLDTARIVRRFLSLEP

SEQ ID NO: 29819 - protein, 962 aa, Mythimna impura
MHKKNRALVCTLDSLLKNNFESSENLVDTHSILYCGAVAACRLANINFPNIDGTIRPKPAVPAWQYRIERRIDGARVLIGKLHCFREGNTRPRVMRFVRRAFLGTGISPQEYMSRVTERIDFLKQKVCAWASRIRRYKRRVDRYSQNRMFQSDERWVYRAWERPEQNVIDGRRPDDFATITFWRNIWSVPVSHTEGDWMRDVERVCEAIPEMEKVVITPADVAKAVRPLPNWKSPGPDGLQNFWLKWFSNSHAPLASQFQSTLESGSLPEYLTTGVTHLLHKTGNPAEPKNYRPITCLSTVYKLLTSILRAKINRHIENNLIMSASQNGCRNGSRGTKELLLIDMAISQQARRSRKDLSTCWIDYKKAYDSVPHTWLMRVLELYKVDMTLRTFLESCMRQWKTVLRYPGCRPIQGNDEPIRIKRGIFQGDSLSPLWFCLALNPLSTLLEESGLGYRLRRGGQAISHLLYMDDLKLFAPSNLQLMELLKVTETFSSAIRMEFSVDKCAAMHVKRGEIMESEGIQLPDSIHLRSLSSTETYRYLGMSEALGINNADMKQSLKERFFGRLKKVLNSLLSGGNKVRAFNGWVMPVLMYSFGILKWTQTELDALDRRVRTLLTANRMHHPRSSVMRLYISRKCGGRGFLNAKTLHNREVCSLREYFLKTDVGMHRDVVAVDKGLTPLSMAKEDWRKPVILTTDDRKEIWKSKELHGRFYRALHEPDVDFLASVAWLRFSDLFGETEGFICAIMDEVILTNNYRRFIMKDGTVDVCRACHRPGESIRHIISGCSRLANGEYLHRHNQVARIIHQQLALKYNLVDSEVPYYKYVPDPVLENDHVTLYWDRSIITDRTIVANKPDIVVIDRLARRAVIVDVTIPHDENLVKAEKEKQIKYLDLAHEVVDMWNVDSAVIVPMVVTANGLIAKSFDDHLSKLSLRGWIKGLIQKAVLLDTARIVRRFLSLEP

SEQ ID NO: 29820 - protein, 1198 aa, Laspeyria flexula
MLTRARKREALIPPPDSSLSVASQPPDPVSTTPPAAEASSSSSSDEYYSPPTSPPPVRRRGRGRPPASLGLRGPPAANRAPATGGNVRRMKWTRSINENVMRAYFVATEGGTNLTMYRDRMLPVFQVLEPSINVSAQRLSDQVRVIQRAHMLDDATLVRLRSEVRSSPVVPSSTQLVTGVADNLPQSHPTSAVEDVDCGATDVSTQCNDRLRSALECALSEYRCKLSADRPRLPRLPTHKKNIALVCALDSLLSEFLDSSEDIGDTHSILYCAAVAACRVAGVKFPTDTATRPRSGVPAWQRRIECRIADARALIGKLICFRTGNTRPRVMRFVKRAFLGTDVRPQDYSSRVTERIDYLKQKVCAWANRIRRYRRRVDRYYQNCTFQKDERWVYRRWECSDLDVAHSGRPDDDVTSLFWRNIWSAPVSHTESDWTRVVERSCESIRDMEPISITTEDVASAARSLPNWKSAGPDGLHNFWLKWLHSSHARLAFGFQSCLESGSIPLFLTTGVTHLLYKSGSVADPKNYRPITCLPTVYKLLTSILRTKLVKHVNDNNIMSISQNGCRNGARGTKELLIIDMAVNQQVRRNRKDLSTCWIDYKKAYDSVPHTWLLRVLELYKIDATLCTFLKTCMGQWRTALRYPGCPQSLGNGNPIRIERGIFQGDGLSPLWFCLALNPLSTLLEDSGLGYRLRRGGQVISHLLYMDDLKLFAPGTSQLTALLKVTETFSNSIKMEFGVDKCAVMHVKRGGILESEGIQLSDSTQLRSLSAAETYKYLGMSQALGIMDSGVKQVLGERFLSRLKKVLKSLLSGGNKVRAFNSWVMPVLTYSFGILRWTQTELDALDRKVRTQLTAFRMHHPRSSVMRLYIPRKCGGRGLLCAKTLHNREVYNLREYFLKTDVEMHRDVVAVDNGLTPLGLAKENWRKPAILSLDDRKEVWKGKELHGRFYRALHGPDVDSLSSVSWLRFGDLFGETEGFVCAIMDEVIMTNNYRRHILKDGTVDICRACHRPGESLRHIVSGCSRLANGEYLHRHNQVARIVHQQLALKYGLVDSEVPYYMYVPDPVLENGHATMYWDRSIITDRTIVANKPDIVVIDRLERLAVIIDVTVPHDENLVKAENDKQVKYLDLAHEIVDMWDVDSAIIVPIVVSVNGLIAKSLHRHLKRLALGGWVVGQMQKAVLLDTARIVRRFLSLEP

SEQ ID NO: 29821 - protein, 1100 aa, Xestia xanthographa
MRAYYGATEGGINLTAYRGRMLSLFQVLEPGVSTSAQRLSDQVRVIQRNHMLDDTVLDRLRSESRSNLVTPASPLIAVQVQNVSSAPPRSDRDGEEDDSEVISVSTQCNAQLRSALESAFREYRSTPPKLRPRLPRLPMHNKNKALMCALDSQLSNCFDSSKDLTDTHSILYCGAVAACRVVHVKFPNNDGATRPKLAVPAWQCRIERRIGEARALIGKLICFREGNTRPRVMRFVRRAFSGTDISFRDYLARVTERIDSLKQKICAWASRIRRYKRRVERCTQNRTFQSDERWVYRAWERPDQGVTDTRLPDDSAMYSFWRNIWSVPVSHTEGDWTREVEQACDPIPEMGAIIISPQDVARAVRPLPNWKSPGPDGLHNFWIKWFQRSHARLASQFQSALESGSLPQFLTTGITHLLHKSGSAAEPKNYRPITCLPTVYKVLTSILRAKINQHIDSNSIMSASQNGCRNGSRGTKELLLIDMAISQQVRRSRKNLSTCWIDYKKAYDSVPHTWLMRVLELYKIDATLRTFLMSCMGHWRTVLHYPGCRQIQGNSEPIRIERGIFQGDSLSPLWFCLALNPLSTLLERSGLGYLLRRDGQVISHLLYMDDLKLFAPNNFQLMKLLKVTETFSSAIRMEFGVDKCAVMHVKRGEIMESEGTQLSDSIHLRSLSSTETYKYLGMSEALGINTADMKQSLRERFFGHLNKVLGSLLSGGNKVRAFNGWVMPVLMYSFGILKWTQTELDALDRRVRTLLTANRMHHPRSSVMRLYISRKCGGRGFLSAKTLHNREVYSLREYFLEAEGEMHRDVVSVDKGLTPLSLANGNWRKPKVLDTNDRKVEWQGKELHGRFYRALHGPDVDFLASVSWLRFGDLFGETEGFICAIMDEVMMTNNYRKYIVKDGTVDICRACHRPGESIRHIISGCSSLANGEYLHRHNLVARIIHQQLALKYNLVESEVPYYKYAPDPVLDNGHITLYWDRPITTDRTVVANRPDIVVIDRLVRRTMIVDITIPHDENLVKAKKDKQFKYLDLAREVVDMWDVGTAVIVPIVVSANGLIAKSLDQHLRRLSLGSWIKGLIQKAVLLDTARIVRRFLSQEP

SEQ ID NO: 29822 - protein, 1192 aa, Abrostola tripartita
MITRSRAKIAQSTSPDSSPRSASQLPDQQALHSPASAVASSSSDEYFSPPTSPTPVRRQRRGRPPTSLGLRGQLAPNRVPASGGCVQRMKWSQQINENVMRAYYGSTEGGTNLTAYRDRMLALFQDLEPAVNVSAQRLSDQVRVILRNHRLDDATLDRLRSEVHSSPVTCRPVHVVVPPIGPLPCDMEADDRATTVSTQYNDILRSTLEDTIREYRVSSPGLRPRLPRLPMHNKNKAMISALDSLLSSYFEGSEDLCDTHSILYCAAATACRVANVKCFDSSTATRPKPAVPAWQCRIESRITEARTLIGKLTAFREGNIRPRVMRFVRRAFAGVDINSREYATRATERIDFYKQKVYAWASRIRRYKRRVDRFSQNRIFNQDQRWVYRNWERSAQGVSDGHLPDDDVTNAFWRSIWSVPVNHTEGSWMLDVEQSCESIPEMGTITISPQDVASAVRPMSNWKSPGPDGLHNFWIKWLRSSHGCLASQFQSAIEVGSLPQFLTTGSTHLLHKTGSTTDPKNFRPITCLPTIYKLLTSILRAKITKHIDDNNIMSASQNGCKNGSRGTKELLLIDMTICQQVRRSKKDLSTCWIDYKKAYDSVPHTWLMRVLELYKIDTTLRTFLLSCMRQWRTVLHYPGCRDIQQDGEPIRIERGIFQGDSLSPLWFCLALNPLSTLLENSGLGYSLRRSSQVISHLLYMDDLKLFAPSRFQLIKLLKITEAFSNSIRMEFGVDKCAVMHVKRGGIIESQGIQLSDSINLRSLSATETYKYLGMSEALGINVVDMKQSLKERFFGRLNKVLKSLLSGGNKVRAFNGWVMPTLMYSFGILKWTQTELDALDRRVRTLLTSNRMHHPRSSVMRLYIPRKCGGRGFLNAKTLHNREVCSLREYFLRAEVGMHREVVAVDKGLTPLFLAKENWCKPVVLSVNDRRDVWQSKELHGRFYKALHGPNVDLLSSVSWLRFGDLFGETEGFVCAIMDEVIMTNNYRKYILKDGTVDICRACHRPGESLRHIMSGCSRLANGEYLHRHNQVARIIHQQLALKYKLVDSEMPYYRYVPDPVLENDHITLYWDRSIITDRTIVANKPDIVVIDRLERRAMIVDITIPHDENLVKAERDKQIKYLDLAHEVVDMWEVDSAIIVPIVVSANGLMAKSLDQHLKRLTLGGWVKGLMQKAVLLDTARIVRRFLSLEP

SEQ ID NO: 29823 - protein, 1201 aa, Mesoligia furuncula
MLTRLAARRARLPPPDSSLSSAPPPPESSPIVSAVTPAVAVASSSSDEYFSPPTSPTPVRRQGRGRPPNSLGLRGHPAPSRVPATGGCVQRMRWTQSMNENVMRAYYRSTEGGINLTAYRDRMLSLFQELEPTVNVSAQRLSDQVRVIQRNHRLDDIALDRLRSEVLSNHIVSTSAQTAAQASTVDAILPRSNHVEEEDDRVDTVSSQCNVRLRSALEDALCEYRSTPTELRPRLPRLPMHKKNRALVCALDSQLKNFFESSEDLVDTHSILYCAAVAACRLANVKFPSCDGATRPKPAVPAWQRRIERRIDGTRVLIGKLYCFREGNTRPRVMRFVRRAFSGTGISPREYISRVTERIDFLKQKVCAWASRIRRYKRRVDRYTQNRMFQSDERWVYRAWERPEQNVTDVYRPDDATTSAFWCSIWSIPVCHTEAGWMRDVERVCESVPEMETVLITPSDVAKAVRPLPNWKSPGPDGLHNFWLKWLISSHTCLASQFQSSLESGSLPQFLTTGVTHLLHKSGSPAEPKNYRPITCLSTVYKLLTSILRAKINTHIESNSIMSASQNGCRNGSRGTKELLLIDMAISQQVRRSRKDLSTCWIDYKKAYDSVPHTWLMKVLELYKIDATLRTFLESCMRQWKTVLRYPGCRQIQGNDEPVWIKRGIFQGDSLSPLWFCLALNPLSTLLEDSGLGYRLRRDGQVISHLLYMDDLKLFAPNKLRLMELLKVTETFSSAIRMEFGVDKCAVMHVKRGEIMESEGIQLSDSISLRSLSSSESYKYLGMSEALGINDADMKQSLKERFFCRLKKVLISLLSGGNKVRAFNGWVMPVLMYSFGILKWTQTELDALDRRVRTLLTANRMHHPRSSVMRLYIPRKSGGRGFLNAKTLHNREVCSLREYFLKAEVGMHRDVVAVDKGLTPLSMAKENWRKPVVLSTDDRKKVWQSKELHGRFYRALHEPGVDFLASISWLRFGDLFGETEGFVCAIMDEVILTNNYRRHIMRDGTVDVCRACHRPGESIRHIISGCSRLANGEYLHRHNQVARIIHQQLALKYKLVDSEVPYYKYVPDPVLENDHVTLYWDRSIITDRTIVANKPDIVVIDRLARRTMIVDVTIPHDGNLVKAEKEKQIKYLDLAHEVVDMWNVSSAIIVPIVVSANGLMAESLDQHLSRLSLGGWIKGLIQKAVLLDTARIVRRFLSLEP

SEQ ID NO: 29824 - protein, 1198 aa, Xestia c-nigrum
MLTRAAARRARLPPPDPSLSSDSLPPEPSPIVSAVTPAVAVASSSSDEYFSPPTTPPPARRRGGRRPPDGLGPRGPPASDRVPASGGSVQRMRWTQSNNENVMRAYYGATEGGNNLTAYRVRMLSLFQVLEPAVNVSAQRLSDQVRVIQRNRMLDDTVLDRLRTEMHSSHVIATPPSQAVVPPQSTTITYRDDDVSSDMITNVGTQYSEDMRSALEGAIREYRFMTPELRPRLPRLPMHNKNRMLVAVLDSQLSSYFDNCEDLTDVHSILYCAAVAACRVARVKFSDDRATRPKPAVPAWQYRIEQRIGGARALIGKLICFREGNTRPRVMRFVRRAFSGTDINPRDYMSCVTERIDFLKQKVYAWASRIRRYKRRVDRYTQNRTFQRDERWVYRAWERPDQGVADTRLPDDDAMCSFWRSIWSVPVSHAEGEWTRVIERACDPVPEMGAITISPQDVACAVRPLPNWKSPGPDGLHNFWIKWFTRSHARLATLFQSALESGSLPEFLTTGITHLLHKSGSTAEPKNYRPITCLPTVYKVLTSILRTKICKHVDDNSVMSASQNRCRNGSRGTKELLLIDMAISQQVRRSRKDLSTCWIDYKKAYDSVPHTWLMRVLELYKVDATLRTFLMSCMGQWRTVLRYPGCRQIQRNTEPIRIERGIFQGDSLSPLWFCLALNPLSTLLEDSGLGYQLRKDGRVISHLLYMDDLKLFAPNDLQLMELLKVTETFSSAIRMEFGVDKCAVMHVKRGGIVESVGTQLSDFINLRSLSATETYKYLGMSEALGINVADMKQSLKERFFGRLKKVFNSLLSGGNKVRAFNGWVMPVLMYSIGILKWTQTELDALDTKVRKLLTAFRMHHPRSSVMRLYIPRKCGGRGFLNAKTLHNREICSLRDYFLEADVGMHRDVVTMDKGLTPLSLAKENWHKPIILTTDDRRKEWQGKELHGRYYRALHGPDVDFLASVSWLRSGDLFGETEGFVCAIMDEVMMTNNYRRFIVKDGTVDICRACHRPGESIRHIISGCSRLANGEYLHRHNLVARIIHQQLALKYNLVESEVPYYRYVPDPVLVNGSITLYWDQSIITDRTVIANRPDIVVMDRSERHAMIVDITVPHDENLVKAEKDKQIKYLDLAREVVDMWEVDSAIIVPIVVSAHGLIAKSLDQHLRRLSLGSWIKGLIQKAVLLDTARIVRRFLSLEP

SEQ ID NO: 29825 - protein, 1198 aa, Griposia aprilina
MLTRSAARRARPPPPDSSLSSASLPPVSSPTVSAVTTPAAVVASSSSDEYFSPPTTPPPVRRRGGHRPPDGLGPRGPPASDRVPAPGGSVQRMRWTRSINENVMRSYYGATEGGNNLTAYRVRMLSLFQVLEPAVNVSAQRLSDQVRVIQRNHMLDDTVLDRLRNEIQSSHVIAPPSQTVVVLPQSNTSQADEESDDRATNVSTQCNDELRSALEDAIREYRFISPELRPRLPRLPMHNKNRVLVAALDAQLSNYFDDCVDLTDTHSILYCAAVAACRVAHVKFANDSRVTRPKPAVPAWQCRIERRIGGARALIGKLICFREGNTRPRVMRFVRRAFAGTNISPQDYMSCVTERIDFLKQKVYAWANRISRYKRRVERYTQNRTFQRDERWVYRDWERPDQGVADTCLPDDDGMCSFWRNIWSVPVSHTEGDWAREVERACDPIPEMGAISIYPQDVTRAVRPLPNWKSPGPDGLHNFWIKWFGRSHARLAAQYQVALEPGSLPQFLTTGVTHLLHKSGSTAEPKNYRPITCLPTVYKDLTSILRAKINKHIDTNSIMSPSQNGCRNGSRGTKELLLIDMAISQQVRRSRKDLSTCWIDYKKAYDSVPHTWLVRVLELYKVDATLRTFLKSCMGQWRTVLHYPGCPNIQRNNEPIRIERGIFQGDSLSPLWFCLALNPLSTLLEDSGLGYRLRRGGQVISHLLYMDDLKLFAPDDLQLMELLKVTETFSSAIRMEFGVDKCAVMHVKRGEIVESVGTQLSDSINLRALSAFETYKYLGMSEALGINGTDMKQLLKERFFGRLKKVFNSLLSGGNKVRAFNGWVMPVLMYSFGILKWTQTEFDARDRKVRTLLTANRMHHPRSSVMRLYIPQKCGGRGFLNSKTLHNREICSLREYFLEAVVGMHRDVVTVDKGLTPLSLAKENWRKPVVLDTNDRMEVWQIKELHGRFFRALHGPDVDQLASVAWLRFGDLFGETEGFVCAIMDEVILTNNYRRHIMKDGTVDVCRACHRPGESIRHIISGCSRLANEEYLHRHNLVARIIHQQLVLKYSLVESKVPYYRYVPDPVLENGHITLYWDRSIITDRTIVANKPDIVMVDRLERRAMIVDITVPHDGNLVKAEKDKQIKYLDLAREVVDMWDVDSAIIVPIVVTANGLIAKSLDQHLRRLSLGSWIKGLIQIAVLLDTARIVRRFLSLEP

SEQ ID NO: 29826 - protein, 1110 aa, Griposia aprilina
MKWTQSMNENVMRAYYRSTEGGTNLTAYRDRMLSLFQELEPTINVSAQRLSDQVRVIQRSHRLDDAALDRLRSELNNHIISTPAQTAVQASSIDEIQPRSNHGVEVEDDRVASVSSQCNARLRSALEDAFREYRSTPIELRPRLPRLPMHKKNRALVCALDSQLKNVFESSENLIDTHSILYCAAVAACRLANVRFPNCDGATRPKPAVPAWQCRIKRRIDGARVLIGKLHCFREGNNRPRVMRFVRRAFSGTGISPREYMSHATERIDFLKQKVCAWASRIRRYKRRVDRYTQNRMFQSDERWVYRAWERPEQNVTDECRPDDATTSTFWRSIWSVPVCHVEADWMRDVGRACETVPEMDAVLITPLDVARAVRPLPNWKSPGPDGLHNFWLKWLISSHACLASQYQSSLESGSLPQFLTTGVTHLLHKSGSPTDPKNYRPITCLSTVYKLLTSILRAKINTHIESNSIMSASQNGCRNGSRGTKELLLIDMTISQQVRRSRRDLSTCWIDYKKAYDSVPHTWLMRVLELYKIDTTLRTFLRSCMGQWRTVLRYPGCRQIQANDEPVWIKRGIFQGDSLSPLWFCLALNPLSTLLEDSGLGYRLRKDGQVISHLLYMDDLKLFAPNKLQLMELLKVTETFSSTIRMEFGVDKCAVMHVKRGEVMEPEGIQLSDSIHLRSLSSSESYKYLGMSEALGINVADMKQSLRERFFGRLKKVLISLLSGGNKVRAFNGWVMPVLMYSFGILKWTQTELDALDRRVRTLLTANRMHHPRSSVMRLYIPRKCGGRGFLNAKTLHNREVCSLREYFLKAEMGMHRDVVAVDKGFTPLSMAKENWRKPVVLTTDDRKEVWQSKELHGRFYRALHEPGVDFLASVSWLRFGDLFGETEGFVCAIMDEVILTNNYRRHIMKDGTVDMCRACHRPGESIRHIVSGCSRLANGEYLHRHNQVARIIHQQLALKYKLVDSEVPYYKYVPDPVLENDHITLYWDRSIITDRTIVANKPDIVVIDRLARRTMIIDITIPHDENLVKAEKEKQIKYLDLAHEVVEMWNVSSAVIVPIVVSANGLMAKSLDQHLSRLSLDGWVKGLIQKAVLLDTARIVRRFLSLEP

SEQ ID NO: 29827 - protein, 1109 aa, Amphipyra berbera
MKWTQSINENVMRAYYGSTEGGTNLTAYRVRMLTLFQELEPAINVSAQRLSDQVRVIQRNHRLDDAALDRLRLEVQNSRAIPVPSQTAVHQLINVAPPRSDRVDGDEDDGAVTVSSQYNDRLRSALEDAIRECRANPESRPRLPRLPMHNKNRALVCALDSLLASYFESSEDLGDTHSILYCAAVAACRVANVKFNNSERATRPKLAVPAWQCRIERRIDETRALIGKLICFREGNTRPRVMRFVRRAFSGTGISPREYTSRATERIDFLKQKVCAWASRIRRYKRRVERYTQNRMFQCDQRWVYRAWERPDQSVSGGRLPDDDAMSSFWRSIWSVPVIHTEGDWMRDIERTCESIEEMGEIVISPQDVAGAVRPLPNWKSPGPDGLHNFWIKWLRSSHARLASQFQSSLESGSLPQFLTTGVTHLLHKSGSTAEPKNYRPITCLPTVYKLLTSIFRSKINTHIGNNSVLSSSQNGCRNGSRGTKELLLIDTAISQQVRRSQKSLSTCWIDYKKAYDSVPHTWLMRVLELYKINTTLRTFLRSCMGQWRTVLRYPGCQPIRRSGEPIRIERGIFQGDSLSPLWFCLALNPLSTLLEGSGLGYPLRRGDQVVSHLLYMDDLKLFAPTKLQLVDLLKVTETFSNSIRMEFGVDKCAVMHVRRGRIMESEGLQLSDFIHLSPLSANDTYKYLGMSEGLGISEADMKQSLRERFFGRLKKVLKSLLSGGNKVRAFNGWVMPVLMYSFGILKWTQTELDALDRRVRTLLTANRMHHPRSSVMRLYIPRKCGGRGLLNAKTLHNREVCSLREFFLHADAGMHRDVVAVDKGLTPLSLARENWRKPVVLSTNDRREIWQSKELHGRFYRALHGPDVDFLASVSWLRFGDLFGETEGFVCAIMDEVIMTNNYRKYIVKDGTVDICRACHCPGESLRHIISGCSRLANGEYLHRHNQVARIIHQQLALKYNLVESEVPYYRYVPDPVLENGRITLYWDRSIITDRTIVANKPDIVVIDRSERRTMIVDVTIPHDGNLVKAEKDKQIKYLDLAHEVVNMWDVESATIVPIVVTANGLMAKSLDKHLMRLSLGGWIKGLIQKAVLLDTARIVRRFLSLEP

SEQ ID NO: 29828 - protein, 960 aa, Mythimna ferrago
MHKRNRALVCALDSQLSICFDSSEDLADTHSILYCAAVAACRVAHVKFPNCNRATRPAVPAWQCRIERRIGEARALIGKLICFREGNTRPRVMRFVRRAFSGTDISPRDYLPCVTERIDFLKQKIYAWANRIRRYKRRVERYTQNRTFQSNERWVYRAWERPDQGVTDTRLPDDDAMCSFWRSIWSAPVSHTEGDWIREVERACDLLPEMGAITISPQDVARAVRPLPNWKSPGPDGLHNFWLKWFQGSHARLASQFQSALESGSLPQFLTTGITHLLHKSGSTAEPKNYRPITCLPTVYKVLTSILRAKINSHIETNSIMSVSQNGCRNGSRGTKELLLIDIAISQQVRRSRKNLSACWIDYKKAYDSVPHTWLMRVLELYKVDATLRTFLMSCMGQWKTVLHYPGCRQIWENSEPIRIERGIFQGDSLSPLWFCLALNPLSTLLEGSGLGYRLKRGGQVISHLLYMDDLKLFAPNNLQLMELLKVTETFSSAIRMDFGVDKCAVIHVKRGEIMESEGIQLSDSIHLRSLSSTETYKNLGMSEALGINTDDVKQSLKERFFGRLNKVLNSLLSGGNKVRAFNGWVMPVLMYSFGILKWTQTELDALDRRVRTLLTANRMHHPRSSVMRLYIPRKCGGRGFLNAKSLHNREVCSLREYFLAVDVGMHRDVVAVDKGLTPLSLANENWRKPLVLDTNDRREVWQGKELHGRFYRALHGPDVDLLASVSWLRFGDLFGETEGFVFAIMDEVMMTNNYRKYIVKDGTVDICRACHRPGESIRHIISGCSRLANGDYLHRHNLVARIIHQQLALKYNLVESEVPYYRYVPDPVLDNGSITLYWDRSIITDRTIVANKPDIVVIDRLERRTMIVDIAVPHDENLVKAEKDKQIKYLDLAREVVDMWEVDRAIIVPIVVTANGLIAKSLEQHLRRLSLGSWIKGLIQKAVLLDTARIVRRFLSQEP

SEQ ID NO: 29829 - protein, 1200 aa, Mythimna ferrago
MLTRSRARSQIAQPTSSGSSLNSASQPPGPAPAVSPVIPEAAVASSSSDEYFSPPTTPPPARRRGRGRPPACLGPRDPPASDRVPAAGGSVQRMRWTSSINENVMRSYFGATEGGINLTAYRGRMLSLFQMLEPAVNVSVQRLSDQVRVIQRNRMLDDAVLDRLRLESQSSRVSAATPSAAAQRQTSAAPRPDHVGDADDDAPISVSTQCNERLRGALEDAFREYRSIPPEVRPRLPRLPMHKRNRALVCALDSQLSICFDSSENLADTDSILYCAAVAACRVAHVKFPNCNRATRPAVPAWQCRIERRIGEARALIGKLICFREGNTRPRVMRFVRRAFSGTDISPRDYLPCVTERIDFLKQKIYAWANRIRRYKRRVERYTQNRTFQSNERWVYRAWERPDQGVTDTRLPDDDAMCSFWRSIWSTPVSHTEGDWIREVERACDLLPEMGAITISPQDVARAVRPLPNWKSPGPDGLHNFWLKWFQGSHARLASQFQSALESGSLPQFLTTGITHLLHKSGSTAEPKNYRPITCLPTVYKVLTSILRAKINSHIETNSIMSVSQNGCRNGSRATKELLLIDIAISQQVRRSRKNLSACWIDYKKAYDSVPHTSLMRVLELYKVDATLRTFLMSCMGQWRTVLHYPGCRQIWENSEPIRIERGIFQGDSLSPLWFCLALNPLSTLLEGSGLGYRLKRGGQVISHLLYMDDLKLFAPNNLQLMELLKVTETFSSAIRMDFGVDKCAVIHVKRGEIMESEGIQLSDSIHLRSLSSTETYKYLGMSEALDINTDDMKQSLKERFFGRLNKVLNSLLSGGNKVRAFNGWVMPVLMYSFGILKWTQTELDALDRRVRTLLTVNRMHHPRSSVMRLYIPRKCGGRGFLNAKSLHNREVCSLREYFLAVDVGMHRDVVAVDKGLTPLSLANENWRKPLVLDTNDRREVWQGKELHGRFYRALHGPDVDLLASVSWLRFGDLFGETEGFVFAIMDEVMMTNNYRKYIVKDGTVDICRACHRPGESIRHIISGCSRLANGDYLHRHNLVARIIHQQLALKYNLVESEVPYYRYVPDPVLDNGSITLYWDRSIITDRTIVANKPDIVVIDRLERRTMIVDIAVPHDENLVKAEKDKQIKYLDLAREVVDMWEVDKAIIVPIVVTANGLIAKSLEQHLRRLSLGSWIKGQIQKAVLLDTARIVRRFLSQEP

SEQ ID NO: 29830 - protein, 1203 aa, Agrochola circellaris
MLTRSAAHRARLPPPDSPLSSASPPPVPSPIVSAASTPAAVVASSSSDEYFSPPTSPIPVRRQGRGRPPRSLGLRGQPAPSRVPAAGGCVQRMRWTQSMNENVMRAYYGSTEGGTNLTAYRVRMLSLFQELEPTANVSAQRLSDQVRVIQRNHRLDDAALDRLRSEVLSNHIVSTPAQTAAQASSIDAIPPRSNHGVAEDNDRAATVSSQCNVRLRSALEDAFREYRYTPTELRPRLPRLPMHKKNRALVCALDSQLRNYFENSEDLIDTHSILYCAAVAACRLANVKFPNYDGVTRPKPAVPAWQCRIEQRIDGARALIGKLYCFREGNTRPRVMRFVRRAFSGTGISPREYMPRVTERIDFLKQKVCAWASRIRRYKRRVERYTQNRMFQSDERWVYRAWERPEQNVADVCRPDDAATSAFWRSIWSVPVCHAEADWMQDVERVCETIPEMDKIEITPLDIAKAVRPLLNWKSPGPDGLHNFWLKWLISSHTCLASQFQSSLESGSLPQFLTTGVTHLLHKSGSPAEPKNYRPITCLSTVYKLLTSILRAKINTHIDNNSIMSASQNGCRNGSRGTKELLLIDMAISQQVRRSRKDLSTCWIDYKKAYDSVPHTWLMRVLELYKIDATLRTFLMSCMGQWRTVLRYPGCRQIQGNNEPVWIKRGIFQGDSLSPLWFCLALNPLSTLLEDSGLGYRLRRGGQVISHLLYMDDLKLFAPNKLRLMELLKVTETFSSAIRMEFGVDKCAVMHVKRGEIMESEGTQLSESIHLRSLSSSESYKYLGMSEALGINVADMKQSLKERFFGRLKKVLISLLSGGNKVRAFNGWVMPVLMYSFGILKWTQTELDALDRRVRTLLTANRMHHPRSSVMRLYIPRKCGGRGFLNAKTLHNREVCNLREYFLKAEVGMHRDVVAVDKGLTPLSMAKENWHKPVVLTTDDRKEVWQSKELHGRFYRALHEPGVDFLASVSWLRFGDLFGETEGFVCAIMDEVILTNNYRRYIMKDGTVDVCRACHRPGESIRHIISGCSRLANGEYLHRHNQVARIIHQQLALKYKLVVSEVPYYKYVPDPVLENDHVTMYWDRSIITDRTIVANKPDIVVIDRLARRAMIVDVTIPHDGNLVKAEKEKQIKYLDLAHEVVDMWNVSSAIIVPIVVTANGLMAESLDQHLSRLSLGGWIKGLIQKAVLLDTARIVRRFLSLQP

SEQ ID NO: 29831 - protein, 1203 aa, Eupsilia transversa
MLTRSAVRRARLPPPDSPLSSASPPPVPSPIVSAVSTPAAVVASSSSDEYFSPPTSPTPVRRQGRGRPPKSLGLRGQPAPSRVPAAGGCVQRMRWTQSMNENVMRAYYGSTEGGINLTAYRVRMLSLFQELEPTVNVSAQRLSDQVRVIQRNHRLDDAELDRLRSEVLSNHIIPSPAQTAELATPSNVIPPRSNRGLEQEDDRVATVSSQCNDRLRNALEDAFREYRYTPTELRPRLPRLPMHKKNRALVCALDSQLKNFFESSEDLIDTHSILYCAAVAACRLANVKFPNCDAATRPKPAVPAWQCRIERRIDGARVLIGKLYCFREGNTRPRVMRFVRRAFSGTGISPQEYMSRVTERIDFLKQKVCAWASRIRRYKRRVDRYTQNRMFQSDERWVYRAWERPEQNVADVCRPDDAATSAFWRSIWSVPVCHAEAGWMHGVERVCEAIPEMEAVIITPLDVARAVRPLPNWKSPGPDGLHNFWLKWLISSHTRLASQFQSSLESGSLPQFLTTGVTHLLHKSGSPAEPKNYRPITCLSTVYKLLTSILRAKINSHIDSHSIMSASQNGCRSGSRGTKELLLIDMAISQQVRRSRKDLSTCWIDYKKAYDSVPHTWLMRVLELYKIDATLRIFLMSCMGQWRTVLRYPGCRQIQGNDEPVWIKRGIFQGDSLSPLWFCLALNPLSTLLEESGLGYRLRRGGQVISHLLYMDDLKLFAHNKLRLMELLKVTETFSSAIRMEFGVDKCAVMHVKRGEIMESEGTQLSDSIHLRSLSSTESYKYLGMSEALGINVADMKQALKERFFGRLKKVLISLLSGGNKVRAFNGWVMPVLMYSFGILKWTQTELDALDRRVRTLLTANRMHHPRSSVMRLYIPRKCGGRGFLNAKTLHNREVCSLREYFLKTEEGMHRDVVAVDKGLTPLSMAKENWRKPVVLTTDDRKEVWQSKELHGRFYRVLHEPGVDFLASVSWLRFGDLFGETEGFVCAIMDEVILTNNYRRHIMKDGTVDVCRACHRPGESIRHIISGCSRLANGEYLHRHNQVARIIHQQLALKYKLADSEVPYYKYVPDPVLENDHVTLYWDRSIITDRTIVANKPDIVVIDRLARRAMIVDVTIPHDENLVKAEKEKQIKYLDLAHEVVDMWNVSSAIIVPIVVTANGLMAESLDQHLLRLSLGGWIKGLIQKAVLLDTARIVRRFLSLQP

SEQ ID NO: 29832 - protein, 1202 aa, Amphipyra tragopoginis
MLTRSRARARDNQAHLPPPDSSPSSASQQQGLNPASPAAAVASSSSDEYYSPPSSPPPARRRGGTRPPVGLGLRGPLASDRVPAPGGIVPRMKWTQKMNESVMRAYYGATEGGTNLTAYRSRMLSLFQVLEPAVNVSAQRLSDQVRVIQRGHMLDDTVLDRLRSEVQSSPVISPSSQVLEQQQNLAAALPRPNRADEEDDDRAANVSTQCNDELRSALEDAMREYRYTRSDLRPRIPRLPMHRKNRALVCALDSLLSNYFDGSEDLGDTHSILYCAAVAACRVAHVKFTDNERATRPKNAVPAWQCRIERRISEARALIGKLVCFREGNTRPRVMRFVRRAFSGTDVSPREYMSRVTERIDFLKQKVYAWANRIRRYRRRVDRYTQNRLFQSDERWVYRTWERPDQRVGDTRLPDNDVMNTFWRNIWSVPVAHTEGDWMQEVQRACEPIQEMGDIIISPQDVASAVRPMSNWKSPGPDGLHNFWLKWLRSSHARLASQFQSSLESGSLPQFLTTGVTHLLHKSGSTAEPKNYRPITCLPTVYKVLTSILRTKINNHIDNNSIMSASQNGCRNGSRGTKELLLIDMAISQQVRRSRKDLSTCWIDYKKAYDLVPHTWLMRVLELYKVNTTLCAFLTSCMGQWRTVLRYPGCRQIQGIGEPIRIERGIFQGDSLSPLWFCLALNPLSTLLEGSGLGYRLRRGGQVISHLLYMDDLKLFAPNNLRLLELLKVTETFSNSIRMEFGVDKCAVMHVKRGRIMESVGTQLSDSIQLRSLSSTETYKYLGMSEALGVNETDMKQSLKERFFGRLKKVFNSLLSGGNKVRAFNGWVMPVLMYSFGILKWTQTELDALDRRVRSLLTANRMHHPRSSVMRLYIPRKCGGRGFLNAKTLHNREVCSLREYFSQADVGMHRDVVAVDKGFTPLSLAKENWRKPVVLDTNGRREVWRSKELHGRFYRALHGPDVDFLASVAWLRFGDLFGETEGFVCAIMDEVMMTNNYRKYIVKDGTVDICRACHCPGESIRHIVSGCSRLANGEYLHRHNLVARIIHQQLALKYNLVDAEVPYYKYVPDPVLENGHVTLYWDRSIITDRTIVANKPDIVVIDRSERLTMIVDITVPHDENLVKAEKDKEIKYQDLAHEVVAMWDVDSAIIVPIVVTANGLIAKSLDQHLKRLSLGSWIKGLIQKAVLLDTARIVRKFLSLRP

SEQ ID NO: 29833 - protein, 1207 aa, Amphipyra tragopoginis
MLTRSRAKTLQRTHPTPSASSLSSASQPPEPASIVSDVTPAAAVASSSSDEYFSPATSPSPPPARRRGRGRPPTCLGSRGPPASDRVPAPGGSVQRMRWTQSMNENCMRAYFGATEGGTNLTAYRGRMLSLFQTLEPAVNVSAQRLSDQVRVIQRDHRLDDAALGRLRDEMQNSHATPPPSQIRTQPLVPPAVPLQPNHADEEEQDRAISAGTQYSEIMRSALEDALREFRSTPPELRPRLPRLPMHNKNRALVCALDSLLSNVLESSKDIGDTHSILYCAAVAACRVAHVKFPNDNRATRPKSTVPAWQCRIERRIDEARVLIGKLTCFREGNIRPRVMRFVRRAFSGTDVSPGEYVSRVTERIDFLKQKVYAWANRIRRYRRRVDRYTQNRIFQSDQRWVYRTWERPDQGVSDTHLPDNDVMNAFWRNIWSVPVTHTEGDWMQEVQRACEPIQEMGAVTIGPQDVTSAVRPMPNWKSPGPDGLHNFWIKWLRSSHARLASQFQSSLESGSLPSFLTTGVTHLLFKSGSTAEPKNYRPITCLPTVYKLLTSILRAKINNHIDNNAIMSDSQNGCKNGSRGTKELLLIDMAISQQVRRSRKDLSTCWIDYKKAYDSVPHTWLMRVLELYKINATLRTFLMSCMGQWRTVLHYPGCRQIQGNGELIRIERGIFQGDSLSPLWFCLALNPLSTLLEGSGLGYRLRRGGQVISHLLYMDDLKLFAPNNLQLVELLKVTETFSNSIRMEFGVDKCAVMHVKRGRIMESVGTQLSDAIHLRSLSSTETYKYLGMSEALGINEADMKQSLKERFFGRLIKVLKSLLSGGNKVRAFNGWVMPVLMYSFGILRWTQTELDALDRRVRTLLTAYRMHHPRSSVMRLYIPRKCGGRGFLNAKTLHNREVCSLREYFSQADVGMHRDVVAVDKGLTPLSLAKENWRKPVVLHTNGRREVWRSKELHGRFYRALHGPDVDFLASVAWLRFGDLFGETEGFVCAIMDEVMMTNNYRKYIVKDGTVDICRACHCPGESIRHIVSGCSRLANGEYLHRHNLVARIIHQQLALKYNLVDTEVPYYKYVPDPVLENGHVTLYWDRSIITDRTIVANKPDIVVIDRLKRRTVIVDIAVPHDENLVKAENDKKIKYLDLAHEVVDMWDVDSAVIVPIVVTANGLIAKSLDQHLMRLSLGSWIKGLIQKAVLLDTARIVRKFLSLEP

SEQ ID NO: 29834 - protein, 1200 aa, Mythimna impura
MLTRAAARRARHPPPGSPLSSASPPPDLGSPVSPVAAVASSSSVEYFSPPTSPTPVRRPGRGRPPKSLGPGGQPAPSRVPAAGGCVQRMRWTQSMNENVMRAYYGSTEGGTNLTAYRDRMLSLFQDLEPTVNVSAQRLSDQVRVIQRNHRLDDATLDRLRSEVLSNQIVSTSIQTQTAATPTTNAISPRSNPNNDDADDRVVTVSSQCNDELRSALEDALREYRTTPTELRPRLPRLPMHKKNRALVCTLDSLLKNNFESSENLVDTHSILYCGAVAACRLANINFPNIDGTIRPKPAVPAWQYRIERRIDGARVLIGKLHCFREGNTRPRVMRFVRRAFLGTGISPQEYMSRVTERIDFLKQKVCAWASRIRRYKRRVDRYSQNRMFQSDERWVYRAWERPEQNVIDGRRPNDFATITFWRNIWSVPVSHTEGDWMRDVERVCEAIPEMEKVVITPADVAKAVRPLPNWKSPGPDGLQNFWLKWFSNSHAPLASQFQSTLESGSLPEYLTTGITHLLHKTGNPVEPKNYRPITCLSTVYKLLTSILRAKINRHIENNLIMSASQNGCRNGSRGTKELLLIDMAISQQARRSRKDLSTCWIDYKKAYDSVPHTWLMRVLELYKVDMTLRTFLESCMRQWKTVLRYPGCRPIQGNDEPIRIKRGIFQGDSLSPLWFCLALNPLSTLLEESGLGYRLRRGGQAISHLLYMDDLKLFAPSNLQLMELLKVTETFSSAIRMEFGVDKCAAMHVKRGEIMESEGIQLPDSIHLRSLSSTETYRYLGMSEALGINNADMKQSLKERFFGRLKKVLNSLLSGGNKVRAFNGWVMPVLMYSFGILKWTQTELDALDRRVRTLLTANRMHHPRSSVMRLYISRKCGGRGFLNAKTLHNREVCSLREYFLKTDVGMHRDVVAVDKGLTPLSMAKEDWRKPVILTTDDRKEIWKGKELHGRFYRALHEPDVDFLASVAWLRFSDLFGETEGFICAIMDEVILTNNYRRYIMKDGTVDVCRACHRPGESIRHIISGCSRLANGEYLHRHNQVARIIHQQLALKYNLVDSEVPYYKYVPDPVLENDHVTLYWDRSIITDRTIVANKPDIVVIDRLARRAVIVDVTIPHDENLVKAEKEKQIKYLDLAHEVVDMWNVDSAVIVPMVVTANGLIAKSFDDHLSKLSLRGWIKGLIQKAVLLDTARIVRRFLSLEP

SEQ ID NO: 29835 - protein, 1195 aa, Notodonta dromedarius
MLTRLQARLRPPGLLPRSASQPLGLIQDETLTTAAASSESDEYFSPPSSPPPVRRRRGRPPGNLGTLGQPALNRILVPGGVVRRMRWTSSINENVMRAYYEATEGGTNLTAYRGRMLSLFQILEPAVNVSAQRLSDQVRVIQRGHMLADSLLDQLRSEALSSRVVPVASSQPVSLPVTTVESWPAVSGDTDRNDTASEVSTQYDGILRSTLEDVVREYRFVPPHVRPRLPRLPMHNKNRALVCSTNMLLSSYFESSENLMDTHSLLYCTAIAVCRVARVKFPDTDVATRPKPAVPAWQCRIERRINEARIFIGKLSCFRAGNTRPRVMRFVRRIFSGTNVGPQEYLNHVTERIDFLKQKVYAWANRIRRYKARVDRYYQNSMFQRDQRWVYRSWEQSSQRDGEVHRPDDDDMIKFWRNIWSVPMTHSEGGWIGDVEQVCEPIQEMDSITIEAKDVANAVRSLPNWKAPGPDGLHNFWLKWLRSSHACLASQFQSALESRLLPEFITTGVTHLLHKSGSTTDPKNYRPITCLPTIYKTLTSVLREKICRHIDDNSIMSASQNGCRSGARGTKELLLIDMAMCQQVRRNRKDLSTCWIDYKKAYDSVPHTWLMRVLELYKVNATLRAFLATCMGQWRTVLLYPGSRRILGNGDPIRIERGIFQGDSLSPLWFCLAMNPLSTLLGGSGLGFRLRRGGQVISHLLYMDDLKLFAPTELQLTGLLKVTETFSKSIRMEFGVDKCAVMHVKKGRMVESRCIRLSDSIQLRSLSGTETYRYLGMSQALGICETDMKQSVRERFLGRLKKVLKSVLSGGNKVRAYNGWVMPVLIYSFGILKWSQTELDTLDRTVRTLLTAHRMHHPRSSVMRLYIPRKCGGRGFLNAKTLHNREVFNLREYFLHAVGEMHADVVAVDNGLTPLSLSKEHWRRPVVLTTDDRMAVWQGKELHGRYYRALHGPDVDLAASVAWLQFGDLFGETEGFVCAIMDEVVMTNNYRRFIIRDGTIDICRACHRPGESLRHIISGCSRLANGEYLHRHNQVARIVHQQLALKYRLVASEVPYYRYVPEPVLEDGHITLYWDRSIITDRTIVANRPDIVLIDRQERHAMLVDVTVPHDGNLVKAEKDKECKYLDLVHEVVDMWDIDTAIIVPIVVSAHGLIGKSLDKHLKRLSLGSWIKGQIQKAVLLETARIVRKFLSLEP

SEQ ID NO: 29836 - protein, 1209 aa, Xestia xanthographa
MITRSRAKQHQEAHPPSPGSSLSSASQPPGRATPVSIVSPVAAVASSSSVEFFSPPSTPSPSPRRGRRRGRGRPPAGLGPRGQQAPGRVPAAGGNVSRIRWTQSMNENVMRAYYGATEGGINLTAYRGRMLSLFQVLEPGVSASAQRLSDQVRVIQRNHMLDDTVLDRLRSESRSNLVTPASPLIAVQVQNVSSAPPRSDRDGEEDDSEVISVSTQCNAQLRSALESAFREYRSTPPELRPRLPRLPMHNKNKALMCALDSQLSNCFDSSKDLTDTHSILYCGAVAACRVAHVKFPNNDGATRPKLAVPAWQCRIERRIGEARALIGKLICFREGNTRPRVMRFVRRAFSGTDISFRDYLARVTERIDSLKQKICAWASRIRRYKRRVERYTQNRTFQSDERWVYRAWERPDQGVTDTRLPDDSAMYSFWRNIWSVPVSHTEGDWTREVEQACDPIPEMGAIIISPQDVARAVRPLPNWKSPGPDGLHNFWIKWFQRSHARLASQFQSALESGSLPQFLTTGITHLLHKSGSAAEPKNYRPITCLPTVYKVLTSILRAKINQHIDSNSIMSASQNGCRNGSRGTKELLLIDMAISQQVRRSRKNLSTCWIDYKKAYDSVPHTWLMRVLELYKIDATLRTFLMSCMGHWRTVLRYPGCRQIQGNSEPIRIERGIFQGDSLSPLWFCLALNPLSTLLERSGLGYLLRRDGQVISHLLYMDDLKLFAPNNFQLMKLLKVTETFSSAIRMEFGVDKCAVMHVKRGEIMESEGTQLSDSIHLRSLSSTETYKYLGMSEALGINTADMKQSLRERFFGRLNKVLGSLLSGGNKVRAFNGWVMPVLMYSFGILKWTQTELDALDRRVRTLLTANRMHHPRSSVMRLYISRKCGGRGFLSAKTLHNREVYSLREYFLEAEGEMHRDVVSVDKGLTPLSLANGNWRKPKVLDTNDRKVEWQGKELHGRFYRALHGPDVDFLASVSWLRFGDLFGETEGFICAIMDEVMMTNNYRKYIVKDGTVDICRACHRPGESIRHIISGCSSLANGEYLHRHNLVARIIHQQLALKYNLVESEVPYYKYAPDPVLDNRHITLYWDRPITTDRTVVANRPDIVVIDRLERRTMIVDITIPHDENLVKAEKDKQFKYLDLAREVVDMWDVGTAVIVPIVVSANGLIAKSLDQHLRRLSLGSWIKGLIQKAVLLDTARIVRRFLSQEP

SEQ ID NO: 29837 - protein, 1199 aa, Mamestra brassicae
MLTRAALQRARPPPPDPSLSSASPPPDIGSPLSPAVAVASSSSDEYFSPPTSPTPVRRQGRGRPPRGLGPRGQPAPSRVPATGGCVQRMRWTQSMNENVMRAYYGSTEGGTNLTAYRVRMLSLFQDLEPTVNVSAQRLSDQVRVIQRNHRLDDAALDRLRSEVLNNLIISTPTQTAVQAPVNGSITPRPNNVSDEVDDRVVTVSSQCNDRLRSALEDALREYRSTPTELRPRLPRLPMHKKNRALVCALDSLLQNIFESSESLVDTHSILYCGAVAACRIANVKFPGCDEAIRPKPAAPAWQRRIERRIDETRALIGKLYCFREGNTRPRVMRFVRRAFSGTEISPRDFTSRVTERIDFLKQKVCAWASRIRRYKRRVDRYSQNRMFQSDERWVYRAWERPEQSVTDVCRPDDVATSIFWRSIWSVPICHAEGGWMRDVERVCEAIPQMEKITITTLDVAKAVRPLPNWKSPGPDVLHNFWLKWYSSSHALLASQFQSSLDSGSLPQFLTTGVTHLLHKTGSPTEPKNYRPITCLSTVYKLLTSILRAKINEHIESNSIMSASQNGCRKGSRGTKELLLIDMTISQQVRRSRKDLSTCWIDYKKAYDSVPHTWLMKVLELYKIDATLRTFLESCMRQWKTVLRYPGCRPIQGSDEPVWIKRGIFQGDSLSPLWFCLALNPLSTLLEDSGLGYRLRRGGQAISHLLYMDDLKLFAPNNLRLMELLKVTETFSSAIRMEFGVDKCAVMHVKKGEIMESEGIHLSDSIQVRSLSSTETYKYLGMLEALGINGTDMKQSLRERFFGRLKKVLNSLLSGGNKVRAFNGWVMPVLMYTFGILKWTQTELDALDRRVRTLLTANRMHHPRSSVMRLYIPRKCGGRGFLNAKTLHNREMCSLREYFLKADVGMHRDVVAVDKGLTPLSMAKENWRTPVILTTDDRKEVWKGKELHGRFYRALHGSDVDFSASVAWLRFGDLFGETEGFVCAIMDEVILTNNYRRHIMKDGTVDMCRACHRPGESIRHIISGCSRLANGEYLHRHNQVARIIHQQLALKYNLVDSEVPYYKYVPDPVLENDHVTLYWDRSIITDRTIVANKPDIVVIDRLARRTMIIDVTIPHDENLVKAEKEKQIKYLDLAHEVVDMWNVESAVIVPIVVTANGLMAKSFDDHLSKLALRSWVKGLIQKAVLLDTARIVRRFLSLEP

SEQ ID NO: 29838 - protein, 1093 aa, Abrostola tripartita
MRAYYGSTEGGTNLTAYRDRMLALFQDLEPAVNVSAQRLSDQVRVILRNHRLDDATLDRLRSEVHSSPVTCRPVHVVVPPIGPPPCDMEADDRATTVSTQYNDILRSTLEDTIREYRVSPPGLRPRLPRLPMHNKNKAMISALDSLLSSYFEGSEDLCDTHSILYCAAATACCVANVKCFDSSTATRPKPAVPAWQCRIESRITEARTLIGKLTAFREGNIRPRVMRFVRRAFAGVDINPREYATRATERIDFYKQKVYAWASRIRRYKRRVDRFSQNRIFNQDQRWVYRNWERSAQGVSDGHLPDDDVTNAFWRSIWSVPVNHTEGSWMLDVEQSCESIPEMGTITISPQDVASAVRPMSNWKSPGPDGLHNFWIKWLRSSHGCLASQFQSALEVGSLPQFLTTGSTHLLHKTGSTTDPKNFRPITCLPTIYKLLTSILRAKITKHIDDNNIMSASQNGCKNGSRGTKELLLIDMTICQQVRRSKKDLSTCWIDYKKAYDSVPHTWLMRVLELYKIDTTLRTFLLSCMRQWRTVLHYPGCRDIQQDGEPIRIERGIFQGDSLSPLWFCLALNPLSTLLENSGLGYSLRRRSQVISHLLYMDDLKLFAPSRFQLIKLLKITEAFSKSIRMEFGVDKCAVMHVKRGGIIESQGIQLSDSINLRSLSATETYKYLGMSEALGINVVDMKQSLKERFFGRLNKVLKSLLSGGNKVRAFNGWVMPTLMYSFGILKWTQTELDALDRRVRTLLISNRMHHPRSSVMRLYIPRKCGGRGFLNAKTLHNREVCSLREYFLRDEVGMHREVVAVDKGLTPLFLAKENWCKPVVLSVNDRRDVWQSKDLHGRFYKALHGPNVDLLSSVSWLRFGDLFGETEGFVCAIMDEVIMTNNYRKYILKDGTVDICRACHRPGESLRHIMSGCSRLANGEYLHRHNQVARIIHQQLALKYKLVDSEMPYYRYVPDPVLENDHITLYWDRSIITDRTIVANKPDIVVIDRLERRAMIVDITIPHDENLVKAERDKQIKYLDLAHEVVDMWEVDSAIIVPIVVSANGLMAKSLDQHLKRLTLGGWVKGLMQKAVFLDTARIVRRFLSLEP

SEQ ID NO: 29839 - protein, 1194 aa, Autographa gamma
MLTRSRARKPARPPSPDPSPSSASQLPDHVPAPAPAVASSSSDEYYSPPTSPTPVRRQGRRRPPCSLAPSGQPASNRAPAPGGDVRRMKWTLTINENVMRAYYGATEGGTNLTAYRARMLSLFQALEPGVSVSAQRLSDQVRVIQRNHRLDDSTLDRLRSEIQHSPATSTSPPVAAPVSGAPLTAPSDGEEEDGAITVSTQCNELIRSTLEDAIRVYRRSPPDQRPRLPRLPMHNRNKAVMGALDSLLPVYFESSEDLRDTHSILYCAALTACRVANVAMCHSNIATRPKPAVPAWQCRIEQRVAEARTLIAKLKAFKQGNSRPRVMRFVRRAYAGTDISPSEFIARVTERIDLFKQKVCAWASRIRRYKRRAERFHLNRMFQKDQRWVHRLWERPVSAMDGGCLPDGDATNSFWRSIWSAPVSHSEGGWMREVEQVCEPIQEMGAITISPQDVANAVRPMANWKTPGPDGLQNFWLKWLRSSHSCLASQFQSAVESASLPQFLTTGSTHLLHKTGSATDPKNYRPITCLPTVYKLLTSILRAKINEHIVNFSIMSASQNGCRSGSRGTKELLLIDTAICQQVRRSKKDLSTCWIDYKKAYDSVPHTWLMRVLELYKINTTLRAFLMSCMGQWSTVLHYPGCRDIQQGGEPIRIERGIFQGDSLSPLWFCLALNPLSTLLENSGLGYSLKRGGQVISHLLYMDDLKLFATSGFQLMELLKITESFSNSISMEFGVDKCAVMHVKRGGIVESQGVQLSDSINLRSLSATDTYKYLGMSEALGINVADVKQSLQARFFGRLNKVLKSVLSGGNRVRAFNGWVMPVLMYSFGVLKWTQTELDALDRRVRTLLTANRMHHPRSSVMRLYIPRKCGGRGFLNAKTLHNREVCNLREYFLQVDVGMHRDVVVVDKGFTPLSLGKENWHKPVVLSVKDREDVWQSKELHGRYYRTLHGPDVDFLASVAWLRFGDLFGETEGFVCAIMDEVIMTNNYRKYIIKDGTVDICRACHCPGESLRHIISGCSRLANGEYLHRHNQVARIIHQQLALRYKLVESEVPYYRYVPDPVLENGRVTLYWDRSIITDRTIVANKPDIVVIDRSERRAIIVDVTIPHDENLVKAEKEKQLKYLDLAHEVVDMWEVDSAMIVPIVVTANGIIAKSLDQHLKRLSLGTWVKGLIQKAVLLDTARIVRRFLSLES

SEQ ID NO: 29840 - protein, 962 aa, Mesoligia furuncula
MHKKNRALVCALDSQLKNFFESSEDLVDTHSILYCAAVAACRLANVKFPSCDGATRPKPAVPAWQRRIERRIDGTRVLIGKLYCFREGNTRPRVMRFVRRTFSGTGISPREYISRVTERIDFLKQKVCAWASRIRRYKRRVNRYTQNRMFQSDERWVYRAWERPEQNVTDVYRPDDATTSAFWCSIWSVPVCHTEAGWMRDVERVCESVPEMETVLITPSDVAKAVRPLPNWKSPGPDGLHNFWLKWLISSHTCLASQFQSSLESGSLPQFLTTGVTHLLHKSGSPAEPKNYRPITCLSTVYKLLTSILRAKINTHIESNSIMSASQNGCRNGSRGTKELLLIDMAISQQVRRSRKDLSTCWIDYKKAYDSVPHTWLMKVLELYKIDATLRTFLESCMRQWKTVLRYPGCRQIQGNDEPVWIKWGIFQGDSLSPLWFCLALNPLSTLLEDSGLGYRLRRDGQVISHLLYMDDLKLFAPNKLRLMELLKVTETFSSAIRMEFGVDKCAVMHVKRGEIMESEGIQLSDSISLRSLSSSESYKYLGMSEALGINDADMKQSLKERFFCRLKKVLISLLSGGNKVRAFNGWVMPVLMYSFGILKWTQTELDALDRRVRTLLTANRMHHLRSSVMRLYIPRKSGGRGFLNAKTLHNREVCSLREYFLKAEVGMHRDVVAVDKGLTPLSRAKENWRKPVVLSTDDRKKVWQSKELHGRFYRALHEPGVDFLASISWLRFGDLFGETEGFVCAIMDEVILTNNYRRHIMRDGTVYVCRACHRPGESIRHIISGCSRLANGEYLHRHNQVARIIHQQLALKYKLVDSEVPYYKYVPVPVLENDHVTLYWDRSIITDRTIVANKPDIVVIDRLARRTMIVDVTIPHDGNLVKAEKEKQIKYLDLAHEVVDMWNVSSAIIVPIVVSANGLMAESLDQHLSRLSLGGWIKGLIQKAVLLDTARIVRRFLSLEP

SEQ ID NO: 29841 - protein, 1201 aa, Mesoligia furuncula
MLTRLAARRARLPPPDSSLSSAPPPPESSPIVSAVTPAVAVASSSSDEYFSPPTSPTPVRRQGRGRPPNSLGLRGHPAPSRVPATGGCVQRMRWTQSMNENVMRAYYRSTEGGINLTAYRDRMLSLFQELEPTVNVSAQRLSDQVRVIQRNHRLDDIALDRLRSEVLSNHIVSTSAQTAAQASTVDAIPPRSNHVEEEDDRVDTVSSQCNVRLRSALEDALCEYRSTPTELRPRLPRLPMHKKNRALVCALDSQLKNFFESSEDLVDTHSILYCAAVAACRLANVKFPSCDGATRPKPAVPAWQRRIERRIDGTRVLIGKLYCFREGNTRPRVMRFVRRAFSGTGISPREYISRVTERIDFLKQKVCAWASRIRRYKRRVDRYTQNRMFQSDERWVYRAWERPEQNVTDVYRPDDATTSAFWCSIWSVPVCHTEAGWMRDVERVCESVPEMETVLITPSDVAKAVRPLPNWKSPGPDGLHNFWLKWLISSHTCLASQFQSSLESGSLPQFLTTGVTHLLHKSGSPAEPKNYRPITCLSTVYKLLTSLLRVKINTHIESNSIMSASQNGCRNGSRGTKELLLIDMAISQQVRRSRKDLSTCWIDYKKAYDSVPHTWLMKVLELYKIDATLRTFLESCMRQWKTVLRYSGCRQIQGNDEPVWIKRGIFQGDSLSPLWFCLALNPLSTLLEDSGLGYRLRRDGQVISHLLYMDDLKLFAPNKLRLMELLKVTETFSSAIRMEFGVDKCAVMHVKRGEIMESEGIQLLDSISLRSLSSSESYKYLGMSEALGINDTDMKQLLKERFFCRLKKVLISLLSGGNKVRAFNGWVMPVLMYSFGILKWTQTELDALDRRVRTLLTANRMHHPRSSVMRLYIPRKSGGRGFLNAKTLHNREVCSLREYFLKAEVGMHRDVVAVDKGLTPLSMAKENWRKPVVLSTDDRKKVWQSKELHGRFYRALHEPGVDFLASISWLRFGDLFGETEGFVCAIMDEVILTNNYRRHIMRDGTVDVCRACHRPGESIRHIISGCSRLANGEYLHRHNQVAGIIHQQLALKYKLVDSEVPYYKYVPDPVLENDHVTLYWDRYIITDRTIVANKPDIVVIDRLARRTMIVDVTIPHDGNLVKAEKEKQIKYLDLAHEVVDMWNVSSAIIVPIVVSANGLMAESLDQHLSRLSLGGWIKGLIQKAVLLDTARIVRRFLSLEP

SEQ ID NO: 29842 - protein, 1201 aa, Mesoligia furuncula
MLTRLAARRARLPPPDSSLSSAPPPPESSPIVSAVTPAVAVASSSSDEYFSPPTSPTPVRRQGRGRPPNSLGLRGHPAPSRVPATGGCVQRMRWTQSMNENVMRAYYRSTEGGINLTAYRDRMLSLFQELEPTVNVSAQRLSDQVRVIQRNHRLDDIALDRLRSEVLSNHIVSTSAQTAAQASTVDAIPPRSNHVEEEDDRVDTVSSQCNVRLRSALEDALCEYRSTPTELRPRLPRLPMHKKNRALVCALDSQLKNFFESSEDLVDTHSILYCAAVAACRLANVKFPSCDGATRPKPALPAWQRRIERRIDGTRVLIGKLYCFREGNTRPRVMRFVRRAFSGTGISPREYISRVTERIDFLKQKVCAWASRIRRYKRRVDRYTQNRMFQSDEMWVYRAWERPEQNVTDVYRPDDATTSAFWCSIWSVPVCHTEAGWMRDVERVCESVPEMETVLITPSDVAKAVRPLPNWKSPGPDGLHNFWLKWLISSHTCLASQFQSSLESGSLPQFLTTGVTHLLHKSGSPAEPKNYRPITCLSTVYKLLTSILRAKINTHIESNSIMSASQNGCRNGSRGTKELLLIDMAISQQVRRSRKDLSTCWIDYKKAYDSVPHTWLMKVLELYKIDATLRTFLESCMRQWKTVLRYPGCRQIQGNDEPVWIKRGIFQGDSLSPLWFCLALNPLSTLLEDSGLGYRLRRDGQVISHLLYMDDLKLFAPNKLRLMELLKVTETFSSAIRMEFGVDKCAVMHVKRGEIMESEGIQLSDSISLRSLSSSESYKYLGMSEALGINDADMKQSLKERFFCRLKKVLISLLSGGNKVRAFNGWVMPVLMYSFGILKWTQTELDALDRRVRTLLTANRMHHPRSSVMRLYIPRKSGGRGFLNAKTLHNREVCSLREYFLKAEVGMHRDVVAVDKGLTPLSMAKENWRKPVVLSTDDRKKVWQSKELHGRFYRALHEPGVDFLASISWLRFGDLFGETEGFVCAIMDEVILTNNYRRHIMRDGTVDVCRACHRPGESIRHIISGCSRLANGEYLHRHNQVARIIHQQLALKYKLVDSEVPYYKYVPDPVLENDHVTLYWDRSIITDRTIVANKPDIVVIDRLARRTMIVDVTIPHDGNLVKAEKEKQIKYLDLAHEVVDMWNVSSAIIVPIVVSANGLMAESLDQHLSRLSLGGWIKGLIQKAVLLDTARIVRRFLSLEP

SEQ ID NO: 29843 - protein, 970 aa, Omphaloscelis lunosa
MLSLFQELEPTVNVSAQRLSDQGRVIQRNHRLDDTALDRLRSEVLSNHIVSTRAQTAAQESNIDPTPPRFNHGVEEDDRVATASSQCNDRLRSALEDAFREYRYTPTELRPRLPRLPMHKKNRALVCALDSQLTNFFESSEDLIDTHSILYCAAVAACRLANVKFPNYDGATRPKPVVPAWQCRIERRIDGARVLIGKLYCFREGNTRPRVMRFVRRAFLGTGISPQEYMSRVTERIDFLKQKVCAWASRIRRYKRRVDRYTQNRMFQSDERWVYRAWERPEQNVTDVCRPDDAATSAFWRSIWSVPVCHTEAGWMQDVERVCETIPEMDAVFITPLDVARTVRPLPNWKSPGPDGLHNFWLKWLSSSHTRLASQFQSSLESGLLPQFLTTGVTHLLHKSGNPAEPKNYRPITCLPTVYKLLTSILRTKINTHIDSNSIMSASQNGCRNGSRGTKELLLIDMAISQQVRRSRKDLSTCWIDYKKAYDSVPHTWLMRVLELYKVHTTLRTFLMSCMGQWRTVLRYPGCRQTQGNDEPVWIKRGIFQGDSLSPLWFCLALNPLSTLLEGSGLGYRLRRGGQVISHLLYMDDLKLFAPNKLRLMELLKVTETFSGAIRMEFGVDKCAVMHVKRGEIMESEGTQLSDSIHLRSLSSAENYRYLGMSESLGINVADMKQSLKERFFGRLKKVLISFFSGGNKVRAFNGWVMPVLMYSFGILKWTQTELDALDRRVRTLLTANRMHHPRSSVMRLYIPRKCGGRGFLNAKTLHNREVCSLREYFFKADVGMHRDVVAVDNGFTPLSMAKENWRKPVVLTTDDRKEVWQSKALHGRFYRALHEPGVDFLASISWLRFGDLFGETEGFICAIMDEVILTNNYRRHIMKDGTVDVCRACHRPGESIRHIISGCSRLANGEYLHRHNQVARIIHQQLALKYKLVDSEVPYYKYVPDPTEFSKMTMSRCTGIGLSLLTGLL

SEQ ID NO: 29844 - protein, 1123 aa, Apamea monoglypha
MLTRSAARRARLPSPDSSLSSASPPPVPSPTVSAVTTPAAVVASSSSDEYFSPPTTPPPARRRGGRRPPDGLGPRGPLASDRVPAPGGSVQRMRWTRSINENVMRSYYGATEGGNNLTAYRVRMLSLFQVLEPAVNVSAQRLSDQVRVIQRNHMLDDTVLDRLRSEMQSSHVIAPQSQTAAVLPQSNTSHADEGSNDRATNVSIQCNEELRNALEGAIREYRFMSPELRPRLPRLPMHNKNRALVAVLDAQLSSHFDACEDLTDTHSILYCAAVAACRVAHVKFDSDSRATRPKPAIPAWQCRIERRIGGARALIGKLICFREGNTRPRVMRFVRRAFLGTDISSQDYLSRVTERIDFLKQKVYAWANRIRRYKRRVERYTQNRTFQSDERWVYRGWERPDQSVADTCLPDDDAMCSFWRSIWSAPVSHTEGDWTGKIERACELIPEMGAITICPQDVARAVRPLPNWKSPGPDGLHNFWIKWFQRSHAPLAAQFQSALESGLLPQFITTGITHLLHKSGSTADPKNYRPITCLPTIYKVLTSILRAKINKHIDSNSIMSVSQNGCRNGSRGTKELLLIDMAISQQVRRSRKDLSTCWIDYKKAYDSVPHTWLMRVLELYKVDTTLRTFLMTCMGQWRTVLRYPGCRNIQRNSEPIRIERGIFQGDSLSPLWFCLALNPLSTLLDDSGLGYRLRRGGQVISHLLYMDDLKLFAPNNLQLMKLLKITETFSSAIRMEFGVDKCAVMHVKRGEIVESVGTQLSDFTNLRALSAAETYKYLGMSEALGINVTDMKQSLKERFFGRLKKVFNSLLSGGNKVRAFNSWVMPVLMYSFGILKWTQTELEALDRRVRTLLTANRMHHPRSSVMRLYIPRKCGGRGFLNAKTLHNREICSLREYFLETDVGMHRDVVAVDKGLTPLSLAKENWRKPVVLDTNDRMEVWQSKELHGRFYRALHGPDVDLLASVAWLRFGDLFGETEGFVCAIMDEVMMTNNYRRYIVKDGTVDICRACHRPGESIRHIISGCSRLANGEYLHRHNLVARIIHQQLALKYSLVESEVPYYRYVPDPVLENGNITLYWDRSIITDRTIVANKPDIVVVDRSERRAMIVDITVPHDENLVKAEKD

SEQ ID NO: 29845 - protein, 868 aa, Mythimna ferrago
MRFVRRAFSGTDISPRDYLPCVTERIDFLKQKIYAWANRIRRYKRRVERYTQNRTFQSNERWVYRAWERPDQGVTDTRLPDDDAMCSFWRSIWSAPVSHTEGDWIREVERACDLLPEMGAITISPQDVARAVRPLPNWKSPGPDGLHNFWLKWFQGSHARLASQFQSALESGSLPQFLTTGITHLLHKSGSTAEPKNYRPITCLPTVYKVLTSILRAKINSHIETNSIMSVSQNGCRNGSRGTKELLLIDIAISQQVRRSRKNLSACWIDYKKAYDSVPHTWLMRVLELYKVDATLRTFLMSCMGQWRTVLHYPGCRQIWENSEPIRIERGIFQGGSLSPLWFCLALNPLSTLLEGSGLGYRLKRGGQVISHLLYMDDLKLFAPNNLQLMELLKVTETFSSAIRMDFGVDKCAVIHVKRGEIMESEGIQLSDSIHLRSLSSTETYKYLGMSEALGINTDDVKQSLKERFFGRLNKVLNSLLSGGNKVRAFNGWVMPVLMYSFGILKWTQTELDALDRRVRTLLTANRMHHPQSSVMRLYIPRKCGGRGFLNAKSLHNREVCSLREYFLAVDVGMHRDVVAVDKGLTPLSLANENWRKPLVLDTNDRREVWQGKELHGRFYRALHGPDVDLLASVSWLRFGDLFGETEGFVFAIMDEVMMTNNYRKYIVKDGTVDICRACHRPGESIRHIISGCSRLANGDYLHRHNLVARIIHQQLALKYNLVESEVPYYRYVPDPVLDNGSITLYWDRSIITDRTIVANKPDIVVIDRLERRTMIVDIAVPHDENLVKAEKDKQIKYLDLAREVVDMWEVDRAIIVPIVVTANGLIAKSLEQHLRRLSLGSWIKGLIQKAVLLDTARIVRRFLSQEP

SEQ ID NO: 29846 - protein, 1203 aa, Agrochola circellaris
MLTRSAAHRARLPPPDSPLSSASPPPVPSPIVSAASTPAAVVASSSSDEYFSPPTSPIPVRRQGRGRPPRSLGLRGQPAPRRVPAAGGCVQRMRWTQSMNENVMRAYYGSTEGGTNLTAYRVRMLSLFQELEPTANVSAQRLSDQVRVIQRNHRLDDAALDRLRSEVLSNHIVSTPAQTAAQASSIDAIPPRSNHGVAEEDDRAATVSSQCNVRLRSALEDAFREYRYTPTELRPRLPRLPMHKKNRALVCALDSQLRNYFENSEDLIDTHSILYCAAVAACRLANVKFPNYDGVTRPKPAVPAWQCRIEQRIDGARALIGKLYCFREGNTRPRVMRFVRRAFLGTGISPREYMPRVTERIDFLKQKVCAWASRIRRYKRRVERYTQNRMFQSDERWVYRAWERPEQNVADVCRPDDAATSAFWRSIWSVPVCHTEADWMRDVERVCETIPEMEKIEITPLDIARAVRPLPNWKSPGPDGLHNFWLKWLISSHTCLASQFQSSLESGSLPQFLTTGVTHLLHKSGSPAEPKNYRPITCLSTVYKLLTSILRAKINTHIDNNSIMSASQNGCRNGSRGTKELLLIDMAISQQVRRSRKDLSTCWIDYKKAYDSVPHTWLMRVLELYKIDATLRTFLMSCMGQWRTVLRYPGCRQIQGNDEPVWIKRGIFQGDSLSPLWFCLALNPLSTLLEDSGLGYRLRRGGQVISHLLYMDDLKLFAPNNLRLMELLKVTETFSSAIRMEFGVDKCAVMHVKRGEIMESEGTQLSESIHLRSLSSSESYKYLGMSEALGINVADMKQSLKERFFGRLKKVLISLLSGGNKVRAFNGWVMPVLMYSFGILKWTQTELDALDRRVRTLLTANRMHHPRSSVMRLYIPRKCGGRGFLNAKTLHNREVCNLREYFLKVEVGMHRDVVAVDKGLTPLSMAKENWHKPVVLTTDDRKEVWQSKELHGRFYRALHEPGVDFLASVSWLRFGDLFGETEGFVCAIMDEVILTNNYRRYIMKDGTVDVCRACHRPGESIRHIISGCCRLANGEYLHRHNQVARIIHQQLALKYKLVVSEVPYYKYVPDPVLENDHVTLYWDRSIITDRTIAANKPDIVVIDRLARRAMIVDVTIPHDGNLVKAEKEKQIKYLDLAHEVVDMWNVSSAIIVPIVVTANGLMAESLDQHLSRLSLGGWIKGLIQKAVLLDTARIVRRFLSLQP

SEQ ID NO: 29847 - protein, 962 aa, Eupsilia transversa
MHKKNRALVCALDSQLKNFFESSEDLIDTHSILYCAAVAACRLANVKFPNCDAATRPKPAVPAWQCRIERRIDGARVLIGKLYCFREGNTRPRVMRFVRRAFSGTGISPQEYMSRVTERIDFLKQKVCAWASRIRRYKRRVDRYTQNRMFQSDERWVYRAWERPEQNVADVCRPDDAATSAFWRSIWSVPVCHAEAGWMHGVERVCEAIPEMEAVIITPLDVAKAVRPLPNWKSPGPDGLHNFWLKWLIGSHTRLASQFQSSLESGSLPQFLTTGVTHLLHKSGSPAEPKNYRPITCLSTVYKLLTSILRAKINSHIDSHSIMSASQNGCRNGSRGTKELLLIDMAISQQVRRSRKDLSTCWIDYKKAYDSVPHTWLMRVLELYKIDATLRTFLMSCMGQWRTVLRYPGCRQIQGNDEPVWFKRGIFQGDSLSPLWFCLALNPLSTLLEESGLGYRLRRGGQVISHLLYMDDLKLFAHNKLRLMELLKVTETFSSAIRMEFGVDKCAVMHVKRGEIMESEGTQLSDSIHLRSLSSTESYKYLGMSEALGINVADMKQALKERFFGRLKKVLISLLSGGNKVRAFNGWVMPVLMYSFGILKWTQTELDALDRRVRTLLTANRMHHPRSSVMRLYIPRKCGGRGFLNAKTLHNREVCSLREYFLKTEEGMHRDVVAVDKGLTPLSMAKENWRKPVVLTTDDRKEVWQSKELHGRFYRVLHEPGVDFLASVSWLRFGDLFGETEGFVCAIMDEVILTNNYRRHIMKDGTVDVCRACHRPGESIRHIISGCSRLANGEYLHRHNQVARIIHQQLALKYKLVDSEVPYYKYVPDPVLENDHVTLYWDRSIITDRTIVANKPDIVVIDRLARRAMIVDVTIPHDENLVKAEKEKQIKYLDLAHEVVDMWNVSSAIIVPIVVTANGLMAESLDQHLLRLSLGGWIKGLIQKAVLLDTARIVRRFLSLQP

SEQ ID NO: 29848 - protein, 1096 aa, Amphipyra tragopoginis
MLTRSRAKAQNTRPPSSASSLSSASQPPEPASIVSDVTPAAAVASSSSDEYFSPATSPSPPPARRRGRGRPPTCLGPRGPPASNRVPAPGGSVQRMRWTQSMNENCMRAYFGATEGGTNLTAYRGRMLSLFQALEPAVNVSAQRLSDQVRVIQRDHRLDDAALDRLRAEMQNSHAAPLPSQIRTQTLVPPAVPLESNYADEEGEVRAISAGTQYSEIMRSALEDALREFRSTPPELRPRLPRLPMHNKNRALVCALDSLLPNVFESSEDLGDTHSILYCAAVAACRVAHVKFPNDNRATRPKSAVPAWQCRIERRIDEARVLIGKLTCFREGNRRPRVMRFVRRAFSGTDIGPGEYASRVTERIDFLKQKVYAWANRIRRYRRRVDRYTQNRIFQSDQRWVYRTWERPDQGVSDTHLPDNDVMNAFWRNIWSVPVTHTEGDWMQEVQRACEPIQEMGAVTIGPQDVASAVRPMPNWKSPGPDGLHNFWIKWLRSSHARLASQFQSSLESGSLPAFLTTGITHLLFKSGSTAEPKNYRPITCLPTVYKLLTSILRAKPNHHIDSNAIMCATRNGCRNGSRGTKELLLIDMAISQQVRRSRKDLSTCWIDYKKAYDSVPHTWLMRVLELYKINATLRTFLMSCMGQWRTVLHYPGCRQIRGNGELIRIERGIFQGDSLSPLWFCLALNPLSTLLEGSGLGYRLRRGGQVISHLLYMDDLELFAPNNLQLVELLKVTETFSNSIRMEFGVDKCAVMHVKRGRIMESVGTQLSDSIHLRSLSSTETYKYLGMSEALGINEADMKQSLRERFFGRLIKVLKSLLSGGNKVRAFNGWVMPVLMYSFGILRWTQTELDALDRRVRTLLTGYRIHHPRSSVMRLYIPRKCGGRGFLNAKTLHNREVCSLREYFSQADVGMHRDVVAVDKGLTPLSLAKENWRKPVVLDAKGRMEVWRSKELHGRFYRALHGPDVDFLASVAWLRFDDLFGETEGFVCAIMDEVMMTNNYRKYIVKDGTVDICRACHCPGESIRHIVSGCSRLANGEYLHRHNLVARIIHQQLALKYNLVDTEVPYYKYVPDPVLENGHVTLYWDRSIITAQLTF

SEQ ID NO: 29849 - protein, 1207 aa, Amphipyra tragopoginis
MLTRSRAKARAQTTQPPPPASSLSSASQPPESSPNVSAVTPAAAVASSSSDEYFSPPTSPPPARRRGGRRPPDRLGPRGPLASDRVPAPGGSVSRMRWTQTINENAMRAYFGATEGGTNLTAYRSRMLSLFQVLEPTVNVSAQRLSDQVRAIQRGHMLDDTVLDRLRSEIQCGPVISSSSQAPGLISRNVPVASPRLQHVDEEDDDRATAVSILCNEQLRRALEDAMREYRSTRPELRPRLPRLPMHRRNRALMCALDSLLSNYFDSSEDLGDTHSILYCAAVAACRVAHVKFINNKRATRPKNAVPAWQCRIERRIAEARALIGKLICFGEGNTRPRVMRFVRRAFSGTDVSPREYMSRVTERIDFLKQKVYAWANRIRRYRRRVDRYNQNRMFRSDERWVYRNWERPDQSVGAAHLPDDDAMNSFWRSIWSVPVTHTEGDWMRDVERMCEPILDMGAIIISPQDVAGAVRPLPNWKSPGPDGLHNFWLKWLRSSHARLASQFQSSLETGTLPQFLTTGVTHLLHKSGSTAEPKNYRPITCLPSVYKVLTSILRTKINNHIDNNSIMSASQNGCRNGSRGTKELLLIDMAISQQVRRSRKDLSTCWIDYKKAYDSVPHTWLMRVLELYKVNTTLCAFLTSCMRQWRTVLRYPGCRQIQGIGEPIRIERGIFQGDSLSPLWFCLALNPLSTLLEGSGLGYRLRRGGQVISHLLYMDDLKLFAPNNLQLLELLKVTVTFSNSIRMEFGVDKCAVMHVKRGGIMESVGTELTDSIHLRSLSSTETYKYLGMSEALGINETDMKQSLRERFYGRLKKVLNSLLSGGNKVRAFNGWVMPVLMYSFGILKWTQTELDALDRRVRSLLTANRMHHPRSSVMRLYIPRKCGGRGFLNAKTLHNREVCSLREYFSQADVGMHRDVVAVDKGFTPLSLAKENWRKPVIFDTNGRREVWRSKELHGRFYRALHGPDVDFLASVAWLRFGDLFGETEGFVCAIMDEVMMTNNYRKYIVKDGTVDICRACHCPGESIRHIVSGCSRLANGEYLHRHNLVARIIHQQLALKYNLVDAEVPYYKYVPDPVLENGHVTLYWDRSIITDRTIVANKPDIVVIDRSERLTMIIDITVPHDENLVKAEKDKEIKYQDLAHEVVDMWDVDSAVIVPIVVTANGLIAKSLDQHLKRLSLGGWIKGLIQKAVLLDTARIVRKFLSLRP

SEQ ID NO: 29850 - protein, 1153 aa, Vanessa cardui
MLTRARKRAHNYPSPDPPLSSASQAQDPAQGSSLVSAAASSSSDEYFSPPTSPTPVRRAGRRRPPTGLGARGQPVSNGVPASGGGVQRMRWTQSINENVMRAYYGATEGGTNLTAYRVRMLSLFQALEPAINVSAQRLSDQVRVILRNNRLSDTVLDRIRSETCNSGVTSGPSTPVVEEPLPAIPQGPEHDDEDGGDIAITTSKYSDQLRSALGDAIREYRNTPAELRPRLPRLPMSKRNRDLVCTLDSLLADYFESSENLEDTHSILFCAAVAACRVAGVTFEDNERATRPKAAAPAWQSRIEKRISETRVLIGKLYCFKEGNTRPRVMRFLGRAFLGTGIGPQEYPSHVVERIDFLKQKVYAWASRIRRYRRRVDRYYLNRKFQSDQRWVYRTWERLDQGVSNGCRPDDDATNTFWRNIWSVPVDHIEGDWMLEVRQACEPLEVMGKISIASEDVAAAVRSVPNWKSPGPDGLHSYWLKWLRSSHECLAFQFQSALESGSLPQFLTTGVTHLLYKSGSATDPKNYRPITCLPTVYKLLTSILRDKINSHIQNNSILSVSQNGCVDGSRGTKELLLIDMTISQQVRRFRKSLSTCWIDYKKAYDSVPHTWLLRVLELYKLDTTLFSFLRSCMRQWRTVLRYPGCRTIHGDDEPIRIERGIFQGDSLSPLWFCLALNPLSTLLEGSRLGYRLRRGGKVISHLLYMDDLKLFAPSGSQLVELLKVTETFSNSIRMEFGVDKCAVMHVKRGEIMESDGLQLSDSINFKSLSANESYKYLGMSEALGINVTDMKQSLRERFFGRLKKVLKSLLSGGNKVRAFNGWVMPVLMYFFGILKWTQKELDALDRRVRVLLTAYRMHHPRSSVMRLYIPRRYGGRGFLNAKTLHNREVYNLREYFLHTDLDMHRDVVIMDKGLTPLSLGKENWRKPVVLSTENRKEVWKSKELHGRFYRALHGPDVDFMASVSWLRFGNLFGETEGFVCAIMDEVIMTNNYRKYVVRDGTVDICRACHTPGESLRHIISGCSRLANGEYLHRHNQVAKIIHQQLALRYGLVVSEVPYYMYVPDPVLENGHITLYWDRSIITDRTVVANKPDIVVIDRSERRTIIVDITIPHDENLVKAEKDKQIKYLDLAHEVVDMWDVDTAVIVPIVVRMA

SEQ ID NO: 29851 - protein, 1200 aa, Mythimna impura
MLTRAAARRARHPPPGSPLSSASPPPDLESPVSPAAAVASSSSDEYFSPPTSPTPVRRQRRGRPPKSLGSRGQPAPSRVPAAGGCVQRMRWTQSMNENVMRAYYGSTEGGTNLTAYRDRMLSLFQDLEPTVNVSAQRLSDQVRVIQRNHRLDDATLDRLRSEVLSNQIVSTSIQTQTAAAPTTNAISPRSNPNNDDADDRVVTVSSQCNDELRSALEDALREYRTTPTELRPRLPRLPMHKKNRALVCTLDSLLKNNFESSENLVDTHSILYCGAVAACRLANINFPNIDGTIRPKPAVPAWQYRIERRIDGARVLIGKLHCFREGNTRPRVMRFVRRAFLGTGISPKEYMSRVTERIDFLKQKVCAWASRIRRYKRRVDRYSQNRMFQSDERWVYRAWERPEQNVIDGRRPDDFATITFWRNIWSVPVSHTEGDWMRDVERVCEAIPEMEKVVITPADVAKAVRPLPNWKSPGPDGLQNFWLKWFSNSHAPLASQFQSTLESGSLPEYLTTGVTHLLHKTGNPVEPKNYRPITCLSTVYKLLTSILRAKINRHIENNLIMSASQNGCRNGSRGTKELLLIDMAISQQARRSRKDLSTCWIDYKKAYDSVPHTWLMRVLELYKVDMTLRTFLESCMRQWKTVLRYPGCRPIQGNDEPIRIKRGIFQGDSLSPLWFCLALNPLSTLLEESGLGYRLRRGGQAISHLLYMDDLKLFAPSNLQLMELLKVTETFSSAIRMEFGVDKCAAMHVKRGEIMESEGIQLPDSIHLRSLSSTETYRYLGMSEALGINNADMKQSLKERFFGRLKKVLNSLLSGGNKVRAFNGWVMPVLMYSFGILKWTQTELDALDRRVRTLLTAKRMHHPRSSVMRLYISRKCGGRGFLNAKTLHNREVCSLREYFLKTDVGMHRDVVAVDKGLTPLSMAKEDWRKPVILTTDDRKEIWKGKELHGRFYRALHEPDVDFLASVAWLRFSDLFGETEGFICAIMDEVILTNNYRRYIMKDGTVDVCRACHRPGESIRHIISGCSRLANGEYLHRHNQVARIIHQQLALKYNLVDSEVPYYKYVPDPVLENDHVTLYWDRSIITDRTIVANKPDIVVIDRLARRAVIVDVTIPHDENLVKAEKEKQIKYLDLAHEVVDMWNVDSAVIVPMVVTANGLIAKSFDDHLSKLSLRGWIKGLIQKAVLLDTARIVRRFLSLEP

SEQ ID NO: 29852 - protein, 963 aa, Mamestra brassicae
MHKKNRALVCALDSLLQNIFESSESLVDTHSILYCGAVAACRIANVKFPGCDEAIRPKPAAPAWQRRIERRIDETRALIGKLYCFREGNTRPRVMRFVRRAFSGTEISPRDFTSRVTERIDFLKQKVCAWASRIRRYKRRVDRYSQNRMFQSDERWVYRAWERPEQSVTDVCRPDDVATSIFWRSIWSVPICHAEGGWMRDVERVCEAIPQMEKITITTLDVAKAVRPLPNWKSPGPDGLHNFWLKWYSSSHALLASQFQSSLDSGSLPQFLTTGVTHLLHKTGSPTEPKNYRPITCLSTLYKLLTSILRAKINEHIESNTIIMSASQNGCRKGCRGTKELLLIDMAISQQVRRSRKDLSTCWIDYKKAYDSVPHSWLMKVLELYKIDATLRTFLESCMRQWKTVLRYPGCRPIQGSDEPVWIKRGIFQGDSLSPLWFCLALNPLSTLLEDSGLGYRLRRGGQAISHLLYMDDLKLFAPNNLRLMELLKVTETFSSAIRMEFGVDKCAVMHVKKGEIMESEGIHLSDSIQVRSLSSTETYKYLGMLEALGINGTDMKQSLKERFFGRLKKVLNSLLSGGNKVRAFNGWVMPVLMYTVGILKWTQTELDALDRRVRTLLTANRMHHPRSSVMRLYIPRKCGGRGFLNAKTLHNREMCSLREYFLKADVGMHRDVVAVDKGLTPLSMAKENWRTPVILTTDDRKEVWKGKELHGRFYRALHGSDVDFSASVAWLRFGDLFGETEGFVCAIMDEVILTNNYRRHIMKDGTVDMCRACHRPGESIRHIISGCSRLANGEYLHRHNQVARIIHQQLALKYNLVDSEVPYYKYVPDPVLENDHVTLYWDRSIITDRTIVANKPDIVVIDRLARRTMIIDVTIPHDENLVKAEKEKQIKYLDLAHEVVDMWNVESAVIVPIVVTANGLMAKSFDDDLSKLALRSWVKGLIQKAVLLDTARIVRRFLSLEP

SEQ ID NO: 29853 - protein, 1205 aa, Noctua fimbriata
MITRAAYRRARLPPPDPSLSSASPPPESSPIVSAVTPAVAVASSSSDEYFSPPTSPTSVRRQGRGRPPRSLGLRGHPAPSRVPAAGGCVQRMRWTHSINENVMRAYYGSTEGGTNLTAYRVGMLSLFQVLEPTVNVSAQRLSDQVRVIQRNHMLDDAVLDRLRSEVLSNRIVLTPAQTAVQASVIDATPPRFNPAVVEEDDRVAVVSSQCNDRLRSALEDALREYRSTPTELRPRLPRLPMHNKNRALVCALDSQLENIFESSENLVDTHSILYCGAVAACRLANVKFPNFDVATRPKPAVPAWQRRIERRIDEARVLIGKLHCFREGNTRPRVMRFVRRAFSGTGISPQEYMSRVTERIDFLKQKVYAWANRIRRYKRRVDRYSQNRMFQSDERWVYRAWERPELNMTDVCRPDDAATSSFWRSIWSVPVCHTEADWMRDVERVCEPIPEMEPILITRLDIARAVRPLPNWKSPGPDGLHNFWLKWLSSSHTCLASQFQSSLESGSLPQFLTTGVTHLLHKSGSPAEPKNYRPITCLSTVYKLLTSILRAKINTHIDKNSIMSASQNGCRSGSRGTKELLLIDMAISQQVRRSRKDLSTCWIDYKKAYDSVPHTWLMRVLELYKIDATLRAFLESCMGQWRTVLRYPGCGQIQGNDEPVWIKRGIFQGDSLSPLWFCLALNPLSTLLEDSGLGYRLRRGGQVISHLLYMDDLKLFAPNKLQLMELLKVTETFSSAIRMEFGVDKCAVMYVKQGEIMESEGIQLSDSIHLRTLSSTESCKYLGMSEALGINVTDMKQSLKERFFGRLNKVLHSLLSGGNKVRAFNGWVMPVLMYSFGVLKWTQTELDALDRRVRTLLTANRMHHPRSSVMRLYIPRKCGGRGFLNAKSLHNREMCSLREYFLKVEVGMHRDVVAVDKGLTPLSMAKENWRKPEVLTTDDRKEVWQGKELHGRFYRALHGPDVDFLASVSWLRFGDLFGETEGFVCAIMDEVMLTNNYRKYIMKDGTVDVCRACHRPPGRPESIRHIISGCSRLANGEYLHRHNQVARIIHQQLALKYKLVESEVPYYKYVPDPVLEKDHVTLYWDQSIITDRTIVANKPDIVVIDRSARRVMIVDVTIPHDENLVKAEKEKQIKYLDLAHEVVDMWNVNSAIIVPIVVTANGLIAKSLDDHLSKLSLGGWIKGLIQKAVLLDTARIVRRFLSLEP

SEQ ID NO: 29854 - protein, 1194 aa, Abrostola tripartita
MITRSRAKIAQSTSPDSSPRSASQLPDQQALHSPASAVASSSSDEYFSPPTSPTPVRRQRRGRPPTSLGLRGQLAPNRVPASGGYVQRMKWSQQINENVMRAYYGSTEGGTNLTAYRDRMLALFQDLEPAVNVSAQRLSDQVRVILRNHRLDDATLDRLRSEVHSSPVTCRPVHVVVPPIGPPQPSCDMEADDRATTVSTQYNVVLRSTLEDTIREYRASPFGLRPRLPRLPMHNKNKAMIGALDSLLSTYFEGSEDLCDTHSILYCAAATACRVANVKCFDSSTATRPKPAVPAWQCRIERRIAEARALIGKLIAFREGNTRPRVMRFVRRAFAGVDINPREYAARATERIDFYKQKVYAWASRIRRYKRRVDRFTQNRIFNQDQRWVYRNWERSAQGVSDGHLPDDDVTNAFWRSIWSVPVNHTEGSWMLDVEQSCESIPEMGTITISPQDVASAVRPMSNWKSPGPDGLHNFWIKWLRSSHGCLASQFQSALEVGSLPQFLTTGSTHLLHKTGSTTDPKNFRPITCLPTIYKLLTSILRAKITKHIDDNNIMSASQNGCKNGSRGTKELLLIDMTICQQVRRSKKDLSTCWIDYKKAYDSVPHTWLMRVLELYKIDTTLRTFLLSCMRQWRTVLHYPGCRDIQQDGEPIRIERGIFQGDSLSPLWFCLALNPLSTLLENSGLGYSLRRRSQVISHLLYMDDLKLFAPSRFQLIKLLKITEAFSNSIRMEFGVDKCAVMHVKRGGIIESQGIQLSDSINLRSLSATETYKYLGMSEALGINVVDMKQSLKERFFGRLNKVLKSLLSGGNKVRAFNGWVMPTLMYSFGILKWTQTELDALDRRVRTLLTSNRMHHPRSSVMRLYIPRKCGGRGFLNAKTLHNREVCSLREYFLRAEVGMHREVVAVDKGLTPLFLAKENWCKPVVLSVNDRRDVWQSKELHGRFYKALHGPNVDFLSSVSWLRFGDLFGETEGFVCAIMDEVIMTNNYRKYILKDGTVDICRACHRPGESLRHIMSGCSRLANGEYLHRHNQVARIIHQQLALKYKLVDSEMPYYKYVPDPVLENDHITLYWDRSIITDRTIVANKPDIVVIDRLERRAMIVDITIPHDENLVKAERDKQIKYLDLAHEVVDLWEVDSAIIVPIVVSANGLMAKSLDQHLKRLTLGGWVKGLMQKAVLLDTARIVRRFLSLEP

SEQ ID NO: 29855 - protein, 1090 aa, Sesamia nonagrioides
MTPAAAVASSSSDEYFSPPTTPPPVRRRGGRRPPDRLGPRGPSASDRVPAPGGSVQRMRWTQSINENVMRSYYGATEGGNNLTAYRVRMLSLFQVLEPAVNVSAQRLSDQVRVIQRNHMLDDVVLDRLRLESRNSHVTPASSLVAVQLNSVSPRPNHVDEEDDARAISVSPQCNEQLRSALEDAFREYRSTPPELRPRLPRLPMHKKNKALVCALDSQLSNYLKDSKDLTDTHSILYCGAVAICRVAHVKFPDSDRATRPKPAVPAWHCRIERRIGETRALIGKLISFREGNTRPRVMRFVRRAFSGTDISTRDYLLHVTERIDFLKQKIYAWANRIRRYRRRVERYSQNRNFQSDERWVYRAWERSDQGVTDTCLPDDDATRSFWRNIWSVPVSHTEGGWTRDVERACDPVPEMGAITICPQDVARAVRPLPNWKSPGPDGLHNFWIKWFSGSHACLASQFQTALESGSLPQFLTTGITHLLHKSGSTAEPKNFRPITCLSTVYKVLTSILKAKINTHIDSNSIMSASQNGCRNGSRGTKELLLIDMAISQQVRRSRKDLSTCWIDYKKAYDSVPHTWLMRVLELYKVDATLRTFLMTCMSQWRTVLRYPGCRNIQRNSEPIRIERGIFQGDSLSPLWFCLALNPLSTLLEDSGLGYRLRRGGQVISHLLYMDDLKLFAHTNSQLKELLKITETFSSAIRMEFGVDKCAVMHVQRGEIVESVGTQLTGSINLRSLSASETYKYLGMSEALGINVTDMKQSLKERFFGRLKKVLNSLLSGGNKVRAFNGWVMPVLMYSFGILKWTQTELDALDQRVRTLLTANRLHHPRSSVMRLYIPRKCGGRGFLNAKTLHNREVCSLREYFLKTDVGMHRDVVAVDKGLTPLSLAKENWRKPVVLETNDRMEVWQSKELHGRFFRALRGPDVDFQASVAWLRYGDLFGETEGFVCAIMDEVMMTNNYRKFIVKDGTVDICRACHRPGESIRHIISGCSRLANGEYLHRHNLVARIIHQQLALKYNLVESEVPYYRYMPDPVLENGHITLYWDRSIITDRTIVANKPDIVMVDRSERRAMIVDITIPHDENLVKAEKD

SEQ ID NO: 29856 - protein, 1093 aa, Sesamia nonagrioides
MLTRQAARRARSPPPDSSPSTASPPPVPSANVSAVTTPAAVVASSSSDEYFSPPTSPRPVRRQGRGRPPKSLGLRGHPAPSRVPAAGGCVQRMRWTQTINENVMRAYYRATEGGTNLTAYRERMLSLFQALEPTVNVSAQRLSDQVRVIQRNHRLDDIALGRLRSEVLSNQITPTLTQTAAQASIIDAGPPRSNRVEEEDDRVETVSSQYNDRLRNALEDAFRDYRSTPTDLRPRLPRLPMHKKNRALVCALDSLLKNFFESSEDLIDTHSILYCAAVAACRLAKVKFPNCEEAARPKPAVPAWQRRIERRIDGTRVLIGKLYCFRDGNTRPRVMRFVRQAFSGTGISPREYINHLTERIDFLKQKVCAWASRIRRYKRRVDRYTQNRMFQSDERWVYRAWERPEQNEADVCRPDDATTSAFWRGIWSVSVCHTEGNWIRNVEQVCETIPEMDTILITPSDVAAAVRSLPNWKSPGPDGLHNFWLKWLSSSHTCLASQFQSSLESGSLPQFLTTGITHLLHKSGSTAEPKNYRPITCLPTVYKFLTSILKAKINKHLNSNSIMSVSQNGCKSGSRGTKELLLIDMAISQQVRRSRKDLSTCWIDYKKAYDSVPHTWLMRVLELYKINATLRTFLRSCMGQWKTALHYPGSRQIQGNDEPVWIKRGIFQGDSLSPVWFCLALNPLSTLLENSGLGYRLRRGGQVISHLLYMDDLKLFAPNELHLMKLLNVTETFNSGIRMEFGVDKCAVMHVKQGEIMESEGITLPDSIHLRSLSSFESYKYLGMSEALGINDADMKQSLKERFFGRLKKVLNSLLSGGNKVRAFNGWVMPVLMYSFGILKWTQTELDALDRRVRTLLTANRMHHPRSSVMRLYIPRKCGGRGFLNAKTLHNREVCSLREYFLQTVVGMHHDVVKVDKGLTPLSMAKENWHKPIILTTDDRRKVWQSKELHGRFYRALHEPDVDFLASVSWLRFSDLFGETEGFVCAIMDEVILTNNYRRYIMKDGTIDVCRACHHPGESIRHIISGCSRLANSEYLHRHNQVARIIHQQLALKYKLVDSEVPYYKYVPDPVLENDHVTLYWDRSIITDRTIEA

SEQ ID NO: 29857 - protein, 1203 aa, Parnassius orleans
MLTRQQARDRARITPPGLSLNSASPPPGTSTTSSVDAPAEAAASSSSDEFLSPPTSPPPVRRQGRRRPPNGMGSRSQQAPSRVPAAGGDVQRMRWTQSMNENVMRAYYGATEGGTRLTAYRARMLALFQVLEPAFDVSAQRLSDQVRVIQRNHRLDDAALDRLRNEALSSRIIPNPSQDRVQTIENNVAPPPFNSDDVVESDTAVVVSTQNNEKLRSALEDAIREYRAAQPEHRPRLPRLPMHNKNRALVCALDALLGKYFESSADLNDTHAILYCAAVAACRVANVKFPKNDNVTRPRQAVPAWQCRIERRIDEARVLIGKLYSFREGNTRPRVMRFVRRAFVGSEIRPQDYMLRITECIDSLKQKICAWANRIRRYKRRVERYVQNRMFQSDQRWVYRMWERPDRSVDDMRRPDDAATNEFWRNIWSVPVVHAEADWICDVEQACEAIPNMEATTITPADVASAVRLIPNWKSPGPDGLHNFWLKWLQSSHACLASQFQACLESGSLPQFLTTGITHLLHKSGCTAEPKNYRPITCLPTVYKLLTSVLRAKICKHIDNNKIMSASQNGCRRGSRGTKELLLIDMAISQQVRRSRKDLSTCWIDYKKAYDSVPHTWLMRVLELYKVDATLRTFLLSCMRQWRTVLRYPGCREMLGNDEPIRIERGIFQGDSLSPLWFCLALNPLSTLLEGSGLGYRLQRGGWVISHLLYMDDLKLFAPNKLRLLELLKVTETFSNSIRMEFGVDKCAVMHIKHGEIIESEGLQLSDSINIRSLSAGDTYKYLGMAEGLGIDVAGVKQSLQDRFFGRLNKVLKSFLSGGNRVRAFNGWVMPILMYSFGILKWTQTELDALDRKVRSLLTANRMHHPRSSVMRLYIPRKCGGRGFLNAKTLHNREVCSLREFFFKTDEPMHRVVVAVDKGLTPLSLAKENWRKLKVLSTNDRKEVWQSKELHGRFFRALHGPDVDFLASVSWLRFGDLFGETEGFVCAIMDEVIMTNNYRRFIVKDGTVDICRACHRPGESLRHIISGCSRLANGEYLHRHNQVARIIHQQLALKYNLVDSEVPYYKYVPDPVLENGHITLYWDRSIITDRTIVANKPDIVVIDRTARLTIIVDVTIPHDENLVKAEKDKQTKYLDLAHELVDMWDVDSAVIVPIVVTANGLIAKSLDHHLRRLSLGGWVKGLIQKAVLLDTARIVRRFLSLEP

SEQ ID NO: 29858 - protein, 1202 aa, Amphipyra berbera
MLTRSRTRTTEQRSARPPPPDSPLSSASQPPELGLPVTPAAAASSSSSDEYFSPPMSPRPVRRQGRGRPPNSLGPRGPPAPSRVLAAGGYVQRMKWTQSINENVMRAYYGSTEGGTNLTAYRVRMLTLFQELEPAINVSAQRLSDQVRVIQRNHRLDDAALDRLRLEVQNSRAIPVPSQTAVHQLINVAPPRSDRVDGDEDDGAVTVSSQYNDRLRSALEDAIRECRANPESRPRLPRLPMHNKNRALVCALDSLLANYFESSEDLGDTHSILYCAAVAACRVANVKFNNSERATRPKLAVPAWQCRIERRIDETRALIGKLICFREGNTRPRVMRFVRRAFSGTGISPREYTSRATERIDFLKQKVCAWASRIRRYKRRVERYTQNRMFQCDQRWVYRAWERPDQSVSGGRLPDDDAMSSFWRSIWSVPVIHTEGDWMRDIERTCESIEEMGEIVISPQDVAGAVRPLPNWKSPGPDGLHNFWIKWLRSSHARLASQFQSSLESGSLPQFLTTGVTHLLHKSGSTAEPKNYRPITCLPTVYKLLTSILRSKINTHIGNNSVLSSSQNGCRNGSRGTKELLLIDTAISQQVRRSQKSLSTCWIDYKKAYDSVPHTWLMRVLELYKINTTLRTFLRSCMGQWRTVLRYPGCQPIRGSGEPIRIERGIFQGDSLSPLWFCLALNPLSTLLEGSGLGYPLRRGGQVVSHLLYMDDLKLFAPTRLQLVDLLKVTETFSNSIRMEFGVDKCAVMHVRRGRIMESEGLQLSDSIHLSPLSANDTYKYLGMSEGLGISEADMKQSLRERFFGRLKKVLKSLLSGGNKVRAFNGWVMPVLMYSFGILKWTQTELDALDRRVRTLLTANRMHHPRSSVMRLYIPRKCGGRGLLNAKTLHNREVCSLREFFLHADAGMHRDVVAVDKGLTPLSLARENWRKPVVLSTNDRREIWQSKELHGRFYRALHGPDVDFLASVSWLRFGDLFGETEGFVCAIMDEVIMTNNYRKYIVKDGTVDICRACHCPGESLRHIISGCSRLANGEYLHRHNQVARIIHQQLALKYNLVESEVPYYRYVPDPVLENGRITLYWDRSIITDRTIVANKPDIVVIDRSERRTMIVDVTIPHDGNLVKAEKDKQIKYLDLAHEVVNMWDVESATIVPIVVTADGLMAKSLDKHLMRLSLGGWFKGLIQKAVLLDTARIVRRFLSLEP

SEQ ID NO: 29859 - protein, 868 aa, Amphipyra berbera
MRFVRRAFSGTGINPREYTSRATERIDFLKEKVCAWASRIRRYKRRVVRYNQNRMFQCDQRWVYRAWERPDQSVSGGRLPDDDAMSSFWRSIWSVPVIHTEGDWMRDIERTCESIEEMGEIVISPQDVADAVRPLPNWKSPGPDGLHNFWIKWLRSSHARLASQFQSSLESGSLPQFLTTGVTHLLHKSGSTAEPKNYRPITCLPTVYKLLTSILRSKINTHIGNNSVLSSSQNGCRNGSRGTKELLLIDTAISQQVRRSQKNLSTCWIDYKKAYDSVPHTWLMRVLELYKINTTLRTFLRSCMGQWRTVLRYPGCQPIRGSGEPIRIERGIFQGDSLSPLWFCLALNPLSTLLEGSGLGYPLRRGGQVVSHLLYMDDLKLFAPTKLQLVDLLKVTETFSNSIRMEFGVDKCAVMHVRRGRIMESEGLQLSDSIHLRPLSTNDTYKYLGMSEGLGISEADMKQSLRERFFGRLKKVLKSLLSGGNKVRAFNGWVMPVLMYSFGILKWTQTELDALDGRVRTLLTANRMHHPRSSVMRLYIPRKCGVRGLLNAKTLHNREVCSLREFFLHADAGMHRDVVAVDKGLTPLSLARENWRKPVVLSTNDRREIWQSKELHGRFYRALHGPDVDFLASVSWLRFGDLFGETEGFVCAIIDEVIMTNNYPKYIVKDGTVNICRACHCPGESLRHIISGCSRLANGEYLHRHNQVARIIHQQLALKYNLVESEVPYYRYVPDPVLENGRITLYWDRSIITDRTIVANKPDIVVIDRSERRTMIVDVTIPHDGNLVKAEKDKQIKYLDLAHEVVNMWDVESATIVPIVVSANGLMAKSLDKHLMRLSLGGWIKGLIQKAVLLDTARIVRRFLSLEP

SEQ ID NO: 29860 - protein, 1200 aa, Mythimna ferrago
MLTRSRARRLETHPTTSGSSLNSASQPPGPAPAVSPVIPEAAVASSSSDEYFSPPTTPPPARRRGRGRPPASLGPRGPPASDRVPAVGGSVQRMRWTSSINENVMRSYFGATEGGINLTAYRGRMLSLFQVLEPAVNVSVQRLSDQVRVIQRNRMLDDAVLDRLRLESQSSRVLAATPSAAAQRQPSAAPRPDHVGDADDDAAISVSTQCNERLRGALEDAFREYRSIPPELRPRLPRLPMHKKNRALVCALDSQLSICFDSSEDLADTHSILYCAAVAACRVAHVKFPNCNRATRPAVPAWQCRIERRIGEARALIGKLICFREGNTRPRVMRFVRRAFSGTDISPRDYLPCVTERIDFLKQKIYAWANRIRRYKRRVERYTQNRTFQSNERWVYRAWERPDQGVTDTRLPDDDAMCSFWRSIWSAPVSHTEGDWIREVERACDLLPEMGAITISPQDVARAVRPLPNWKSPGPDGLHNFWLKWFQGSHARLASQFQFALESGSLPQFLTTGITHLLHKSGSTAEPKNYRPITCLPTVYKVLTSILKAKINSHIETNSIMSVSQNGCRSGSRGTKELLLIDIAISQQVRRSRKNLSACWIDYKKAYDSVPHTWLMRVLELYKVDATLRTFLMSCMGQWRTVLHYPGCRQIWENSEPIRIERGIFQGDSLSPLWFCLALNPLSTLLEGSGLGYRLKRGGQVISHLLYMDDLKLFAPNNLQLMELLKVTETFSSAIRMDFGVDKCAVIHVKRGEIMESEGIQLSDSIHLRSLSSTETYKYLGMSEALGINTDDVKQSLKERFFGRLNKVLNSLLSGGNKVRAFNGWVMPVLMYSFGILKWTQTELDALDRRVRTLLTANRMHHPRSSVMRLYIPRKCGGRGFLNAKSLHNREVCSLREYLLAVDVGMHRDVVAVDKGLTPLSLANENWRKPLVLDTNDRREVWQGKELHGRFYRALHGPDVDLLASVSWLRFGDLFGETEGFVFAIMDEVMMTNNYRKYIVKDGTVDICRACHRPGESIRHIISGCSRLANGDYLHRHNLVARIIHQQLALKYNLVESEVPYYRYVPDPVLDNGSITLYWDRSIITDRTIVANKPDIVVIDRLERRTMIVDIAVPHDENLVKAEKDKQIKYLDLAREVVDMWEVDRAIIVPIVVTANGLIAKSLEQHLRRLSLGSWIKGLIQKAVLLDTARIVRRFLSQEP

SEQ ID NO: 29861 - protein, 1202 aa, Amphipyra tragopoginis
MLTRSRARARDNQAHLPPPDSSPSSASQQQGLNPASPAAAVASSSSDEYYSPPSSPPPARRRGGTRPPVGLGLRGPLASDRVPAPGGIVPRMKWTQKMNESVMRAYYGATEGGTNLTAYRSRMLSLFQVLEPAVNVSAQRLSDQVRVIQRGHMLDDTVLDRLRSEVQSSPVISPSSQVLEQQQNLAAALPRPNRADEEDDDRAANVSTQCNDELRSALEDAMREYRYTRSDLRPRIPRLPMHRKNRALVCALDSLLSNYFDGSEDLGDTHSILYCAAVAACRVAHVKFTDNERATRPKNAVPAWQCRIERRISEARALIGKLVCFREGNTRPRVMRFVRRAFSGTDVSPREYMSRITERIDFLKQKVYAWANRIRRYRRRVDRYTQNRLFQSDERWVYRTWERPDQRVSDTRLPDNDVMNTFWRNIWSVPVAHTEGDWMREVQRACEPIQEMGDIIISPQDVASAVRPMSNWKSPGPDGLHNFWLKWLRSSHARLASQFQSSLESGSLPQFLTTGVTHLLHKSGSTAEPKNYRPITCLPTVYKVLTSILRTKINNHIDNNSIMSASQNGCRNGSRGTKELLLIDMAISQQVRRSRKDLSTCWIDYKKAYDSVPHTWLMRVLELYKVNTTLCAFLTSCMGQWRTVLRYPGCRQIQGIGEPIRIERGIFQGDSLSPLWFCLALNPLSTLLEGSGLGYRLRRGGQVISHLLYMDDLKLFAPNNLRLLELLKVTETFSNSIRMEFGVDKCAVMHVKRGRIMESVGTQLSDSIQLRSLSSTETYKYLGMSEALGVNETDMKQSLKERFFGRLKKVFNSLLSGGNKVRAFNGWVMPVLMYSFGILKWTQTELDALDRRVRSLLTANRMHHPRSSVMRLYIPRKCGGRGFLNAKTLHNREVCSLREYFSQADVGMHRDVVAVDKGFTPLSLAKENWRKPVVLDTNGRREVWRSKELHGRFYRALHGPDVDFLASVAWLRFGDLFGETEGFVCAIMDEVMMTNNYRKYVVKDGTVDICRACHCPGESIRHIVSGCSRLANGEYLHRHNLVARIIHQQLALKYNLVDAEVPYYKYVPDPVLENGHVTLYWDRSIITDRTIVANKPDIVVIDRSERLTMIVDITVPHDENLVKAEKDKEIKYQDLAHEVVAMWDVDSAIIVPIVVTANGLIAKSLDQHLKRLSLGSWIKGLIQRAVLLDTARIVRKFLSLRP

SEQ ID NO: 29862 - protein, 1202 aa, Amphipyra tragopoginis
MLTRSRARARDNQAHLPPPDSSPSSASQQQGLNPASPAAAVASSSSDEYYSPPSSPPPARRRGGTRPPVGLGLRGPLASDRVPAPGGIVPRMKWTQKMNESVMRAYYGATEGGTNLTAYRSRMLSLFQVLEPAVNVSAQRLSDQVRVIQRGHMLDDTVLDRLRSEVQSSPVISPSSQVLEQQQNLAAALPRPNRADEEDDDRAANVSTQCNDELRSALEDAMREYRYTRSDLRPRIPRLPMHRKNRALVCALDSLLSNYFDGSEDLGDTHSILYCAAVAACRVAHVKFTDNERATRPKNAVPAWQCRIERRISEARALIGKLVCFREGNTRPRVMRFVRRAFSGTDVSPREYMSRVTERIDFLKQKVYAWANRIRRYRRRVDRYTQNRLFQSDERWVYRTWERPDQRVGDTRLPDNDVMNTFWRNIWSVPVAHTEGDWMQEVQRACEPIQEMGDIIISPQDVASAVRPMSNWKSPGPDGLHNFWLKWLRSSHARLASQFQSSLESGSLPQFLTTGVTHLLHKSGSTAEPKNYRPITCLPTVYKVLTSILRTKINNHIDNNSIMSASQNGCRNGSRGTKELLLIDMAISQQVRRPRKDLSTCWIDYKKAYDSVPHTWLMRVLELYKVNTTLCAFLTSCMGQWRTVLRYPGCRQIQGIGEPIRIERGIFQGDSLSPLWFCLALNPLSTLLEGSGLGYRLRRGGQVISHLLYMDDLKLFAPNNLRLLELLKVTETFSNSIRMEFGVDKCAVMHVKRGRIMESVGTQLSDSIQLRSLSSTETYKYLGMSEALGVNETDMKQSLKERFFGRLKKVFNSLLSGGNKVRAFNGWVMPVLMYSFGILKWTQTELDALDRRVRSLLTANRMHHPRSSVMRLYIPRKCGGRGFLNAKTLHNREVCSLREYFSQADVGMHRDVVAVDKGFTPLSLAKENWRKPVVLDTNGRREVWRSKELHGRFYRALHGPDVDFLASVAWLRFGDLFGETEGFVCAIMDEVMMTNNYRKYVVKDGTVDICRACHCPGESIRHIVSGCSRLANGEYLHRHNLVARIIHQQLALKYNLVDAEVPYYKYVPDPVLENGHVTLYWDRSIITDRTIVANKPDIVVIDRSERLTMIVDITVPHDENLVKAEKDKEIKYQDLAHEVVAMWDVDSAIIVPIVVTANGLIAKSLDQHLKRLSLGSWIKGLIQKAVLLDTARIVRKFLSLRP

SEQ ID NO: 29863 - protein, 1202 aa, Amphipyra tragopoginis
MLTRSRARARDNQAHLPPPDSSPSSASQQQGLNPASPAAAVASSSSDEYYSPPSSPPPARRRGGTRPPVGLGLRGPLASDRVPAPGGIVPRMKWTQKINESVMRAYYGATEGGTNLTAYRSRMLSLFQVLEPAVNVSAQRLSDQVRVIQRGHMLDDTVLDRLRSEVQSSPVISPSSQVLEQQQNLAAALPRPNRADEEDDDRAANVSTQCNDELRSALEDAMREYRYTRSDLRPRIPRLPMHRKNRALVCALDSLLSNYFDGSEDLGDTHSILYCAAVAACRVAHVKFTDNERATRPKNAVPAWQCRIERRISEARALIGKLVCFREGNTRPRVMRFVRRAFSGTDVSPREYMSRVTERIDFLKQKVYAWANRIRRYRRRVDRYTQNRLFQSDERWVYRTWERPDQRVSDTRLPDNDVMNTFWRNIWSVPVAHTEGDWMQEVQRACEPIQEMGDIIISPQDVASAVRPMSNWKSPGPDGLHNFWLKWLRSSHARLASQFQSSLESGSLPQFLTTGVTHLLHKSGSTAEPKNYRPITCLPTVYKVLTSILRAKINNHIDNNSIMSASQNGCRNGSRGTKELLLIDMAISQQVRRSRKDLSTCWIDYKKAYDSVPHTWLMRVLELYKVNTTLCAFLTSCMGQWRTVLRYPGCRQIQGIGEPIRIERGIFQGDSLSPLWFCLALNPLSTLLEGSGLGYRLRRGGQVISHLLYMDDLKLFAPNNLRLLELLKVTETFSNSIRMEFGVDKCAVMHVKRGRIMESVGTQLSDSIQLRSLSSTETYKYLGMSEALGVNETDMKQSLRERFFGRLKKVFNSLLSGGNKVRAFNGWVMPVLMYSFGILKWTQTELDALDRRVRSLLTANRMHHPRSSVMRLYIPRKCGGRGFLNAKTLHNREVCSLREYFSQADVGMHRDVVAVDKGFTPLSLAKENWRKPVVLDTNGRREVWRSKELHGRFYRALHGPDVDFLASVAWLRFGDLFGETEGFVCAIMDEVMMTNNYRKYIVKDGTVDICRACHCPGESIRHIVSGCSRLANGEYLHRHNLVARIIHQQLALKYNLVDAEVPYYKYVPDPVLENGHVTLYWDRSIITDRTIVANKPDIVVIDRSERLTMIVDITVPHDENLVKAEKDKEIKYQDLAHEVVAMWDVDSAIIVPIVVTANGLIAKSLDQHLKRLSLGSWIKGLIQKAVLLDTARIVRKFLSLRP

SEQ ID NO: 29864 - protein, 1127 aa, Autographa pulchrina
MLTRSRKRKPARPPSPDSSPSSASQLPDHVQAPAPAVASSSSDEYYSPPTSPTPVRRQGRRRPPSSLAPAGQPASNRAPAPGGDVRRMKWTQGINENVMRAYYGATEGGTNLTAYRARMLSLFQVLEPGVSVSAQRLSDQVRVIQRNHRLDDSTLDRLRSEVQSSPATNTLPPAAAPVSGASHTAPSDGEEDDGAMTVSTQCSELIRSTLEDAIRDYRTSPPDQRPRLPRLPMHNRNKAIMTLIAKLIAFKQGNSRPRVMRFVRRAFAGTDISSSEYTARVTERIDLLKQKVCAWASRIRRYKRRVERFYLNRMFQKDQRWVYRAWERPASGVDGGCLPDGDATNSFWRSIWSVPVSHSEGGWMREVEQVCEPIQEMGAITISPQDVANAVRPMANWKTPGPDGLQNFWLKWLRSSHGCLASQFQSAVESASLPQFLTTGSTHLLHKTGSATDPKNYRPITCLPTVYKLLTSILRAKINEHVVSFSIMSASQNGCRSGSRGTKELLLIDTAICQQVRRSKKDLSTCWIDYKKAYDSVPHTWLMRVLELYKINATLRAFLVSCMGQWSTVLHYPGCRDIQQGGEPIRIERGIFQGDSLSPLWFCLALNPLSTLLENSRLGYSLRRGSQVISHLLYMDDLKLFANSGLQLMKLLKITESFSNSIRMEFGVDKCAVMHVKRGGVVESQGIQLSDSINLRSLSATETYKYLGMSEALGINAADVKQSLQARFFGRLNKVLKSVLSGGNKVRAFNGWVMPVLMYSFGVLKWTQTELDALDRRVRTLLTANRMHHPRSSVMRLYIPRKCGGRGFLNAKTLHNREVCNLREYFLQVDVGMHRDVVVVDKGLTPLSLGKENWHKPVVLSVKDREVVWQSKELHGRYYRTLHGSDVDFLASVAWLRFGDLFGETEGFVCAIMDEVIMTNNYRKYIIKDGTVDICRACHCPGESLRHIISGCSRLANGEYLHRHNQVARIIHQQLALRYKLVESEVPYYRYVPDPVLENGRVTLYWDRSIITDRTIVANKPDIVVIDRSERRAIIVDITIPHDENLVKAEKEKQLKYLDLAHEVVDMWEVDSAIIVPIVVTANGIIAKSLDQHLKRLSLGAWVKGLMQKAVLLDTARIVRRFLSLEP

SEQ ID NO: 29865 - protein, 962 aa, Mythimna impura
MHKKNRALVCTLDSLLKNNFESSENLVDTHSILYCGAVAACRLANINFPNIDGTIRPKPAIPAWQYRIERRIDGARVLIGKLHCFREGNTRPRVMRFVRRAFLGTGISPQEYMSRVTERIDFLKQKVCAWASRIRRYKRRVDRYSQNRMFQSDERWVYRAWERPEQNVIDGRRPDDFATITFWRNIWSVPVSHTEGDWMRDVERVCEAIPEMEKVVITPADVAKAVRPLPNWKSPGPDGLQNFWLKWFSNSHAPLASQFQSTLESGSLPEYLTTGVTHLLHKTGNPVEPKNYRPITCLSTVYKLLTSILRAKINRHIENNLIMSASQNGCRNGSRGTKELLLIDMAISQQARRSRKDLSTCWIDYKKAYDSVPHTWLMRVLELYKVDMTLRTFLESCMRQWKTVLRYPGCRPIQGNDEPIRIKRGIFQGDSLSPLWFCLALNPLSTLLEESGLGYRLRRGGQVISHLLYMDDLKLFAPSNLQLMELLKVTETFSSAIRMEFGVDKCAAMHVKRGEIMESEGIQLPDSIHLRSLSSTETYRYLGMSEALGINSADMKQSLKERFFGRLKKVLNSLLSGGNKVRAFNGWVMPVLMYSFGILKWTQTELDALDRRVRTLLTANRMHHPRSSVMRLYISRKCGGRGFLNAKTLHNREVCSLREYFLKTDVGMHRDVVAVDKGLTPLSMAKEDWRKPVILTTDDRKEIWKGKELHGRFYRALHEPDVDFLASVAWLRFSDLFGETEGFICAIMDEVILTNNYRRYIMKDGTVDVCRACHRPGESIRHIISGCSRLANGEYLHRHNQVARIIHQQLALKYNLVDSEVPYYKYVPDPVLENDHVTLYWDRSIITDRTIVANKPDIVVIDRLARRAVIVDVTIPHDENLVKAEKEKQIKYLDLAHEVVDMWNVDSAVIVPMVVTANGLIAKSFDDHLSKLSLRGWIKGLIQKAVLLDTARIVRRFLSLEP

SEQ ID NO: 29866 - protein, 1095 aa, Xestia xanthographa
MMLTRAAAARRAHLPTPDSSLSSASPPPDPRSPVSPVAAVASSSSDEYFSPPTSPPPVRRAGRGRPPTSLGLRGRQAPSRVPATGGCVQRMKWTQSMNENVMRAYYGSTEGGTNLTAYRVRMLSLFQDLEPTVIVSAQRLSDQVRVIQRSHRLDDAALDRLRSEVLSNLIVLTPTQTAVQVSAIDATPPRLNPAVVEEDDGVATVSSQCNDRLRSALENALHEYRSTPTELRPRLPRLPMHKKNTALVCALDSQLKNIFESSENLVDTHSILFCGAVAACRIANVKFPNCDVATRPKPAVPAWQRRIERRIDGARVLIGKLYCFREGNTRPRVMRFVRRAFSGTEISPQEYMSRATERIDFLKQKVYAWANRIRRYKRRVDRYSQNRMFQSDERWVYRAWERPEQNMTDVCRPDDAATSSFWRSIWSVPVCHTEADWMRDVERVCEPIPEMEPIFITPVDVARAVRPLPNWKSPGPDGLHNFWLKWFSSSHTCLASQFQSSLESGSLPQFLTTGVTHLLHKSGSPAEPKNYRPITCLSTIYKLLTSILRVKINTHIDKNSIMSASQNGCRNGSRGTKELLLIDMAISQQVRRSRKDLSTCWIDYKKAYDSVPHTWLMRVLELYKVDTTLRTFLESCMGQWKTVLRYPGCRQIQGSDEPVWIKRGIFQGDSLSPVWFCLALNPLSTLLENSGLGCRLRKDGQVISHLLYMDDLKLFAPNKLRLMELLKVTETFSSAIRMEFGVDKCAVMYVKRGEIMESEGLQLSDSIHLKSLSSSETYKYLGMSEALGINVTDMKQSLRERFFGRLRKVLNSLLSGGNKVRAFNGWVMPVLMYSFGILKWTQTELDALDRRVRTLLTESRMHHPRSSVMRLYIPRKCGGRGFLNAKTLHNREVCSLREYFLKAEVGMHRDVVAVDKGLTPLSMAKENWHRPEVLTTDDRKEVWQGKVLHGRFYRALHGPDVDFIASVSWLRFGDLFGETEGFVCAIMDEVMLTNNYRKYIMKDGTVDVCRACHLPGESIRHIISGCSRLANGEYLHRHNQVARIIHQQLALKYKLVESEVPYYKYVPDPVLENDHVTLYWDRSIITDRTIVANTY

SEQ ID NO: 29867 - protein, 1176 aa, Mamestra brassicae
MLTRAALQRARPPPPDPSLSSASPPPDIGSPLSPAVAVASSSSDEYFSPPTSPTPVRRQGRGRPPRGLGPRGQPAPRRVPATGGCVQRMRWTQSMNENVMRAYYGSTEGGTNLTAYRVRMLSLFQDLEPTVNVSAQRLSDQVRVIQRNHRLDDAALNRLRSEVLNNLIISTPTQTAVQAPVNDRITPRPNNVSDEVDDRVVTVSSQCNDRLRSALEDALREYRSTPTELRPRLPRLPMHKKNRALVCALDSLLQNIFESSENLVDTHSILYCGAIYIANVKFPGCDEAIRPKPAAPAWQRRIERRIDETRALIGKLYCFREGNTRPRVMRFVRRAFSGTEISPRDFKSRVTERIDFLKQKVCAWASRIRRYKRRVDRYSQNRMFQSDERWVYRAWERPEQSVMDVCRPDDNTTSTFWRGIWSVPICHTEGGWLRDVEHVCEAIPEMDTITITPLDVAKAVRPLPNWKSPGPDGLHNFWLKWYSSSHVLLASQFQSSLESGSLPQFLTTGVTHLLHKTGSPAEPNNYRPITCLSTVYKLLTSILRAKINQHIERNSIMSASQNGCRKGSRGTKELLLIDMAISQQVRRSRKDLSTCWIDYKKAYDSVPHTWLMKVLELYKIDATLRTFLESCMRQWKTVLRYPGCRPIQGSDEPVWIKRGIFQGDSLSPLWFCLALNPLSTLLEDSGLGYRLRRGGQAISHLLYMDDLKLFAPNNLQLMELIKVTETFSSAIRMEFGVDKCAVMHVKKGEIMESEGIQLSDSIQVRSLISTETYKYLGMLEALGINGTDMKQSLRERFFGRLKKVLNSLLSGGNKVRAFNGWVMPVLMYTFGILKWTQTELDALDRRVRTLLTANRMHHPRSSVMRLYIPRKCGGRGFLNAKTLHNREMCSLREYFLKADVGMHRDVVAVDKGLTPLSMAKENWRTPVILTTDDRKEVWKGKELHGRFYRALHGSDVDFSASVAWLRFGDLFGETEGFVCAIMDEVILTNNYRRHIMKDGTVDMCRACHRPGESIRHIISGCSRLANGEYLHRHNQVARIIHQQLALKYNLVDSEVPYYKYVPDPVLENDHVTLYWDRSIITDGTIVANKPDIVVIDRLARRTMIIDVTIPHDENLVKAEKEKQIKYLDLAHEVVDMWNVESAVIVPIVVTANGLMAKSFDDHLSKLALRSWVKGLI

SEQ ID NO: 29868 - protein, 1061 aa, Atethmia centrago
MNENVMRAYYGSTEGGTNLTAYRVKMLSLFQELEPAVNVSAQRLSDQVRVIQRNRRLDDAALDRLRSEVLSNHIISTPAQTAVHTPIIDVIPPRSNHGVEEEDDRAATVSSQCNVRLRSALEDAFREYRSTPTELRPRLPRLPMHKKNRALMCALDSQLKVFFESSEDLVDTHSILYCAAVAACRLANVKFPNSDGATRPKPAVPAWQCRIERRIDGARVLIGKLYCFREGNTRPRVMRFVRRAFSGTGISPREYMSHITERIDFLKQKVCAWASRIRRYKRRVDRYTQNRMFQSDERWVYRAWERPKQNETDVCHPDDATTTAFWRSIWSVPVCHVEADWMRDVERVCETIPEMEVVIITPSDIARAVRPLPNWKSPGPDGLHKFWLKWLTSSHTCLASQFQSSLESGSLPQFMTTGITHLLHKSGSPAEPKNYRPITCLSTVYKLLTSILRAKINTHIDSNSIMSASQNGCRNGSRGTKELLLIDMAISQQVRRSRKDLSTCWIDYKKAYDSVPHTWLMRVLELYKIDMTLRTFLESCMGQWRTVLRYPGCRQIQGNDESVWIKRGIFQGDSLSPLWFCLALNPLSMQLEDSGLGYRLRRGGQVICHLLYMDDLKIFAPNKLQLMELLKVTETFSSAIRMEFGVDKCAVMHVKRGEIMESEGIRLSDSIHLRSLSSPESYKYLGMSEVLGINVTDMKQSLKERFFGRLKKVLISLLSGGNKVRAFNGWVMPVLMYSFGILKWTQTELDALDRRVRTLLTANRMHHPRSSAMRLYIPRKCGGRGFLNAKTLHNREICSLREYFLKTEVDMHRDVVAVDKGLTPLSMAKENWCKPVVLTTDDRKEIWQNKELHGRFYRALHEPDVDFLASVSWLRFGDLFGETEGFVCAIMDEVILTNNYRRHIMKDGTVDVCRACNSEVPYYKYVPDPVLENDHVTLYWDRSIITDRTIVANKPDIVVIDRLARRAMIVDVTIPHDDNLVKAEKEKQIKYLDLAHEVVDMWNVNSAVIVPIVVTANGLMARSLNHHLSRLTLDGWIKGLIQKAVLLDTARIVRRFLSLES

SEQ ID NO: 29869 - protein, 1194 aa, Abrostola tripartita
MITRSRAKIAQSTSPDSSPRSASQLPDQQALHSPASAVASSSSDEYFSPPTSPTPVRRQRRGRPPTSLGLWGQLAPNRVPASGGYVQRMKWSQQINENVMRAYYGSTEGGTNLTAYRDRMLALFQDLEPAVNVSAQRLSDQVRVILRNHRLDDATLDRLRSEVHSSPVTCRPVHVVVPPIGPPQPSCDMEADDRATTVSTQYNDVLRSTLEDTIREYRASPSGLRPRLPRLPMHNKNKAMISALDSLLSTYFEGSEDLCDTHSILYCAAATACRVANVKCFDSSTATRPKPAVPAWQCRIERRIAEARALIGKLIAFREGNTRPRVMRFVRRAFAGVDINPREYAARATERIDFYKQKVYAWASRIRRYKRRVDRFTQNRIFNQDQRWVYRNWERSAQGVSDGHLPDDDVTNAFWRSIWSVPVNHTEGSWMLDVEQSCESIPEMGTITISPQDVASAVRPMSNWKSPGPDGLHNFWIKWLRSSHGCLASQFQSALEVGSLPQFLTTGSTHLLHKTGSTTDPKNFRPITCLPTICKLLTSILRAKITKHIDDNNIMSASQNGCKNGSRGTKELLLIDMTICQQVRRSKKDLSTCWIDYKKAYDSVPHTWLMRVLELYKIDTTLRTFLLSCMRQWRTVLHYPGCRDIQQDGEPIRIERGIFQGDSLSPLWFCLALNPLSTLLENSGLGYSLRRRSQVISHLLYMDDLKLFAPSRFQLIKLLKITEAFSNSIRMEFGVDKCAVMHVKRGGIIESQGIQLSDSINLRSLSATETYKYLGMSEALGINVVDMKQSLKERFFGRLNKVLKSLLSGGNKVRAFNGWVMPTLMYSFGILKWTQTELDALDRRVRTLLTSNRMHHPRSSVMRLYIPRKCGGRGFLNAKTLHNREVCSLREYFLRAEVGMHREVVAVDKGLTPLFLAKENWCKPVVLSVNDRRDVWQSKELHGRFYKALHGPNVDLLSSVSWLRFGDLFGETEGFVCAIMDEVIMTNNYRKYILKDGTVDICRACHRPGESLRHIMSGCSRLANGEYLHRHNQVARIIHQQLALKYKLVDSEMPYYRYVPDPVLENDHITLYWDRSIITDRTIVANKPDIVVIDRLERRAMIVDITIPHDENLVKAERDKQIKYLDLAHEVVDMWEVDSAIIVPIVVSANGLMAKSLDQHLKRLTLGGWVKGLMQKAVLLDTARIVRRFLSLEP

SEQ ID NO: 29870 - protein, 1194 aa, Autographa gamma
MLTRSRARKPARPPSPDPSPSSAFQLPDHVPAPAPAVASSSSDEYYSPPTSPTPVRRQGRRRPPCSLAPSGQPASNRAPAPGGDVRRMKWTLSINENVMRAYYGATEGGTNLTAYRARMLSLFQALEPGVSVSAQRLSDQVRVIQRNHRLDDSTLDRLRSEIQHSPATSTSPPVAAPVSGAPLTAPSDGEEEDGAITVSTQCNELIRSTLEDAIRVYRRSPPDQRPRLPRLPMHNRNKAIMGALDSLLPVYFESSEDLRDTHSILYCAALTACRVANVAMCHSNIATRPKPAVPAWQCRIEQRVAEARTLIAKLKAFKQGNSRPRVMRFVRRAYAGTDISPSEYIARVTERIDLFKQRVCAWANRIRRYKRRAERFHLNRMFQKDQRWVHRLWERPVSAMDGGCLPDGDATNSFWRSIWSVPVTHSEGGWMREVEQVCEPIQEMGAITISPQDVANAVRPMANWKTPGPDGLQNFWLKWLRSSHSCLASQFQSAVESASLPQFLTTGSTHLLHKTGSATDPKNYRPITCLPTVYKLLTSILRAKINEHIVNFSIMSASQNGCRSGSRGTKELLLIDTAICQQVRRSKKDLSTCWIDYKKAYDSVPHTWLMRVLELYKINTTLRAFLMSCMGQWSTVLHYPGCRDIQQGGEPIRIERGIFQGDSLSPLWFCLALNPLSTLLENSGLGYSLRRGGQVISHLLYMDDLKLFATSGFQLMELLKITESFSNSISMEFGVDKCAVMHVKRGGIVESQGIQLSDSINLRSLSATDTYKYLGMSEALGINVADVKQSLQARFFGRLNKVLKSVLSGGNRVRAFNGWVMPVLMYSFGVLKWTQTELDALDRRVRTLLTANRMHHPRSSVMRLYIPRKCGGRGFLNAKTLHNREVCNLREYFLQVDVGMHRDVVVVDKGFTPLSLGKENWHKPVVLSVKDREDVWQRKELHGRYYRTLHGPDVDFLASVAWLRFGDLFGETEGFVCAIMDEVIMTNNYRKYIIKDGTVDICRACHCPGESLRHIISGCSRLANGEYLHRHNQVARIIHQQLALRYKLVESEVPYYRYVPDPVLENGRVTLYWDRSIITDRTIVANKPDIVVIDRSARRAIIVDVTIPHDENLVKAEKEKQLKYLDLAHEVVDMWEVDSAMIVPIVVTANGIIAKSLDQHLKRLSLGTWVKGLIQKAVLLDTARIVRRFLSLES

SEQ ID NO: 29871 - protein, 1194 aa, Autographa gamma
MLTRSRARKPARPPSPDPSPSSASQLPDHVPAPALAVASSSSDEYYSPPTSPTPVRRQGRRRPPCSLAPSGQPASNRAPAPGGDVRRMKWTLSINENVMRAYYGATEGGTNLTAYRARMLSLFQALEPGVSVSAQRLSDQVRVIQRNHRLDDSTLDRLRSEIQHSPATSTSPPVAAPVSGAPLTAPSDGEEEDGAITVSTQCNELIRSTLEDAIRVYRRSPPDQRPRLPRLPMHNRNKAIMGALDSLLPVYFESSEDLRDTHSILYCAALTACRVANVAMCHSNIATRPKPAVPAWQCRIEQRVAEARTLIAKLKAFKQGNSRPRVMRFVRRAYAGTDISPSEFIARVTERIDLFKQKVCAWANRIRRYKRRAERFHLNRMFQKDQRWVHRLWERPVSAMDGGCLPDGDATNSFWRSIWSVPVTHSEGGWMREVEQVCEPIQEMGAITISPQDVANAVRPMANWKTPGPDGLQNFWLKWLRSSHSCLASQFQSAVESASLPQFLTTGSTHLLHKTGSATDPKNYRPITCLPTVYKLLTSILRAKINEHIVNFSIMSASQNGCRSGSRGTKELLLIDTAICQQVRRSKKDLSTCWIDYKKAYDSVPHTWLMRVLELYKINTTLRAFLKSCMGQWSTVLHYPGCRDIQQGGEPIRIERGIFQGDSLSPLWFCLALNPLSTLLENSGLGYSLRRGGQVISHLLYMDDLKLFATSGFQLMELLKITESFSNSISMEFGVDKCAVMHVKRGGIVESQGIQLSDSINLRSLSATDTYKYLGMSEALGINVADVKQSLQARFFGRLNKVLKSVLSGGNRVRAFNGWVMPVLMYSFGVLKWTQTELDALDRRVRTLLTANRMHHPRSSVMRLYIPRKCGGRGFLNAKTLHNREVCNLREYFLQVDVGMHRDVVVVDKGFTPLSLGKENWHKPVVLSVKDREDVWQSKELHGRYYRTLHGPDVDFLASVAWLRFGDLFGETEGFVCAIMDEVIMTNNYRKYIIKDGTVDICRACHCPGESLRHIISGCSRLANGEYLHRHNQVARIIHQQLSLRYKLVESEVPYYRYVPDPVLENGRVTLYWDRSIITDRTIVANKPDIVVIDRSERRAIIVDVTIPHDENLVKAEKEKQLKYLDLAHEVVDMWEVDSAMIVPIVVTANGIIAKSLDQHLKRLSLGTWMKGLIQKAVLLDTARIVRRFLSLES

SEQ ID NO: 29872 - protein, 1095 aa, Mesoligia furuncula
MLTRSAARRAHLPPPDSSLSPAPPPLEPSPIESAVTPAVAVASSSSDEYFSPPTSPTPVRRQGRGRPPNSLGLRGHPAPSRVPATGGCVQRMRWTQSMNENVMRAYYGSTEGGINLTAYRDRMLSLFQELEPTVNVSAQRLSDQVRVIQRNHRLDDIALDRLRSEVLSNHIVSTSAQTAAQVSTVDAIPPRSNRVEEEDDRVDTVSSQCNVRLRSAPEDALREYRSTPTELRPRLPRLPTHKKNRALVCALDSQLKNFFDSSEDLVDTHSILYCAAVAACRVANVKFSSCDGATRPKPAVPAWQRRIERRIDGARVLIGKLYCFREGNTRPRVMRFVRRAFSGTGISPREYMSLVTERIDFLKQKVCAWASRIRRYKRRVDRYTQNRMFQSDERWVYRAWERPEQNVTDVCHPDDAATSAFWCSIWSVHVCHTEAGWMQDVERVCESVPEMEKVLITPSDVARAVRPLSNWKSPGPDELHNFWLKWLISSHTCLASQFQSSLESGSLPQFLTTGVTHLLHKSGSPAEPKNYRPITCLSTVYKLLTSILRAKINKHIESNSIMSASQNGCRNGSRGTKELLLIDMAISQQVRRSRKDLSTCWIDYKKAYDSVPHTWLMRVLELYKIDATLRTFLESCMGQWKTVLRYPGCRQIQGNDEPVWIKRGIFQGDSLSPLWFCLALNPLSTLLEDSGLGYRLRRGGQVISHLLYMDDLKLFAPNKLRLMELLKVTKTFSSAIKMKFGVDKCAVMHVKRGEIMESEGIQLSDSISLRSLSSSESYKYLGISEALGINDADMKQSLKERFFCRLKKVLISLLSGGNKVRAFNGWVMPVLMYSFGILKWTQTELDALDRRVRTLLTANRMHHPRSSVMRLYIPRKCGGRGFLNAKTLHNREVCSLREYFLKAEVGMHRDVVAVDKGLTPLSMAKENWRKPVVLSTDDRKRIWQSKELHGRFYRALHEPGVDFIASVSWLRFGDLFGETEGFVCAIMDEVILTNNYRRHIMKDGTVDVCRACHRPGESIRHIISGCSRLANGEYLHRHNQVARIIHQQLALKYKLVDSEVPYYKCPTQFLKMTMSRCTGIGLSLLTGLLLPISLI

SEQ ID NO: 29873 - protein, 1201 aa, Mesoligia furuncula
MLTRLAARRARLPPPDSSLSSAPPPPESSPIVSAVTPAVAVASSSSDEYFSPPTSPTPVRRQGRGRPPNSLGLRGHPAPSRVPATGGCVQRMRWTQSMNENVMRAYYRSTEGGINLTAYRDRMLSLFQELEPTVNVSAQRLSDQVRVIQRNHRLDDIALDRLRSEVLSNHIVSTSAQTAAQASTVDAIPPRSNHVEEEDDRVDTVSSQCNVRLRRALEDALCEYRFTPTELRPRLPRLPMHKKNRTLVCALDSQLKNFFESSEDLVDTHSILYCAAVAACRLANVKFPSCDGATRPKPAVPAWQRRIERRIDGARVLIGKLYCFREGNTRPRVMRFVRRAFSGTGISPREYISRVTERIDFLKQKVCAWASRIRRYKRRVDRYTQNRMFQSDERWVYRAWERPEQNVTDVYRPDDATTSAFWCSIWSVPVCHTEAGWMRDVERVCESVPEMETVLITPSDVAKAVRPSPNWKSPGPDGLHNFWLKWLISSHTCLASQFQSSLESGSLPQFLTTGVTHLLHKSGSPAEPKNYRPITCLSTVYKLLTSILRAKINTHIESNSIMSASQNGCRNGSRGTKELLLIDMAISQQVRRSRKDLSTCWIDYKKAYDSVPHTWLMKVLELYKIDATLRTFLESCMRQWKTVLRYPGCRQIQGNDEPVWIKRGIFQGDSLSPLWFCLALNPLSTLLEDSGLGYRLRRDGQVISHLLYMDDLKLFAPNKLRLMELLKVTETFSSAIRMEFGVDKCAVMHVKRGEIMESEGIQLSDSISLRSLSSSESYKYLGMSEALGINDADMKQSLKERFFCRLKKVLISLLSGGNKVRAFNGWVMPVLMYSFGILKWTQTELDALDRRVRTLLTANRMHHPRSSVMRLYIPRKCGGRGFLNAKTLHNREVCSLREYFLKAEVGMHRDVVAVDKGLTPLSMAKENWRKPVVLSTDDRKKVWQSKELHGRFYRALHEPGVDFIASVSWLRFGDLFGETEGFVCAIMDEVILTNNYRRHIMKDGTVDVCRACHRPGESIRHIISGCSRLANGEYLHRHNQVARIIHQQLALKYKLVDSEVPYYKYVPDPVLENDHVTLYWDRSIITDRTIVANKPDIVVIDRLARRTMIVDVTIPHDGNLVKAEKEKQIKYLDLAHEVVDMWNVSSAVIVPIVVSANGLMAESLGQHLSRLSLGGWIKGLIQKAVLLDTARIVRRFLSLEP

SEQ ID NO: 29874 - protein, 947 aa, Xestia c-nigrum
MTPGLRPRLPRLPMHNKNRMLVAVLDSQLSNYFDNCEDLTDVHSVLYCAAVAACRVARVKFPDDRATRPKPAVPAWQYRIEQRIGGARALIGKLICFREGNTRPRVMRFVRRAFSGTDINPRDYMSRVTERIDFLKQKVYAWASRIRRYKRRVDRYTQNRTFQRDERWVYRAWERPDQGVADTRLPDDDAMCSFWRSIWSVPVSHAEGEWTRVVERACDPVPEMGAITISPQDVACAVRPLPNWKSPGPDGLHNFWIKWFTRSHARLATLFQSALESGSLPEFLTTGITHLLHKSGSTAEPKNYRPITCLPTVYKVLTSILRAKITKHIDENSVMSASQNGCRNGSRGTKELLLIDMAISQQVRRSRKDLSTCWIDYKKAYDSVPHTWLMRVLELYKVDATLRTFLMSCMGQWRTVLRYPGCRQIQRNSEPIRIERGIFQGDSLSPLWFCLALNPLSTLLEDSGLGYQLRKDGRVISHLLYMDDLKLFATNDFQLMELLKVTETFSSAIRMEFGVDKCAVMHVKRGEIVESVGTQLSDSINLRSLSATETYKYLGMSEALGINVADMKQSLKERFFGRLKKVFNSLLSGGNKVRAFNGWVMPVLMYSFGILKWTQTELDALDTKVRKLLTAFRMHHPRSSVMRLYIPRKCGGRGFLNAKTLHNREICSLRDYFLEADVGMHRDVVAMDKGLTPLSLAKENWRKPIILTTDDRRKEWQGKELHGRFYRALHGPDVDFLASVSWLRSGDLFGETEGFVCAIMDEVMMTNNYRRFIVKDGTVDICRACHRPGESIRHIISGCSRLANGEYLHRHNLVARIIHQQLALKYNLVESEVPYYRYVPDPVLVNGSITLYWDQSIITDRTVIANRPDIVVMDLMYLDLAREVVDMWEVDSAIIVPIVVSAHGLIAKSLDQHLRRLSLGSWIKGLIQKAVLLDTARIVRRFLSLEP

SEQ ID NO: 29875 - protein, 1179 aa, Griposia aprilina
MHKKNRALVCALDSQLKNVFESSENLIDTHSILYCAAVAACRLAKVRFPNCDGATRPKPAVPAWQCRIERRIDGARVLIGKLHCFREGNNRPRVMRFVRRAFSGTGISPRVYMSHATERIDFLKQKVCAWASRIRRYKRRVDRYTQNRMFQSDERWVYRAWERPEQNVTDDCRPDDATTSTFWRSIWSVPVCHVEADWMRDVGRACETVPEMDAVLITPLDVARAVRPLPNWKSPGPDGLHNFWLKWLISAHACLASQYQSSLESGSLPQFLTTGVTHLLHKSGSPTDPKNYRPITCLSTVYKLLTSILRAKINTHIESNSIMSASQNGCRNGSRGTKKLLLIDMAISQQVRRFRKDLSTCWIDYKKAYDSVPHTWLMRVLELYKIDTTLRTFLRSCMGQWRTVLRYPGCRQIQANDEPVWIKRGIFQGDSLSPLWFCLALNPLSTLLEDSGLGYRLRRGGQVISHLLYMDDLKLFAPNKLQLMELLKVTETFSSTIRMEFGVDKCAVMLVKRGEVMEPEGIQLSDSIHLRSLSSSESYKYLGMSEALGINVADMKPSLRERFFGRLKKVLISLLSGGNKVRAFNGWVMPVLMYSFGILKWTQTELDALDRRVRTLLTANRMHHPRSSVMRLYIPRKCGGRGFLNAKTLHNRELCSLREYFLKAEVGMYRDVVAVDKGVTPLSMAKENWRKPVVLTTDDRKEVWQSKELHGRFYRALHEPGVDFLASVSWLRFGDLFGETEGFVCAIMDEVILTNNYRRHIMKDGTVDMCRACHRPGESMRHIVSGCSRLANGEYLHRHNQVARIIHQQLALKYKLVDSEVPYYKYVPDPVLENDHITLYWDRSIITVVVAVQGGMIRSPVAVTKPPAAVSKAPAAVTKPPNAVTKVLSRAGSEQSTDGEPSPDTQLTLREEIRLFRSELREVRDEMREFRREMAGLHSSMGVCTERVDSLEARIEALEGRQSAAVPDGKVGQLEQIVLKLQLDLNDREQELLGSDLEIANIPETPGENVLHTVGLVAAKLGVTLDHRDIVYAQRVGMRAERKVQTSSAGGASPVGGASPVGAAAATVRGRRIVVRLTRRALRDDLLQSARVRRGATTADLGLPAPPLRFFLNERLTKANKQLFYRVRETGSRLGWRYTWSKFGRILAKQGDGKPTHCIRSEEDFVRVFGCEMSGTKDV

SEQ ID NO: 29876 - protein, 1190 aa, Lymantria dispar
MITRSQTKAACIPPPGSSQSSASKQAASISATEEASSSSSSDEYFSPPTSPRPAPRRGRGWPPFCLGPRGPPASHRAPASGGNVQRMRWTQSINENVMRAYFEATEGGIKLTAYRDRMLLLFQNLEPIINVTAQRLSDQVRAIQRCNLLDAAALDRLRSESIQISRVTPIPTPVSTIDVRQSAPPSAAEGDDMTDSMDTRYNEEVRKALECAIREYRFEPQEIRPRLPRLPMHRKNRLLVGTLDSFLIDYVNNSNSISDTHSILYCAAIAACRIAGLNFLKNESTMRYKEAKPAWQCRIECRISKARVLIGKLSSFRTGNTRPKVMRFVKRAFLGTGIKAEDYSARVTERIDFLKQKIYAWASRIRRYKKRVNRYSVNRMFESDQKSVYRNWERPCQDVDDGQPDTKATNSYWHSIWSMPVVHSEGDWMRDVKQACENIPQMKEVSINQQDVADAVRPLSNWKSPGLDGLHNFWLKWLRSGHARLASHFQSALVTGTLPEFMTTGITHLLHKAGSTTVPSNYRPITCLPSVYKLLTSILRNKISKHIQLNSVMSLSQNGCRNGGRGTKELLLIDTAISQQVRRLRKDLSICWIDYKKAFDSVPHTWLLRVLELYKINSTLCAFLKSCMGQWKIFLRYPACRLSRGGGEPIYIRRGIFQGDSLSPLWFCLALNPLSTLLGHSGLGCRLRRGGQIVSHLLYMDDLKLFAPTHIQMAELLKVTETFSNSIKMEFGVDKCAVMHVKRGEVVENHRSEIFNTPQFRPLHVMDTYKYLGMSQALNINETDMKRALRERFFGRLKKVLNSLLSGGNKVRAYNAWVMPILMYSFGILKWTQTELDTLDRKVRTLLTSHRMHHPRSSIMRLYIPRKCGGRGFLNAKTLHKREVCNLRDYFLKMTSGVHLDVVTIDNGLTPLGLAKENWRRPVVLSTIDRKNVWQSKELHGRYYGALNAPDVDTPASVTWLRFGNLFGETEGFVCAIADEVIKTNNYRKYILRDGTADICRACHLPGESLRHIVSGCSRLANGEYLHRHNQVARIIHQQLALLHKLVSVEVPYYKYVPEPVLENGRVTLYWDRSIITDRTIVANKPDIVVIDRLQRRAMIVDITVPHDGNLVKAEKDKQIKYQDLAHEIVDMWDVDSAIVVPIVISTNGLIAKSLNQHLKRLALGSWIAGLMQKAVLLNTARIVRKFLSL

SEQ ID NO: 29877 - protein, 927 aa, Lymantria dispar
MIVFTDTRYNEEVRNALEHAIQEYRFKPHNIRPRLPRLPMHRKNRRLVNILDSLLGSYLSTSDNISDTHSILYCAAVAACRMAGLKFLKTESAIRQKEAIPVWQRRIECRICEARLLIGKLSCFRTGNTRPRVMRYVRRAFFGTDIKPEEYKALVTERIDYLKQKVYAWANRIRRYKKRVNRYSMNRMFESDQKSVYRNWERPCQLVDDERLPDAGATNTFWRSIWSVPVVYSEGDWMGDVKRACENIPQMENIIIDQEDVACAVRSLSNWKSPGSDGLHNFWLKWLHSAHACLASHFQSALVTGMLPEFMTTGITHLLHKTGSTTEPSNYRPITCLPSVYKLLTFILRNKIAKHIHLNSVMSISQNGCRNGGRGTKELLLIDMAISQQVRRNRKDLSTCWIDYRKAFDSVPHTWLLRVLELYKVDSTLCTFLRACMGQWKTIFRYPTCRLNRGSTEPIYIRREIFQGDSLSPLWFCLATNPLSTLLEHSGLGCRLRRGGQTISHLLYMDDLKLFTPNNTQLVELLKITKTFNNSISMEFGVDKCAIMHVKQGEVVEVDRDQLFDTLQFRPLHRTETYKYLGMSQALNINEADMKQALRERFLGRLKKVLNSLLSGGNKVRAYNAWVMPLLMHSFGILKWTQTELDTLNRKVRTLLTSHRMHHPRSSIMRLYIPRRCGRRSFLNAKALHNREVCNLRDYFLKKTSGVHLDMMKVDSGLTPLGLAKENWRRPVVLSTTDRENVWQSKELHRRFYGALHAPEVDLSASVTWLRFGNLFGETEGFICAITDEVIKTNNYRKYILRDGTADICRACHRPGESLRHIVSGCSRLANGEYLHRHNQVARIIHQQLTLRYKLVSVEMPYYRYVPKPVLENSRVILYWDRSIITDRTIVANKPDIVVIDRLERRAMIVDITVPHDGNLLKAEKDK

SEQ ID NO: 29878 - protein, 1209 aa, Amphipyra berbera
MQTRSRAKATVTQNTRPTPSVSSLSSASQPPDSSIVSDVTPAAAVASSSSDEFYSPPSSPPPSPPPRRRGRGRPPVSLGPRGPPVSDRVPAPGGSVQRMRWTPTMNENCMRAYFGATEGGTNLTAYRGRMLSLFQALEPAVNVSAQRLSDQVRVIQRDHRLTDAALDRLRSEVQSNRIISLQSQNAAQPQVPCMVPPRPNHADEESDDRVTNVSTQCNEQLRSALEHAIREYRFTPPNLRPRIPRLPMNKKNRALMCALDSLLSSYFDNSEGLEDTHSILYCAAVAACRVAHAKFDNNDRDTRPKLAVPAWQCRVECRINEARALIGKLICFREGNTRPRVMRFVRRAFSGTDINPRDYMSRVTERIDFLKQKVYAWANRIRRYKRRVERYTQNRMFHSDERRVYRTWERPDHDVSDTHLPDSDVMNTFWRNIWSMPVTHTEGDWMQEVQRACEPIEEMGDVTIVPQDVTSAVRPMSNWKSPGPDGLHNFWLKWLRSSHARLASQFQSSLESGSLPQFLTTGVTHLLHKSGSTAEPKNYRPITCLPTVYKLLTSILRSKISTHITNNCIMSTSQNGCKNGSRGTKELLLIDMTISQQVRRSRKDLSTCWIDYKKAYDSVPHTWLMRVLELYKVNTTLCAFLTSCMGQWRTVLHYPGCRQIQGRGEPIRIKRGIFQGDSLSPLWFCLALNPLSTLLEGSGLGYRLRRGGQVISHLLYMDDLKLFAPNNLQLVKLLKVTETFSNSIRMEFGVDKCAVMHVKRGGIMESVGTQLSDSIHLRSLSSTETYKYLGMSEALGINVADMKQSLRERFYGRLKKVLKSLLSGGNKVRAFNGWVMPVLMYSFGMLKWTQTELDALDRRVRTLLTAYRMHHPRSSVMRLYIPRKCGGRGFLNAKTLHNREVCNLREYFLQADVGMHRDVVAVDKGFTPLSLAKENWRKPVVLDTTGRRDVWQSKELHGRFYRALHGPDVDFLASVAWLRFGDLFGETEGFVCAIMDEVIMTNNYRKYIVKDGTVDICRACHCPGESIRHIISGCSRLANGEYLHRHNLVARIIHQQLALKYNLVDAEVPYYKYVPDPVLENGHITLYWDRSIITDRTIIANKPDIVVIDRSERLTMIVDITVPHDENLVKAEKDKEIKYQDLAHEVVDMWEVDSAVIVPIVVTANGLIAKSLDQHLMRLSLGSWVKGLIQKAVLLDTARIVRKFLSLRP

SEQ ID NO: 29879 - protein, 1202 aa, Amphipyra berbera
MLTRSRTRTTEQRSARPPPPDSPLSSASQPPELGLPVTPAAAASSSSSDEYFSPPTSPRPVRRQGRGRPPNSLGPRGPPAPSRVLAAGGYVQRMKWTQSINENVMRAYYGSTEGGTNLTAYRVRMLTLFQELEPAINVSAQRLSDQVRVIQRNHRLDDAALDRLRLEVQNSRAIPVPSQTAVHQLINVAPPRSDRVDGDEDDGAVTVSSQYNDRLRSALEDAIRECRANPESRPRLPRLPMHNKNRALVCALDSLLASYFESSEDLGDTHSILYCAAVAACRVANVKFNNSERATRPKLAVPAWQCRIERRIDETRALIGKLICFREGNTRPRVMRFVRRAFSGTGISPREYTSRATERIDFLKQKVCAWASRIRRYKRRVERYTQNRMFQCDQRWVYRAWERPDQSVSGGRLPDDDAMSSFWRSIWSVPVIHTEGDWMRDIERTCESIEEMGEIVISPQDVAGAVRPLPNWKSPGPDGLHNFWIKWLRSSHARLASQFQSSLESGSLPQFLTTGVTHLLHKSGSTAEPKNYRPITCLPTVYKLLTSILRSKINTHIGNNSVLSSSQNGCRNGSRGTKELLLIDTAISQQVRRSQKSLSTCWIDYKKAYDSVPHTWLMRVLELYKINTTLRTFLRSCMGQWRTVLRYPGCQPIRRSGEPIRIERGIFQGDSLSPLWFCLALNPLSTLLEGSGLGYPLRRGGQVVSHLLYMDDLKLFAPTKLQLVDLLKVTETFSNSIRMEFGVDKCAVMHVRRGRIMESEGLQLSDSIHLSPLSANDTYKYLGMSEGLGISEADMKQSLRERFFGRLKKVLKSLLSGGNKVRAFNGWVMPVLMYSFGILKWTQTELDALDRRVRTLLTANRMHHPRSSVMRLYIPRKCGGRGLLNAKTLHNREVCSLREFFLHADAGMHRDVVAVDKGLTPLSLARENWRKPVVLSTNDRREIWQSKELHGRFYRALHGPDVDFLASVSWLRFGDLFGETEGFVCAIMDEVIMTNNYRKYIVKDGTVDICRACHCPGESLRHIISGCSRLANGEYLHRHNQVARIIHQQLALKYNLVESEVPYYRYVPDPVLENGRITLYWDRSIITDRTIVANKPDIVVIDRSERRTMIVDVTIPHDGNLVKAEKDKQIKYLDLAHEVVNMWDVESATIVPIVVTANGLMAKSLDKHLMRLSLGGWIKGLIQKAVLLDTARIVRRFLSLEP

SEQ ID NO: 29880 - protein, 1191 aa, Mythimna ferrago
MLTRSRARSQIAQPTSSGSSLNSASQPPGPAPAVSPVIPEAAVASSSSDEYFSPPTTPPPARRRGRGRPPACLGPRGPPASDRVPAAGGSVQRMRWTSSINENVMRSYFGATEGGINLTAYRGRMLSLFQMLEPAVNVSVQRLSDQVRVIQRNRMLDDAVLDRLRLESQSSRVSAATPSAAAQRQPSAAPRPDHVGDADDDAAISVSTQCNERLRGALEDAFREYRSIPPEVRPRLPRLPMHKRNRALVCALDSQLSICFDSSEDLADTHSILYCAAVAACRVAHVKFPNCNRATRPAVPAWQCRIERRIGEARALIGKLICFREGNTRPRVMRFVSPRDYLPCVTERIDFLKQKIYAWANRIRRYKRRVERYTQNRTFQSNERWVYRAWERPDQGVTDTRLPDDDAMCSFWRSIWSAPVSHTEGDWIREVERACDLLPEMGAITISPQDVARAVRPLPNWKSPGPDGLHNFWLKWFQGSHARLASQFQSALESGSLPQFLTTGITHLLHKSGSTAEPKNYRPITCLPTVYKVLTSILRAKINSHIETNSIMSVSQNGCRNGSRGTKELLLIDIAISQQVRRSRKNLSACWIDYKKAYDSVPHTWLMRVLELYKVDATLRTFLMSCMGQWRTVLHYPGCRQIWENSEPIRIERGIFQGDSLSPLWFCLALNPLSTLLEGSGLGYRLKRGGQVISHLLYMDDLKLFAPNNLQLMELLKVTETFSSAIRMDFGVDKCAVIHVKRGEIMESEGIQLSDSIHLRSLSSTETYKYLGMSEALDINTDDMKQSLKERFFGRLNKVLNSLLSGGNKVRAFNGWVMPVLMYSFGILKWTQTELDALDRRVRTLLTANRMHHPRSSVMRLYIPRKCGGRGFLNAKSLHNREVCSLREYFLAVDVGMHRDVVAVDKGLTPLSLANENWRKPLVLDTNDRREVWQGKELHGRFYRALHGPDVDLLASVSWLRFGDLFGETEGFVFAIMDEVMMTNNYRKYIVKDGTVDICRACHRPGESIRHIISGCSRLANGDYLHRHNLVARIIHQQLALKYNLVESEVPYYRYVPDPVLDNGSITLYWDRSIITDRTIVANKPDIVVIDRLERRTMIVDIAVPHDENLVKAEKDKQIKYLDLARKVVDMWEVDKAIIVPIVVTANGLIAKSLEQHLRRLSLGSWIKGQIQKAVLLDTARIVRRFLSQEP

SEQ ID NO: 29881 - protein, 1111 aa, Agrochola circellaris
MRWTQSMNENVMRAYYGSTEGGTNLTAYRVRMLSLFQELEPTANVSAQRLSDQVRVIQRNHRLDDAALDRLRSEVLSNHIVSTPAQTAAQASSIDAIPPRSNHGVAEEDDRAATVSSQCNVRLRSALEDAFREYRYTPTELRPRLPRLPMHKKNRALVCALDSQLRNYFENSEDLIDTHSILYCAAVAACRLANVKFPNYDGVTRPKPAVPAWQCRIEQRIDGARALIGKLYCFREGNTRPRVMRFVRRAFLGTGISPREYMPRVTERIDFLKQKVCAWASRIRRYKRRVERYTQNRMFQSDERWVYRAWERPEQNVADVCRPDDAATSAFWRSIWSVPVCHTEADWMRDVERVCETIPEMEKIEITPLDIARAVRPLPNWKSPGPDGLHNFWLKWLISSHTCLASQFQSSLESGSLPQFLTTGVTHLLHKSGSPAEPKNYRPITCLSTVYKLLTSILRAKINTHIDNNSIMSASQNGCRNGSRGTKELLLIDMAISQQVRRSRKDLSTCWIDYKKAYDSVPHTWLMRVLELYKIDATLRTFLMSCMGQWRTVLRYPGCRQIQGNDEPVWIKRGIFQGDSLSPLWFCLALNPLSTLLEDSGLGYRLRRGGQVISHLLYMDDLKLFAPNNLRLMELLKVTETFSSAIRMEFGVDKCAVMHVKRGEIMESEGTQLSESIHLRSLSSSESYKYLGMSEALGINVADMKQSLKERFFGRLKKVLISLLSGGNKVRAFNGWVMPVLMYSFGILKWTQTELDALDRRVRTLLTANRMHHPRSSVMRLYIPRKCGGRGFLNAKTLHNREVCNLREYFLKAEVGMHRDVVAVDKGLTPLSMAKENWHKPVVLTTDDRKEVWQSKELHGRFYRALHEPGVDFLASVSWLRFGDLFGETEGFVCAIMDEVILTNNYRRYIMKDGTVDVCRACHRPGESIRHIISGCCRLANGEYLHRHNQVARIIHQQLALKYKLVVSEVPYYKYVPDPVLENDHVTLYWDRSIITDRTIAANKPDIVVIDRLARRAMIVDVTIPHDGNLVKAEKEKQIKYLDLAHEVVDMWNVSSAIIVPIVVTANGLMAESLDQHLSRLSLGGWIKGLIQKAVLLDTARIVRRFLSLQP

SEQ ID NO: 29882 - protein, 1111 aa, Eupsilia transversa
MRWTQSMNENVMRAYYGSTEGGINLTAYRVRMLSLFQELEPTVNVSAQRLSDQVRVIQRNHRLDDAELDRLRSEVLSNHIIPSPAQTAELATPSNVIPPRSNRGLEQEDDRVATVSSQCNDRLRNALEDAFREYRYTPTELRPRLPRLPMHKKNRALVCALDSQLKNFFESSEDLIDTHSILYCAAVAACRLANVKFPNCDAATRPKPAVPAWQCRIERRIDGARVLIGKLYCFREGNTRPRVMRFVRRAFSGTGISPQEYMSRVTERIDFLKQKVCAWASRIRRYKRRVDRYTQNRMFQSDERWVYRAWERPEQNVADVCRPDDAATSAFWRSIWSVPVCHAEAGWMHGVERVCEAIPEMEAVIITPLDVARAVRPLPNWKSPGPDGLHNFWLKWLISSHTRLASQFQSSLESGSLPQFLTTGVTHLLHKSGSPAEPKNYRPITCLSTVYKLLTSILRAKINSHIDSHSIMSASQNGCRNGSRGTKELLLIDMAISQQVRRSRKDLSTCWIDYKKAYDSVPHTWLMRVLELYKIDATLRTFLMSCMGQWRTVLRYPGCRQIQGNDEPVWIKRGIFQGDSLSPLWFCLALNPLSTLLEESGLGYRLRRGGQVISHLLYMDDLKLFAHNKLRLMELLKVTETFSSAIRMEFGVDKCAVMHVKRGEIMESEGTQLSDSIHLRSLSSTESYKYLGMSEALGINVADMKQALKERFFGRLKKVLISLLSGGNKVRAFNGWVMPVLMYSFGILKWTQTELDALDRRVRTLLTANRMHHPRSSVMRLYIPRKCGGRGFLNAKTLHNREVCSLREYFLKTEEGMHRDVVAVDKGLTPLSMAKENWRKPVVLTTDDRKEVWQSKELHGRFYRVLHEPGVDFLASVSWLRFGDLFGETEGFVCAIMDEVILTNNYRRHIMKDGTVDVCRACHRPGESIRHIISGCSRLANGEYLHRHNQVARIIHQQLALKYKLADSEVPYYKYVPDPVLENDHVTLYWDRSIITDRTIVANKPDIVVIDRLARRAMIVDVTIPHDENLVKAEKEKQIKYLDLAHEVVDMWNVSSAIIVPIVVTANGLMAESLDQHLLRLSLGGWIKGLIQKAVLLDTARIVRRFLSLQP

SEQ ID NO: 29883 - protein, 1205 aa, Amphipyra tragopoginis
MITRSQVRLQRTRPPSSASSLSSASQPPESSPTVSAVTPAAAVASSSSDEYFSPPTSPPPARRRGGRRPPDRLGPRGPLASDRVPAPGGSVSRMRWTQTINENAMRAYFGATEGGTNLTAYRSRMLSLFQVLEPTVNVSAQRLSDQVRAIQRGHMLDDTVLDRLRSEIQCSPVISSSSQAPGLISRNISVASPRCQHADEEDDDRATTVSIQCNEQLRRALEDAMREYRSTRPELRPRLPRLPMHKKNRALMCALDSLLSNYLDGSEYLGDTHSILYCAAVAACRVAHVKFINNERATRPKNAVPAWQCRIERRIAEARALIGKLICFREGNTRPRVMRFVRRAFSGTDVSPREYISRVTERIDFLKQKVYAWANRIRRYRRRVDRYNQNRMFRSDERWVYRTWERPDQSVGAAHLPDDDATNSFWRNIWSVPVTHTEGDWMRDVERMCEPILDMGAILISPQDVAGAVRPLPNWKSPGPDGLHNFWRKWLRSSHARLASQFQSSLETGTLPQFLTTGVTHLLHKSGSTAEPKNYRPITCLPTVYKVLTSILRTKINNHIDNNSIMSASQNGCRNGSRGTKELLLIDMAISQQVRRSRKDLSTCWIDYKKAFDSVPHTWLMRVLELYKVNTTLRTFLTSCMGQWRTVLHYPGCRQIQGIGEPIRIERGIFQGDSLSPLWFCLALNPLSTLLEGSGLGYRLRRGGQVISHLLYMDDLKLFAPNNLQLLELLKVTETFSNSIRMEFGVDKCAVMHVKRGRIMESVGTQLSDSIHLRSLSSTETYKYLGMSEALGINETDMKQSLRERFYGRLKKVLNSLLSGGNKVRAFNGWVMPVLMYSFGMLKWTQTELDALDRRVRTLLTANRMHHPRSSVMRLYIPRKCGGRGFLNAKTLHNREVCSLREYFSQTEVGMHRDVVAVDKGLTPLSLAKENWRKPVVLDTNGRKDVWRSKELHGRFYRALHGPDVDFLASVAWLRFGDLFGETEGFVCAIMDEVMMTNNYRKYVVKDGTVDICRACHCPGESIRHIVSGCSRLANGEYLHRHNLVARIIHQQLALKYNLVDAEVPYYKYVPDPVLENGHVTLYWDRSIITDRTIVANKPDIVVIDRSERLTMIVDITVPHDENLVKAEKDKEIKYQDLAHEVVAMWDVDSAVIVPIVVTANGLIAKSLDQHLKRLSLGGWIKGLIQKAVLLDTARIVRRFLSLRP

SEQ ID NO: 29884 - protein, 1202 aa, Amphipyra tragopoginis
MLTRSRARARDNQAHLPPPDSSPSSASQQQGLNPASPAAAVASSSSDEYYSPPSSPPPARRRGGTRPPVGLGLRGPLASDRVPAPGGIVPRMKWTQKMNESVMRAYYGATEGGTNLTAYRGRMLSLFQVLEPAVNVSAQRLSDQVRVIQRGHMLDDTVLDRLRSEVQSSPVISPSSQVLEQQQNLAAALPRPNRADEEDDDRAANVSTQCNDELRSALEDAMREYRYTRSDLRPRIPRLPMHRKNRALVCALDSLLSNYFDGSEDLGDTHSILYCAAVAACRVAHVKFTDNERATRPKNAVPAWQCRIERRISEARALIGKLVCFREGNTRPRVMRFVRRAFSGTDVSPREYMSRVTERIDFLKQKVYAWANRIRRYRRRVDRYTQNRLFQSDERWVYRTWERPDQRVGDTRLPDNDVMNTFWRNIWSVPVAHTEGDWMQEIQRACEPIQEMGDIIISPQDVASAVRPMSNWKSPGPDGLHNFWLKWLRSSHARLASQFQSSLESGSLPQFLTTGVTHLLHKSGSTAEPKNYRPITCLPTVYKVLTSILRTKINNHIDNNSIMSASQNGCRNGSRGTKELLLIDMAISQQVRRSRKDLSTCWIDYKKAYDSVPHTWLMRVLELYKVNTTLCAFLTSCMGQWRTVLRYPGCRQIQGIGEPIRIERGIFQGDSLSPLWFCLALNPLSTLLEGSGLGYRLRRGGQVISHLLYMDDLKLFAPNNLRLLELLKVTETFSNSIRMEFGVDKCAVMHVKRGRIMESVGTQLSDSIQLRSLSSTETYKYLGMSEALGVNETDMKQSLKERFFGRLKKVFNSLLSGGNKVRAFNGWVMPVLMYSFGILKWTQTELDALDRRVRSLLTANRMHHPRSSVMRLYIPRKCGGRGFLNAKTLHNREVCSLREYFSQADVGMHRDVVAVDKGFTPLSLAKENWRKPVVLDANGRREVWRSKELHGRFYRALHGPDVDFLASVAWLRFGDLFGETEGFVCAIMDEVMMTNNYRKYIVKDGTVDICRACHCPGESIRHIVSGCSRLANGEYLHRHNLVARIIHQQLALKYNLVDAEVPYYKYVPDPVLENGHVTLYWDRSIITDRTIVANKPDIVVIDRSERLTMIVDITVPHDENLVKAEKDKEIKYQDLAHEVVAMWDVDSAIIVPIVVTANGLIAKSLDQHLKRLSLGGWIKGLIQKAVLLDTARIVRRFLSLRP

SEQ ID NO: 29885 - protein, 1202 aa, Amphipyra tragopoginis
MLTRSRARARDNQAHLPPPDSSPSSASQQQGLNPASPAAAVASSSSDEYYSPPSSPPPARRRGGTRPPVGLGLRGPLASDRVPAPGGIVPRMKWTQKMNESVMRAYYGATEGGTNLTAYRGRMLSLFQVLEPAVNVSAQRLSDQVRVIQRGHMLDDTVLDRLRSEVQSSPVISPSSQVLEQQQNLAAALPRPNRTDEEDDDRAANVSTQCNDELRSALEDAMREYRYTRSDLRPRIPRLPMHRKNRALVCALDSLLSNYFDGSEDLGDTHSILYCAAVAACRVAHVKFTDNERATRPKNAVPAWQCRIERRISEARALIGKLVCFREGNTRPRVMRFVRRAFSGTDVSPREYMSRVTERIDFLKQKVYAWANRIRRYRRRVDRYTQNRLFQSDERWVYRTWERSDQRVSDTRLPDNDVMNTFWRNIWSVPVAHTEGDWMQEVQRACEPIQEMGDIIISPQDVASAVRPMSNWKSPGPDGLHNFWLKWLRSSHARLASQFQSSLESGSLPQFLTTGVTHLLHKSGSTAEPKNYRPITCLPTVYKVLTSILRTKINNHIDNNSIMSASQNGCRNGSRGTKELLLIDMAISQQVRRSRKDLSTCWIDYKKAYDSVPHTWLMRVLELYKVNTTLCAFLTSCMGQWRTVLRYPGCRQIQGIGEPIKIERGIFQGDSLSPLWFCLALNPLSTLLEGSGLGYRLRRGGQVISHLLYMDDLKLFAPNNLRLLELLKVTETFSNSIRMEFGVDKCAVMHVKRGRIMESVGTQLSDSIQLRSLSSTETYKYLGMSEALGVNETDMKQSLKERFFGRLKKVFNSLLSGGNKVRAFNGWVMPVLMYSFGILKWTQTELDALDRRVRSLLTANRMHHPRSSVMRLYIPRKCGGRGFLNAKTLHNREVCSLREYFSQADVGMHRDVVAVDKGFTPLSLAKENWRKPVVLDTNGRREVWRSKELHGRFYRALHGPDVDFLASVAWLRFGDLFGETEGFVCAIMDEVMMTNNYRKYIVKDGTVDICRACHCPGESIRHIVSGCSRLANGEYLHRHNLVARIIHQQLALKYNLVDAEVPYYKYVPDPVLENGHVTLYWDRSIITDRTIVANKPDIVVIDRSERLTMIVDITVPHDENLVKAEKDKEIKYQDLAHEVVAMWDVDSAIIVPIVVTANGLIAKSLDQHLKWLSLGGWIKGLIQKAVLLDTARIVRKFLSLRP

SEQ ID NO: 29886 - protein, 1202 aa, Amphipyra tragopoginis
MLTRSRARARDNQAHLPPPDSSPSSASQQQGLNPASPAAAVASSSSDEYYSPPSSPPPARRRGGTRPPVGLGLRGPLASDRVPAPGGIVPRMKWTQKMNESVMRAYYGATEGGTNLTAYRSRMLSLFQVLEPAVNVSAQRLSDQVRVIQRGHMLDDTVLDRLRSEVQSSPVISPSSQVLEQQQNLAAALPRPNRADEEDDDRVANVSTQCNDELRSALEDAMREYRYTRSDLRPRIPRLPMHRKNRALVCALDSLLSNYFDGSEDLGDTHSILYCAAVAACRVAHVKFTDNERATRPKNAVPAWQCRIERRVSEARALIGKLVCFREGNTRPRVMRFVRRAFSGTDVSPREYMSRVTERIDFLKQKVYAWANRIRRYRRRVDRYTQNRLFQSDERWVYRTWERPDQRVSDTRLPDSDVMNTFWRNIWSVPVAHTEGDWMQEVQRACEPIQEMGDIIISPQDVASAVRPMSNWKSPGPDGLHNFWLKWLRSSHARLASQFQSSLESGSLPQFLTTGVTHLLHKSGSTAEPKNYRPITCLPTVYKVLTSILRTKINNHIDNNSIMSASQNGCRNGSRGTKELLLIDMAISQQVRRSRKDLSTCWIDYKKAYDSVPHTWLMRVLELYKVNTTLCAFLTSCMGQWRTVLRYPGCRQIQGIGEPIRIERGIFQGDTLSPLWFCLALNPLSTLLEGSGLGYRLRRGGQVISHLLYMDDLKLFAPNNLRLLELLKVTETFSNSIRMEFGVDKCAVMHVKRGRIMESVGTQLSDSIQLRSLSSTETYKYLGMSEALGVNETDMKQSLKERFFGRLKKVFNSLLSGGNKVRAFNGWVMPVLMYSFGILKWTQTELDALDRRVRSLLTANRMHHPRSSVMRLYIPRKCGGRGFLNAKTLHNREVCSLREYFSQADVGMHRDVVAVDKGFTPLSLAKENWRKPVVIDTNGRREVWRSKELHGRFYRALHGPDVDFLASVAWLRFGDLFGETEGFVCAIMDEVMMTNNYRKYIVKDGTVDICRACHCPGESIRHIVSGCSRLANGEYLHRHNLVARIIHQQLALKYNLVDAEVPYYKYVPDPVLENGHVTLYWDRSIITDRTIVANKPDIVVIDRSERLTMIVDITVPHDENLVKAEKDKEIKYQDLAHEVVAMWDVDSAIIVPIVVTANGLIAKSLDQHLKRLSLGGWIKGLIQKAVLLDTARIVRKFLSLRP

SEQ ID NO: 29887 - protein, 1000 aa, Vanessa cardui
MAITTSKYSDQLRSALRDAIREYRNTSAELRPRLPRLPMSKRNRDLVCTLDSLLAGYFESSENLEDTHSILFCAAVAACRVAGVTFEDTERATRPKAAVPAWQSRIEKRISETRVLIGKLYCFKEGNTRPRVMRFVGRAFLGTGIGPQEYPSHVVERIDFLKQKVYAWASRIRRYRRRVDRYYLNRKFQSDQRWVYRTWERLNQGVSEGCRPDDDATNTFWRNIWSVPVDHIEGDWMLEVRQACEPLEVMGKISIASEDVAAAVRSVPNWKSLGPDGLHSFWLKRLRSSHECLAFQFQSVLESGSLPQFLTTGVTHLLHKSGSATDPKNYRPITCLPTVYKLLTSILRDKINSHIQNNSILSVSQNGCGSGSRGTKELLLIDMTISQQVRRFRKSLLTCWIDYKKAYDSVPHTWLLRVLELYKLDTTLCSFLRSCMRQWRTVLRYPGCRTIHGDDEPIRIERGIFQGDSLSPLWFCLALNPLSTLLEGSRLGYRLRRGGKVISHLLYMDDLKLFTPSCSQLVELLKVTETFSNSIRMEFGVDKCAVMHVKRGEIMESDGLQLSDSINFKSLSANESYKYLGMSEALGINVTDMKQSLRERFFGRLKKVLKSLLSGGNKVRAFNGWVMPVLMYSFGIPKWTQKELDALDRRVRVLLTAYRMHHPRSSVMRLYIPRRYGGRGFLNAKTLHNHEVYKLREYFLHTDLDIHRDVVIMDKGLTPLSLGKNNWRKPVVLSTENRKEVWKSKELHGRFYRALHGPDVDFMASVSWLRFGNLFGETEGFVSAIMDEVIMTNNYRKYIVRNGTVDICRACHTPGESLRHIISGCSRLAKGEYLYRHNQVAKIIHQQLALRYGLVVTEVPYYGYVPDPVLENGHITLYWDRSIITDRTVVANKPDIVVIDRSERRTIIVDITIPHDENLVKAEKDKQIKYLDLVHEVVDMWDVDTAVIVPIVVSANGLMAKSLDQHLKRLSLGSWIKGLMQKAVLLGTARIVRKFLSLEP

SEQ ID NO: 29888 - protein, 640 aa, Hecatera dysodea
MSSSQNGCRKGSRGTKELLLIDMAISQQVRRTRKDLSTCWIDYKKAYDSVPHTWLMKVLELYKIDATLRTFLESCMRQWKTVLCYPGCRPIQGNDEPVWIKRGIFQGDSLSPLWFCLALNPLSTLLEDSGLGYRLRRGGQAISHLLYMDDLKLFAHNKLRLMELLKVTETFSSAIRMEFGVDKCAVMHVKKGEIMESEGVQLSDSIQVRSLSSTETYKYLGMSEALGINVADMKQSLKERFFGRLKNVLNSLLSGGNKVRAFNGWVMPILMYSFGILKWTQTELDALDRRVRTLLTANRMHHPRSSVMRLYIPRKCGGRGFLNAKTLHNREMCSLREYFLKVDVGMHRDVVAVDKGLTPLSMANENWRKPVIHTTDDRKEVWKGKELHGRFYRALYGSDVDFSASVAWLRFGDLFGETEGFVCAIMDEVILTNNYRRHIMKDGTVDVCRACHRPGESIRHIISGCSRLANGEYLHRHNQVARIIHQQLALKYKLVDSEVQYYKYVPDPVLENGHVTLYWDRSIITDRTIVANKPDIVVIDRLARRTMIIDVTIPHDENLVKAEKEKQIKYLDLAHEVVDMWNVDSAVIVPIVVTANGLMAKSFDDHLSKLALHGWLKGLIQKAVLLDTARIVRRFLSLEP

SEQ ID NO: 29889 - protein, 1200 aa, Mythimna impura
MLTRAAARRARHPPPGSPLSSASPPPDLESPVSPAAAVASSSSDEYFSPPTSPTPVRRQRRGRPSKSLGSRGQPAPSRVPAAGGCVQRMRWTQSMNENVMRAYYGSTEGGTNLTAYRDRMLSLFQDLEPTVNVSAQRLSDQVRVIQRNHRLDDATLDRLRSEVLSNQIVSTSIQTQTAATPTTNAISPRSNPNNDDADDRVVTVSSQCNDELRSALEDALREYRTTPTELRPRLPRLPMHKKNRALVCTLDSLLKNNFESSENLVDTHSILYCGAVAACRLANINFPNIDGTIRPKPAVPAWQYRIERRIDGARVLIGKLHCFREGNTRPRVMRFVRRAFLGTGISPQEYMSRVTERIDFLKQKVCAWASRIRRYKRRVDRYSQNRMFQSDERWVYRAWERPEQNVIDGRRPDDFATITFWRNIWSVPVSHTEGDWMRDVERVCEAIPEMEKVVITPADVAKAVRPLPNWKSPGPDGLQNFWLKWFSNSHAPLASQFQSTLESGSLPEYLTTGVTHLLHKTGNPVEPKNYRPITCLSTVYKLLTSILRAKINRHIENNLIMSASQNGCRNGSRGTKELLLIDMAISQQARRSRKDLSTCWIDYKKAYDSVPHTWLMRVLELYKVDMTLRTFLESCMRQWKTVLRYPGCRPIQGNDEPIRIKRGIFQGDSLSPLWFCLALNPLSTLLEESGLGYRLRRGGQAISHLLYMDDLKLFAPSNLQLMELLKVTETFSSAIRMEFGVDKCAAMHVKRGEIMESEGIQLPDSIHLRSLSSTETYRYLGMSEALGINNADMKQSLKERFFGRLKKVLNSLLSGGNKVRAFNGWVMPVLMYSFGILKWTQTELDALDRRVRTLLTANRMHHPRSSVMRLYISRKCGGRGFLNAKTLHNREVCSLREYFLKTDVGMHRDVVAVDKGLTPLSMAKEDWRKPVILTTDDRKEIWKGKELHGRFYRALHEPDVDFLASVAWLRFSDLFGETEGFICAIMDEVILTNNYRRYIMKDGTVDVCRACHRPGESIRHIISGCSRLANGEYLHRHNQVARIIHQQLALKYNLVDSEVPYYKYVPDPVLENDHVTLYWDRSIITDRTIVANKPDIVVIDRLARRAVIVDVTIPHDENLVKAEKEKQIKYLDLAHEVVDMWNVDSAVIVPMVVTANGLIAKSFDDHLSKLSLRGWIKGLIQKAVLLDTARIVRRFLSLEP

SEQ ID NO: 29890 - protein, 1093 aa, Mythimna impura
MLTRSRAKKANTHPTSSGSSLSSASQPPGPAPTVSPEIPVAAVASSSSDEYFSPPTTPPPARRRGRGRPPASLGPRGPPASDRVLAAGGSVQRMRWTQSINENVMRSYFGATEGGSNLTAYRGRMLSLFQVLEPAVNVSAQRLSDQVRVIQRNRMLDDAVLDRLRLESRSSRVSPASPQAAVQLQSNVSLRPDHVGEDDDDEAISVSNQCNVRLRSALEDAFREYRFTPAELRPRLPRLPMHKKNRALVCALDSQLSNCFDSSEDLTDTHSILYCAAVAACRVARVKFPNSDRVTRPAVPAWQCRIERRIGEARALIGKLICFREGNTRPRVMRFVRRAFSGTNISPRDYLPHITERIDFLKQKVYAWANRIRRYKRRVERYTQNRTFQRNERWVYRAWERPDQGVIDTRLPDDDAMCSFWRSIWSVPVSHTEGDWTREIERTCDLIPEMEPITISPQDVARAVRPLPNWKSPGPDGLHNFWLKWFQRSHARLASQFQSALESGSLPQFLTTGITHLLHKAGSTAEPKNYRPITCLPTVYKVLTSILRAKINSHIETNSIMSASQNGCRNGSRGTKELLLIDVAISQQVRRSRRDLSTCWIDYKKAYDSVPHTWLMRVLELYKVDATLRTFLMSCMRQWRTALHYPGCRQIRESSEPIRIERGIFQGDSLSPLWFCLALNPLSTLLEGSGLGYRLKRGGQVISHLLYMDDLKLFASNNLQLMELLKVTETFSSAIRMEFGLDKCAVMHVKRGEIMESVGTQLSDSIYIRSLCSTETYKYLGMSEALGINAADMKQSLRERFFGRLNKVLNSLLSGGNKVRAFNGWVMPVLMYSFGILKWTQTELDALDRRVRSLLTANRMHHPRSSVMRLYIPRKCGGRGFLNAKTLHNREICSLREYFLKTDVGMHRDVVAVDKGLTPLSLVNENWRKPTVMDTNERRAVWQGKELHGRFYRALHGPDVDLLASVSWLRFGNLFGETEGFVFAIMDEVMMTNNYRKYIVKDGTVDICRACHRPGESIRHIISGCSHLANGDYLHRHNLVARIIHQQLALKYNLVESEVPYYRYVPDPVLENGSVTLYWDRSIIGLLLPISLT

SEQ ID NO: 29891 - protein, 1195 aa, Notodonta dromedarius
MLTRLQARLRPPGLLPRSASQPLGLIQDETLTTAAASSESDEYFSPPSSPPPVRRRRGRPPGNLGTLGQPALNRILVPGGVVRRMRWTSSINENVMRAYYEATEGGTNLTAYRGRMLSLFQILEPAVNVSAQRLSDQVRVIQRGHMLADSLLDQLRSEALSSRVVPVASSQPVSLPVTTVESWPAVSGDTDRNDTASEVSTQYDGILRSTLEDVVREYRFVPPHVRPRLPRLPMHNKNRALVCSTNMLLSSYFESSENLMDTHSLLYCTAIAVCRVARVKFPDTDVATRPKPAVPAWQCRIERRINEARIFIGKLSCFRAGNTRPRVMRFVRRIFSGTNVGPQEYLNHVTERIDFLKQQVYAWANRIRRYKARVDRYYQNSMFQRDQRWVYRSWEQSSQRDGEVHRPDDDDMIKFWRNIWSVPMTHSEGGWIGDVEQVCEPIQEMDSITIEAKDVANAVRSLPNWKAPGPDGLHNFWLKWLRSSHACLASQFQSALESRLLPEFITTGVTHLLHKSGSTTDPKNYRPITCLPTIYKTLTSVLREKICRHIDDNSIMSASQNGCRSGARGTKELLLIDMAICQQVRRNRKDLSTCWIDYKKAYDSVPHTWLMRVLELYKVNATLRAFLATCMGQWRTVLLYPGSRRILGNGDPIRIERGIFQGDSLSPLWFCLAMNPLSTLLGGSGLGFRLRRGGQVISHLLYMDDLKLFAPTELQLTGLLKVTETFSKSIRMEFGVDKCAVMHVKKGRMVESRCIRLSDSIQLRSLSGTETYRYLGMSQALGICETDMKQSVRERFLGRLKKVLKSVLSGGNKVRAYNGWVMPVLIYSFGILKWSQTELDTLDRTVRTLLTAHRMHHPRSSVMRLYIPRKCGGRGFLNAKTLHNREVFNLREYFLHAVGEMHADVVAVDNGLTPLSLSKEHWRRPVVLTTDDRMAVWQGKELHGRYYRALHGPDVDLAASVAWLQFGDLFGETEGFVCAIMDEVVMTNNYRRFIIRDGTIDICRACHRPGESLRHIISGCSRLANGEYLHRHNQVARIVHQQLALKYRLVASEVPYYRYVPEPVLEDGHITLYWDRSIITDRTIVANRPDIVLIDRQERHAMLVDVTVPHDGNLVKAEKDKECKYLDLVHEVVDMWDIDTAIIVPIVVSAHGLIGKSLDKHLKRLSLGSWIKGQIQKAVLLETARIVRKFLSLEP

SEQ ID NO: 29892 - protein, 961 aa, Laspeyria flexula
MMDDTVLDRLRLECLQNNPTVPLQVNNLNNIISNAITIQADHNLEEVDGISSVDTQCNEEVRVALERALREYRFTSLQFRPRLPRLPMHKKNLALVITLDSLLSDYFDNSENLGDTHSILYCAAVAACRLAGVKFLGIEPPSHERPSTPAWQCRIERRIAGARILIGKLISFRAGNTRPRVMRFVNQAFSGTDVSLNEYLSRVTERIDFLKQKVYAWANRIRRFKKRVDRYTVNRLFQRDQRWVYRNWERPTQEVSDERLPDATATNEFWSSIWSEPVLHTEGEWIWDVERACERIPLMESVVISAEDIASAVRPMANWKSPGLDGLHNFWLRWLRSSHGRLASQFQSALESGSLPEFLTTGCTHLLHKSGSVTEPGNYRPITCLPSVYKLLTSVLRAKITKHIDDNRTMSISQNGCRRGSRGTKELLLVDMTISQQVRRSRKDLATCWIDYKKAFDSVPHSWLLRVLELYKVDITLRTFLESCMRQWRTVLTYSGCRLICGNGEPVRIKRGIFQGDSLSPLWFCLALNPLSTLLESSGLGYRLRRGGHVISHLLYMDDLKLIAPTDLQLKGLLKVTEDFSKSIKMDFGIDKCAIMHVKRGEIVESEGIQLSDSINFRSLLVTDTYKYLGMSQALGIKETDMKQSLQERFFGRLKKVLNSLLSGGNKVRACNGWVMPHLMYSFGILKWTQTELDALDRRVRTMLTAYRMHHPRSSVMSLYIPRKSRGRGFLNAKTLHNREVYNLREYFMGKVEGMHRDVVAVDLGLTPLSLAKDNWRRPIVLSTDDRRQVWQSKELHGRFYKALHGPDVDRVASVAWLRFGDLFGETEGFACAIADEVIKTNNYRKYILRDGTVDICRACHRPGESLRHIVSGCSRLANGEYLQRHNQVARIIHQQLALRYKLVDVEVPYYRYAPEPVLENSHATLYWDRSIITDKTVIANKPDIVVLDRSKRLAVIVDPS

SEQ ID NO: 29893 - protein, 1209 aa, Xestia xanthographa
MITRSRAKQHQEAHPPSPGSSLSSASQPPGRATPVSIVSPVAAVASSSSDEFFSPPSTPSPSPRRGRRRGRGRPPAGLGPRGQQAPSRVPAAGGNVSRIRWTQSMNENVMRAYYGATEGGINLTAYRGRMLSLFQVLEPGVSASAQRLSDQVRVIQRNHMLDDTVLDRLRSESRSNLVTPASPLIAVQVQNVSSAPPRSDRDGEEDDSEVISVSTQCNAQLRSALESAFREYRSTPPELRPRLPRLPMHNKNKALMCALDSQLSNCFDSSKDLTDTHSILYCGAVAACRVAHVKFPNNDGATRPKLAVPAWQCRIERRIGEARALIGKLICFREGNTRPRVMRFVRRAFSGTDISFRDYLARVTERIDSLKQKICAWASRIRRYKRRVERYTQNRTFQSDERWVYRAWERPDQGVTDTRLPDDSAMYSFWRNIWSVPVSHTEGDWTREVEQACDPIPEMGAIIISPQDVARAVRPLPNWKSPGPDGLHNFWIKWFQGSHARLASQFQSALESGSLPQFLTTGITHLLHKSGSAAEPKNYRPITCLPTVYKVLTSILRAKINQHIDSNSIMSASQNGCRNGSRGTKELLLIDMAISQQVRRSRKNLSTCWIDYKKAYDSVPHTWLMRVLELYKIDATLRTFLMSCMGHWRTVLRYPGCRQIQGNSEPIRIERGIFQGDSLSPLWFCLALNPLSTLLERSGLGYLLRRDGQVISHLLYMDDLKLFAPNNFQLMKLLKVTETFSSAIRMEFGVDKCAVMHVKRGEIMESEGTQLSDSIHLRSLSSTETYKYLGMSEALSINTANMKQSLRERFFGRLNKVLGSLLSGGNKVRAFNGWVMPVLMYSFGILKWTQTELDALDRRVRTLLTANRMHHPRSSVMRLYISRKCGGRGFLSAKTLHNREVYSLREYFLEAEGEMHRDVVSVDKGLTPLSLANGNWRKPKVLDTNDRKVEWQGKELHGRFYRALHGPDVDFLASVSWLRFGDLFGETEGFICAIMDEVMMTNNYRKYIVKDGTVDICRACHRPGESIRHIISGCSSLANGEYLHRHNLVARIIHQQLALKYNLVESEVPYYKYAPDPVLDNGHITLYWDRPITTDRTVVANKPDIVVIDRLERRTMIVDITIPHDENLVKAEKDKQFKYLDLAREVVDMWDVGTAVIVPIVVSANGLIAKSLDQHLRRLSLGSWIKGLIQKAVLLDTARIVRRFLSQEP

SEQ ID NO: 29894 - protein, 1116 aa, Noctua fimbriata
MLTRSATRRARLLPPDPSLSSASPPPESSPTVSAVTPAVAVASSSSDEYFSPPTMPPPVRRRGGRRPPDGLGPRGPPASDRVPAPGGSVQRMRWTQSINENVMRSYYGATEGGNNLTAYRVRMLSLFQVLEPAVNVSAQRLSDQVRVIQRNRMLDDTVLDRLRTETQSSHVITPSAQAVVLPQSSTIPNRDNDVSNDMVTNVSTQCNEEMRSALEGAIREYRFMQPDLRPRIPRLPMHNKNRALVAVLDSQLSNYFDNCEDLTDAHSILYCAAVAACRVAHVKFSDDRATRPKPAVPPWQYRIERRIGGARALIGKLICFREGNTRPRVMRFVRRAFSGTDISPRDYMSRITERIDFLKQKVYAWASRIRRYKRRVDRYTQNRTFERDERWVYRTWERPDQGVTDTRIPDDDAMCSFWRSIWSVPVSHTEGEWTREVEQACDLVPEMGAITISPQDVVRAVRPLPNWKSPGPDGLHNFWIKWFTRSHARLAILFQSALESGSLPEFLTTGITHLLHKSGSTAEPKNYRPITCLPTVYKVLTSILRAKINKHIDDNSIMSASQNGCRNGSRGTKELLLIDMAISQQVRRSRRDLSTCWIDYKKAYDSVPHTWLMRVLELYKVDATLRTFLMSCMGQWRTVLRYPGCRQIQRNSEPIRIERGIFQGDSLSPLWFCLALNPLSTLLEDSGLGYQLRRGGQVISHLLYMDDLKLFAPNDLQLMELLKVTETFSSAIRMEFGVDKCAVMHVKRWEIVESVGTQLSDSINLTSLSATETYKYLGMSEALGINVADMKQSLKERFFGRLKKVFNSLLSGGKKVRAFICWVMPVLMYSFGILKWTQTELDALDRRVRTLLTAYRMHHPRSSVMRLYIPRKCGGRGFLNAKTLHNREICSLREYFLETDVGMHRDVVAMDKGLTPLSLAKENWRKLLVLDTNDRMEVWQSKELHGRFFRALHGPDVDLSASVAWLRSGDLFGETEGFVCAIMDEVMMTNNYRRFIVKDGTVDICRACHRPGESIHHIISGCSRLANGEYLHRHNLVARIIHQQLALKYNLVESEVPYYKYVPDPVLENGSITLYWDQSIITDRTIVANKPDIVVVDRSERRTMIVDIRFRMTRTS

SEQ ID NO: 29895 - protein, 1192 aa, Abrostola tripartita
MITRSRAKIAQSTSPDSSPRSASQLPDQQALHSPASAVASSSSDEYFSPPTSPTPVRRQRRGRPPTSLGLRGQLAPNRVPASGGCVQRMKWSQQINENVMRAYYGSTEGGTNLTAYRDRMLALFQDLEPAVNVSAQRLSDQVRVILRNHRLDDATLDRLRSEVHSSPVTCRPVHVVVPPIGPPPCDMEADDRATTVSTQYNDILRSTLEDTIREYRVSPPGLRPRLPRLPMHNKNKAMISALDSLLSSYFEGSEDLCDTHSILYCAAATACRVANVKCFDSSTATRPKPAVPAWQCRIESRITEARTLIGKLTAFREGNIRPRVMRFVRRAFAGVDINPREYATRATERIDFYKQKVYAWASRIRRYKRRVDRFSQNRIFNQDQRWVYRNWERSAQGVSDGHLPDDDVTNAFWRSIWSVPVNHTEGSWMLDVEQSCESIPEMGTITISPQDVASAVRPMSNWKSPGPDGLHNFWIKWLRSSHGCLASQFQSALEVGSLPQFLTTGSTHLLHKTGSTTDPKNFRPITCLPTIYKLLTSILRAKITKHIDDNNIMSASQNGCKNGSRGTKELLLIDMTICQQVRRSKKDLSTCWIDYKKAYDSVPHTWLMRVLELYKIDTTLRTFLLSCMRQWRTVLHYPGCRDIQQDGEPIRIERGIFQGDSLSPLWFCLALNPLSTLLENSGLGYSLRRRSQVISHLLLMDDLKLFAPSRFQLIKLLKITEAFSNSIRMEFGVDKCAVMHVKRGGIIESQGIQLSDSINLRSLSATETYKYLGMSEALGINVVDMKQSLKERFFGRLNKVLKSLLSGGNKVRAFNGWVMPTLMYSFGILKWTQTELDALDRRVRTLLTSNRMHHPRSSVMRLYIPRKCGGRGFLNAKTLHNREVCSLREYFLRAEVGMHREVVTVDKGLTPLFLAKENWCKPVVLSVNDRRDVWQSKELHGRFYKALHGPNVDLLSSVSWLRFGDLFGETEGFVCAIMDEVIMTNNYRKYILKDGTVDICRAYHRPGESLRHIMSGCSRLANGEYLHRHNQVARIIHQQLALKYKLVDSEMPYYRYVPDPVLENDHITLYWDRSIITDRTIVANKPDIVVIDRLERRAMIVDITIPHDENLVKAERDKQIKYLDLAHEVVDMWEVDSAIIVPIVVSANGLMAKSLDQHLKRLTLGGWVKGLMQKAVLLDTARIVRRFLSLEP

SEQ ID NO: 29896 - protein, 1198 aa, Xestia c-nigrum
MLTRAAARRARLPPPDPSLSSASPPPEPSPIVSAVTPAVAVASSSSDEYFSPPTTPPPARRRGGRRPPDGLGPRGLPGSDRVPAPGGSVHRMRWTQSNNENVMRAYYGATEGGNNLTAYRVRMLSLFQVLEPAVNVSAQRLSDQVRVIQRNRMLDDPVLDRLRTEMHSSHVIATPPSQAVVPPQSTTITNRDDDVSSDMITNVGTQYSEDMRSALEGAIREYRFMTPELRPRLPHLPMHNKNRMLVAVLDSQLSNYFDNCEDLTDVHSILYCAAVAACRVARVKFSDDRATRPKPAVPAWQYRIEQRIGGARALIGKLICFREGNTRPRVMRFVRRAFSGTDINPRDYMSRVTERIDFLKQKVYAWASRIRRCKRRVDRYTQNRTFQRDERWVYRAWERPDQGVADTRLPDDDAMCSFWRSIWSVPVSHAEGEWTRVIERACDPVPEMGAITISPQDVACAVRPLPNWKSPGPDGLHNFWIKWFTRSHAHLATLFQSDLESGSLPEFLTTGITHLLHKSGSTAEPKNYRPITYLPTVYKVLTSILRTKICKHVDDNSVMSASQNGCRNGSRGTKELLLIDMAISQQVRRSRKDLSTCWIDYKKAYDSVPHTWLMRVLELYKVDATLRTFLMSCMGQWRTVLRYPGCRQIQRNSEPIRIERGIFQGDILSPLWFCLALNPLSTLLEDSGLGYQLRKDGRVISHLLYMDDLKLFAPNDLQLMELLKVTETFSSAIRMEFGVDKCAVMHVKRGEIVESVGTQLSDSINVRSLSATETYKYLGMSEALGINVADMKQSLKERFFGRLKKVFNSLLSGGNKVRAFNGWVMPVLMYSFGILKWTQTELDALDTKVRKLLAAFRMHHPRSSVMRLYIPRKCRGRGFLNAKTLHNREICSLRDYFLEADVGMHRDVVTMDKGLTPLSLAKENWRKPIILTTDDRRKEWQGKELHGRFYRALYGADVDFLASVSWLRSGDLFGETEGFVCAIMDEVMMTNNYRRFIVKDGTVDICRACHRPGESIRHIISGCSRLANGEYLHRHNLVARIIHQQLALKYNLVESEVPYYRYVPDPVLVNGSITLYWDQSIITDRTVIANRPDIVVMDRSERHAMIVDITLPHDENLVKAEKDKQIKYLDLAREVVDMWEVDSAIIVPIVVSAHGLIAKSLDQHLRRLSLGSWIKGLIQKAVLLDTARIVRRFLSLEP

SEQ ID NO: 29897 - protein, 1001 aa, Griposia aprilina
MKWTQSMNENVMRAYYRSTEGGTNLTAYRDRMLSLFQELEPTVNVSAQLLSDQVRVIQRSHRLDDAALDRLRSELNNHIISTPAQTAVQASTIDEIQPRSNHGVEVEDDRVASVSSQCNARLRSALEDAFREYRSTPTELRPRLPRLPMHKKNRALVCALDSPLKNVFESSKNLIDTHSILYCAAVAACRLAKVRFPNCDGATRPKPAVPAWQCRIERRIDGARVLIGKLHCFREGNNRPRVMRFAFSGTGISPREYMSHATERIDFLKQKVCAWASRIRRYKRRVDRYTQNRIFQSDERWVHRAWERPEQNVTDECRPDDATTSTFWRSIWSVPVCHVEADWMRDVGRACETVPEMDAVLITPLDVARAVRPLPNWKSPGPDGLHNFWLKWLISAHACLASQYQSSLESGSLPQFLTTGVTHLLHNSGSPTDPKNYRPITWLSTVYKLLTSILRAKINTHIESNSIMSASQNGCRNGSRGTKELLLIDMAISQQVRRSRKDLSTCWIDYKKAYDSVPHTWLMRVLELYKIDTTLRTFLRSCMGQWRTVLRYPGCRQIQANDEPVWIKRGIFQGDSLSPLWFCLALNPLSTLLEDSGLGYRLRRGGQVISHLLYMDDLKLFAPNKLQLMELLKVTETFSSTIRMEFGVDKCAVMLVKRGEVMEPEGIQLSDSIHLRSLSSSENYKYLGMSEALGINVADMKQSLRERFFGRLKKVLISLLSGGNKVRAFNGWVMPVLMYSFGILKWTQTELDALDRRVRTLLTANRMHHPRSSVMRLYIPQKCGGRGFLNAKTLHNRELCSLREYFLKAEVGMYRDVVAVDKGLTPLSMAKENWRKPVVLTTDDRKEVWQSKELHGRFYRALHEPGVDSLASVSWLRFGDLFGETEGFVCAIMDEVILTNNYRRHIMKDGTVDMCRACHRPGESIRHIVSGCSRLANGEYLHRHNQVARIIHQQLALKYKLVDSEVPYYKYVPDPVLENDHITLYWDRSIITDGRTDYCRQ

SEQ ID NO: 29898 - protein, 1197 aa, Mythimna ferrago
MLTRSRARRPETHPTTSGSSLNSASQPPGPAPAVSPVIPEAAVASSSSDEYFSPPTTPPPARRRGRGRPPASLGPRGPPASDRVPAVGGSVQRMRWTSSINENVMRSYFGATEGGINLTAYRGRMLSLFQVLEPAVNVSVQRLSDQVRVIQRNRMLDDAVLDRLRLESQSSRATPSAAAQRQPSAAPRPDHVGDADDDAAISVSTQCNERLRGALEDAFREYRSIPPELRPRLPRLPMHKRNRALVCALDSQLSICFDSSEDLADTHSILYCAAVAACRVAHVKFPNCNRATRPAVPAWQCRIERRIGEARALIGKLICFREGNTRPRVMRFVRRAFSGTDISPRDYLPCVTERIDFLKQKIYAWANRIRRYKRRVERYTQNRTFQSNERWVYRAWERPDQGVTDTRLPDDDAMCSFWRSIWSAPVSHTEGDWIREVERACDLLPEMGAITISPQDVARAVRPLPNWKSPGPDGLHNFWLKWFQRSHARLASQFQSALESGSLPLFLTTGITHLLHKSGSTAEPKNYRPITCLTTVYKVLTSILRAKINSHIETNSIMSVSQNGCRNGSRGTKELLLIDIAISQQVRRSRKNLSACWIDYKKAYDSVPHTWLMRVLELYKVDATLRTFLMSCMGQWRTVLHYPGCRQIWENSEPIRIERGIFQGDSLSPLWFCLALNPLSTLLEGSGLGYRLKRGGQVISHLLYMDDLKLFAPNNLQLMELLKVTETFSSAIRMDFGVDKCAVIHVKRGEIMESEGIQLSDSIHLRSLSSTETYKYLGMSEALGINTDDVKQSLKERFFGRLNKVLNSLLSGGNKVRAFNGWVMPVLMYSFGILKWTQTELDALDRRVRTLLTANRMHHPRSSVMRLYIPRKCGGRGFLNAKSLHNREVCSLREYFLAVDVGMHRDVVAVDKGLTPLSLANENWRKPLVLDTNDRREVWQGKELHGRFYRALHGPDVDLLASVSWLRFGDLFGETEGFVFAIMDEVMMTNNYRKYIVKDGTVDICRACHRPGESIRHIISGCSRLANGDYLHRHNLVARIIHQQLALKYNLVESEVPYYRYVPDPVLDNGSITLYWDRSIITDRTIVANKPDIVVIDRLERRTMIVDIAVPHDENLVKAEKDKQIKYLDLAREVVDMWEVDRAIIVPIVVTANGLIAKSLEQHLRRLSLGSWIKGLIQKAVLLDTARIVRRFLSQEP

SEQ ID NO: 29899 - protein, 968 aa, Eupsilia transversa
MLKLFLCNSNVYVIIIIIILRIKNFFESSEDLIDTHSILYCAAVAACRLANVKFPNCDAATRPKPAVPAWQCRIERRVDGARVLIGKLYCFREGNTRPRVMRFVRRAFSGTGISPQEYMSRVTERIDFLKQKVCAWASRIRRYKRRVDRYTQNRMFQSDERWVYRAWERPEQNVADVCRPDDAATSAFWRSIWSVPVCHAEAGWMHGVERVCEAIPEMEAVIITPLDVAKAVRPLPNWKSPGPDGLHNFWLKWLISSHTRLASQFQSSLESGSLPQFLTTGVTHLLHKSGSPAEPKNYRPITCLSTVYKLLTSILRAKINSHIDSHSIMSASQNGCRNGSRGTKELLLIDMAISQQVRRSRKDLSTCWIDYKKAYDSVPHTWLMRVLELYKIDATLRTFLMSCMGQWRTVLRYPGCRQIQGNDEPVWIKRGIFQGDSLSPLWFCLALNPLSTLLEESGLGYRLRRGGQVISHLLYMDDLKLFAHNKLRLMELLKVTETFSSAIRMEFGVDKCAVMHVKRGEIMESEGTQLSDSIHLRSLSSTESYKYLGMSEALGINVADMKQALKERFFGRLKKVLISLLSGGNKVRAFNGWVMPVLMYSFGILKWTQTELDALDRRVRTLLTANRMHHPRSSVMRLYIPRKCGGRGFLNAKTLHNREVCSLREYFLKTEEGMHRDVVAVDKGLTPLSMAKENWRKPVVLTTDDRKEVWQSKELHGRFYRVLHEPGVDFLASVSWLRFGDLFGETEGFVCAIMDEVILTNNYRRHIMKDGTVDVCRACHRPGESIRHIISGCSRLANGEYLHRHNQVARIIHQQLALKYKLADSEVPYYKYVPDPVLENDHVTLYWDRSIITDRTIVANKPDIVVIDRLARRAMIVDVTIPHDENLVKAEKEKQIKYLDLAHEVVDMWNVSSAIIVPIVVTANGLMAESLDQHLLRLSLGGWIKGLIQKAVLLDTARIVRRFLSLQP

SEQ ID NO: 29900 - protein, 1120 aa, Amphipyra tragopoginis
MITRSQVRLQRTRPPSSASSLSSASQPPESSPTVSAVTPAAAVASSSSDEYFSPPTSPPPARRRGGRRPPDRLGLRGPLASDRVPAPGGSVTRMRWTKTINENAMRAYFGATEGGTNLTAYRSRMLSLFQVLEPTVNVSAQRLSDQVRAIQRGHMLDDTVLDRLRSEIQCSPVISSSPQAPGHISRNIPVTSPRLQQVVEEDDDRATVVSIQCNEQLRRALEDAMREYRSTRPEVRPRLPRLPMHRKNRALMCALDSLLSNYFDGSEDLGDTHSILYCAAVAACRVAHVKFINNERATRPKNAVPAWQCRIERRIAEARALIGKLVCFREGNTRPRVMRFVRRAFLGTDVSPREYMSRVTERIDFLKQKVYAWANRIRRYRRRVDRYNQNRMFRSDERWVYRTWERPDQGVDAAHLPDDDAMNSFWRSIWSVPVTHTEGDWMRDVERMCEPILDMGAITISPQDVAGAVRPLPNWKSPGPDGLHNFWLKWLRSSHARLASQFQSSLETGTLPQFLTTGVTHLLHKSGSTAEPKNYRPITCLPTVYKVLTSILRTKINSHIDNNSIMSASQNGCRNGSRGTKELLLIDMAISQQVRRSRKDLLTCWIDYKKAFDSVPHTWLMRVLELYKVNTTLRTFLTSCMGQWRTVLHYPGCRQIQGRGEPIRIERGIFQGDSLSPLWFCLALNPLSTLLEGSGLGYRLRRGGQVISHLLYMDDLKLFAPNNLQLMELLKVTETFSNSIRMEFGVDKCAVMHVKRGGIMESVGTQLSDSIHLRSLSSTETYKYLGMSEALGINVTDMKQSLRERFYGRLKKVLKSLLSGGNKVRAFNGWVMPVLMYSFGILKWTQTELDALDRRVRSLLTAYRMHHPRSSVMRLYIPRKCGGRGFLNAKTLHNREVCSLREYFSQTSVGMHRDVVAVDKGFTPLSLAKENWRKPVVLDTNGRREVWRSKELHGRFYRALHGPDVDFLASVAWLRFGDLFGETEGFVCAIMDEVMMTNNYRKYIVKDGTVDICRACHCPGESIRHIVSGCSRLANGEYLHRHNLVARIIHQQLALKYNLVDAEVPYYKHSVSTYYIQWVNAHTFDRSYEMSKLVTLVKGLSHKINYTNFIKQTSKLINVL

SEQ ID NO: 29901 - protein, 1204 aa, Amphipyra tragopoginis
MLTRSRAKALSTHLPPSASSLSSASQPPKPASIVSVVTPAAAVASSSSDEYFSPATTPPPARRRGRGRPPACLGPRGPPASDRVPAPGGSVQRMRWTQSMNENCMRAYFGATEGGTNLTAYRGRMLSLFQALEPAVNVSAQRLSDQVRVIQRGHMLDDTVLDRLRSEVQSSPVISPSSQVLAQQQNLAAAFPRPNHAGEEDDDRATNVSTQYNEELRSALEDAMREYRYTRSDLRPRIPRLPMNRKNRALVCALDSLLSNYFDGSEDLGDTHSILYCAAVAACRVAHVKFIDNERATRPKNAVPAWQCRIERRIAEARALIGKLICFREGNIRPRVMRFVRRAFSGTDVSPREYMSRVTERIDFLKQKVCAWANRIRRYRRRVDQYTQNRLFQSDERWVYRTWERPDQRVSDTHLPDNDVMNAFWRNIWSVPVTHTEGDWMQEVQRACEPIQEMGDIIISPQDVASAVRPMSNWKSPGPDGLHNFWLKWLRSSHARLASQFQSSLESGSLPQFLTTGVTHLLHKSGSTAEPKNYRPITCLPTVYKVLTSILRAKINNHIDNNSIMSASQNGCRNGSRGTKELLLIDMAISQQVRRSRKDLSTCWIDYKKAYDSVPHTWLMRVLELYKVNTTLCAFLTSCMGQWRTVLHYPGCRQIQRMGEPIRIERGIFQGDSLSPLWFCLALNPLSTLLEGSGLGYRLRRGGQVISHLLYMDDLKLFAPNNLQLLELLKVTETFSNSIRMEFGVDKCAVMHVKRGRIMESVGTQLSDSIHLRSLSSTETYKYLGMSEALGVNETGMKQSLKERFFGRLKKVFNSLLSGGNKVRAFNGWVMPVLMYSFGILKWTQTELDALDRRVRSLLTANRMHHPRSSVMRLYIPRKCGGRGFLNAKTLHNREVCSLREYFSQADVGMHRDVVAVDKGFTPLSLAKGNWRKPVVLDTNDRREVWRRKELHGRFYRALHGPDVDFLASVAWLRFGDLFGETEGFVCAIMDEVMMTNNYRKYIVKDGTVDICRACHCPGESIRHIVSGCSRLANGEYLHRHNLVARIIHQQLALKYNLVDSEVPYYKYVPDPVLENGHVTLYWDRSIITDRTIVANKPDIVVIDRSERLTMIVDITVPHDENLVKAEKDKEIKYQDLAHEVVAMWDVDSAIIVPIVVTANGLIAKSLDQHLKRLSLGSWIKGLIQKAVLLDTARIVRKFLSLRP

SEQ ID NO: 29902 - protein, 1200 aa, Amphipyra tragopoginis
MLTRSKARARDAHPPPPDSSPSSASQQQGLDPASPAAAVASSSSDEYYSPPSSPPPARRRGGTRPPGGLGLRGPLASDRVPAPGGIVPRMKWTQKMNESVMRAYYGATEGGTNLTAYRSRMLSLFQVLEPAVNVSAQRLSDQVRVIQRGHMLDDTVLDRLRSEVQSSPVISPSSQVLEQQQNLAAALPRPNRADEEDDDRVANVSTQCNDELRSALEDAMREYRYTRSDLRPRIPRLPMHRKNRALVCALDSLLSNYFDGSEDLGDTHSILYCAAVAACRVAHVKFTDNERATRPKNAVPAWQCRIERRISEARALIGKLVCFREGNTRPRVMRFVRRAFSGTDVSPREYMSRVTERIDFLKQKVYAWANRIRRYRRRVDRYTQNRLFQSDERWVYRTWERPDQRVSDTRLPDDDVMNTFWRNIWSVPVAHTEGDWMQEVQRACEPIQEMGDIIISPQDVASAVRPMSNWKSHGPDGLHNFWLKWLRSSHARLASQFQSSLESGSLPQFLTTGVTHLLHKSGSTAEPKNYRPITCLPTVYKVLTSILRTKINNHIDNNSIMSASQNGCRNGSRGTKELLLIDMAISQQVRRSRKDLSTCWIDYKKAYDSVPHTWLMRVLELYKVNTTLCAFLTSCMGQWRTVLRYPGCRQIQGIGEPIRIERGIFQGDSLSPLWFCLALNPLSTLLEGSGLGYRLRRGGQVISHLLYMDDLKLFAPNNLRLLELLKVTETFSNSIRMEFGVDKCAVMHVKRGRIMESVGTQLSDSIQLRSLSSTETYKYLGMSEALGVNETDMKQSLKERFFGRLKKVFNSLLSGGNKVRAFNGWVMPVLMYSFGILKWTQTELDALDRRVRSLLTANRMHHPRSSVMRLYIPRKCGGRGFLNAKTLHNREVCSLREYFSQADVGMHRDVVAVDKGFTPLSLAKENWRKPVVLDTNGRREVWRSKELHGRFYRALHGPDVDFLASVAWLRFGDLFGETEGFVCAIMDEVMMTSNYRKYIVKDGTVDICRACHCPGESIRHIVSGCSRLANGEYLHRHNLVARIIHQQLALKYNLVDAEVPYYKYVPDPVLENGHVTLYWDRSIITDRTIVANKPDIVVIDRSERLTMIVDITVPHDENLVKAEKDKEIKYQDLAHEVVAMWDVDSAIIVPIVVTANGLIAKSLDQHLKRLSLGGWIKGLIQKAVLLDTARIVRKFLSLRP

SEQ ID NO: 29903 - protein, 1202 aa, Amphipyra tragopoginis
MLTRSRARARDNQAHLPPPDSSPSSASQQQGLNPASPAAAVASSSSDEYYSPPSSPPPARRRGGTRPPVGLGLRGPLASDRVPAPGGIVPRMKWTQKMNESVMRAYYGATEGGTNLTAYRSRMLSLFQVLEPAVNVSAQRLSDQVRVIQRGHMLDDTVLDRLRSEVQSSPVISPSSQVLEQQQNLAAALPRPNRADEEDDDRAANVSTQCNDELRSALEDAMREYRYTRSDLRPRIPRLPMHRKNRALVCALDSLLSNYFDGSEDLGDTHSILYCAAVAACRVAHVKFTDNERATRPKNAVPAWQCRIERRISEARALIGKLVCFREGNTRPRVMRFVRRAFSGTDVSPREYMSRVTERIDFLKQKVYAWANRIRRYRRRVDRYTQNRLFQSDERWVYRTWERPDQRVGDTRLPDNDVMNTFWRNIWSVPVAHTEGDWMQEVQRACEPIQEMGDIIISPQDVASAVRPMSNWKSPGPDGLHNFWLKWLRSSHARLASQFQSSLESGSLPQFLTTGVTHLLHKSGSTAEPKNYRPITCLPTVYKVLTSILRTKINNHIDNNSIMSASQNGCRNGSRGTKELLLIDMAISQQVRRSRKDLSTCWIDYKKAYDSVPHTWLMRVLELYKVNTTLCAFLTSCMGQWRTVLRYPGCRQIQGIGEPIRIERGIFQGDSLSPLWFCLALNPLSTLLEGSGLGYRLRRGGQVISHLLYMDDLKLFAPNNLRLLELLKVTETFSNSIRMEFGVDKCAVMHVKRGRIMESVGTQLSDSIQLRSLSSTETYKYLGMSEALGVNETDMKQSLKERFFGRLKKVFNSLLSGGNKVRAFNGWVMPVLMYSFGILKWTQTELDALDRRVRSLLTANRMHHPRSSVMRLYIPRKCGGRGFLNAKTLHNREVCSLREYFSQADVGMHRDVVAVDKGFTPLSLAKENWRKPVVLDTNGRREVWRSKELHGRFYRALHGPDVDFLASVAWLRFGDLFGETEGFVCAIMDEVMMTNNYRKYVVKDGTVDICRACHCPGESIRHIVSGCSRLANGEYLHRHNLVARIIHQQLALKYNLVDAEVPYYRYVPDPVLENGHVTLYWDRSIITDRTIVANKPDIVVIDRSERLTMIVDITVPHDENLVKAEKDKEIKYQDLAHEVVAMWDVDSAIIVPIVVTANGLIAKSLDQHLKRLSLGSWIGGLIQKAVLLDTARIVRKFLSLRP

SEQ ID NO: 29904 - protein, 999 aa, Autographa pulchrina
MTVSTQCSELIRSTLEDAIRDYRTSPPDQRPRLPRLPMHNRNKAIMGALDSLLPIYFESSEDLRDTHSILYCAALTACRVANVAICYSNIAARPKPAVPAWQCRIEQRVAEARTLIAKLIAFKQGNSRPRVMRFVRRAFAGTDISSSEYTARVTERIDLFKQKVCAWASRIRRYKRRVERFYLNRMFQKDQRWVYRAWERPASGVDGGCLPDGDATNSFWRSIWSVPVSHSEGGWMREVEQVCEPIQEMGAITISPQDVANAVRPMANWKTPGPDGLQNFWLKWLRSSHGCLASQFQCAVESASLPQFLTTGSTHLLHKTGSATDPKNYRPITCLPTVYKLLTSILRAKINEHVVSFSIMSASQNGCRSGSRGTKELLLIDTAICQQVRRSKKDLSTCWIDYKKAYDSVPHTWLMRVLELYKINATLRAFLVSCMGQWSTVLHYPGCRDIQQGGEPIRIERGIFQGDSLSPLWFCLALNPLSTLLENSRLGYSLRRGSQVISHLLYMDDLKLFANSGLQLMKLLKITESFSNSIRMEFGVDKCAVMHVKRGGVVESQGIQLSDSINLRSLSATETYKYLGMSEALGINGADVKQSLQARFFGRLNKVLKSVLSGGNKVRAFNGWVMPVLMYSFGVLKWTQTELDALDRRVRTLLTANRMHHPRSSVMRLYIPRKCGGRGFLNAKTLHNREVCNLREYFLQVDVGMHRDVVVVDKGLTPLSLGKENWHKPVVLSVKDREVVWQSKELHGRYYRTLHGSDVDFLASVAWLRFGDLFGETEGFVCAIMDEVIMTNNYRKYIIKDGTVDICRACHCPGESLRHIISGCSRLANGEYLHRHNQVARIIHQQLALRYKLVESEVPYYRYVPDPVLENGRVTLYWDRSIITDRTIVANKPDIVVIDRSERRAIIVDITIPHDENLVKAEKEKQLKYLDLAHEVVDMWEVDSAIIVPIVVTANGIIAKSLDQHLKRLSLGAWVKGLMQKAVLLDTARIVRRFLSLEP

SEQ ID NO: 29905 - protein, 999 aa, Autographa pulchrina
MTVSTQCSELIRSTLEDAIRDYRTSPPDQRPRLPRLPMHNRNKAIMGALDSLLPIYFESSEDLRDTHSILYCAALTACRVANVAICYSNIAARPKPAVPAWQCRIEQRVAEARTLIAKLIAFKQGNSRPRVMRFVRRAFAGTDISSSEYTARVTERIDLLKQKVCAWASRIRRYKRRVERFYLNRMFQKDQRWVYRAWERPASGVDGGCLPDGDATNSFWRSIWSVPVSHSEGGWMREVEQVCEPIQEMGAITISPQDVANAVRPMANWKTPGPDGLQNFWLKWLRSSHGCLASQFQSAVESASLPQFLTTGSTHLLHKTGSATDPKNYRPITCLPTVYKLLTSILRAKINEHVVSFSIMSASQNGCRSGSRGTKELLLIDTAICQQVRRSKKDLSTCWIDYKKAYDSVPHTWLMRVLELYKINATLRAFLVSCMGQWSTVLHYPGCRDIQQGGEPIRIERGIFQGDSLSPLWFCLALNPLSTLLENSRLGYSLRRGSQVISHLLYMDDLKLFANSGLQLMKLLKITESFSNSIRMEFGVDKCAVMHVKRGGVVESQGIQLSDSINLRSLSATETYKYLGMSEALGINAADVKQSLQARFFGRLNKVLKSVLSGGNKVRAFNGWVMPVLMYSFGVLKWTQTELDALDRRVRTLLTANRMHHPRSSVMRLYIPRKCGGRGFLNAKTLHNREVCNLREYFLQVDVGMHRDVVVVDKGLTPLSLGKENWHKPVVLSVKDREVVWQSKELHGRYYRTLHGSDVDFLASVAWLRFGDLFGETEGFVCAIMDEVIMTNNYRKYIIKDGTVDICRACHCPGESLRHIISGCSRLANGEYLHRHNQVARIIHQQLALRYKLVESEVPYYRYVPDPVLENGRVTLYWDRSIITDRTIVANKPDIVVIDRSERRAIIVDITIPHDENLVKAEKEKQLKYLDLAHEVVDMWEVDSAIIVPIVVTANGIIAKSLDQHLKRLSLGAWIKGLMQKAVLLDTARIVRRFLSLEP

SEQ ID NO: 29906 - protein, 1200 aa, Mythimna impura
MLTRAAARRARHPPPGSPLSSASPPPDLESPVSPAAAVASSSSDEYFSPPTSPTPVRRQRRGRPPKSLGSRGQPAPSRVPAAGGCVQRMRWTQSMNENVMRAYYGSTEGGTNLTAYRDRMLSLFQDLEPTVNVSAQRLSDQVRVIQRNHRLDDATLDRLRSEVLSNQIVSTSIQTQTAATPTTNAISPRSNPNNDDADDRVVTVSSQCNDELRSALEDALREYRTTPTELRPRLSRLPMHKKNRALVCTLDSLLKNNFESSENLVDTHSILYCGAVAACRLANINFPNIDGTIRPKPAVPAWQYRIERRIDGARVLIGKLHCFREGNTRPRVMRFVRRAFLGTGISPQEYMSRVTERIDFLKQKVCAWASRIRRYKRRVDRYSQNRMFQSDERWVYRAWERPEQNVIDGRRPDDFATITFWRNIWSVPVSHTEGDWMRDVERVCEAIPEMEKVVISPADVAKAVRPLPNWKSPGPDGLQNFWLKWFSNSHAPLASQFQSTLESGSLPEYLTTGVTHLLHKTGNPVEPKNYRPITCLSTVYKLLTSILRAKINRHIENNLIMSASQNGCRNGSRGTKELLLIDMAISQQARRSRKDLSTCWIDYKKAYDSVPHTWLMRVLELYKVDMTLRTFLESCMRQWKTVLRYPGCRPIQGNDEPIRIKRGIFQGDSLSPLWFCLALNPLSTLLEESGLGYRLRRGGQAISHLLYMDDLKLFAPSNLQLMELLKVTETFSSAIRMEFGVDKCAAMHVKRGEIMESEEIQLPDSIHLRSLSSTETYRYLGMSEALGINNADMKQSLKERFFGRLKKVLNSLLSGGNKVRAFNGWVMPVLMYSFGILKWTQTELDALDRRVRTLLTANRMHHPRSSVMRLYISRKCGGRGFLNAKTLHNREVCSLREYFLKTDVGMHRDVVAVDKGLTPLSMAKEDWRKPVILTTDDRKEIWKGKELHGRFYRALHEPDVDFLASVAWLRFSDLFGETEGFICAIMDEVILTNNYRRYIMKDGTVDVCRACHRPGESIRHIISGCSRLANGEYLHRHNQVARIIHQQLALKYNLVDSEVPYYKYVPDPVLENDHVTLYWDRSIITDRTIVANKPDIVVIDRLARRAVIVDVTIPHDENLVKAEKEKQIKYLDLAHEVVDMWNVDSAVIVPMVVTANGLIAKSFDDHLSKLSLRGWIKGLIQKAVLLDTARIVRRFLSLEP

SEQ ID NO: 29907 - protein, 1209 aa, Xestia xanthographa
MITRSRAKQHQEAHPPSPGSSLSSASQPPGRATPVSIVSPVAAVASSSSDEFFSPPSTPSPSPRRGRRRGRGRPPAGLGPRGQQAPSRVPAAGGNVSRIRWTQSMNENVMRAYYGATEGGINLTAYRGRMLSLFQVLGPGVSASAQRLSDQVRVIQRNHMLDDTVLDRLRSESRSNLVTPASPLIAVQVQNVSSAPPRSDRDGEEDDSEVISVSTQCNAQLRSALESAFREYRSTPPELRPRLPRLPMHNKNKALMCALDSQLSNCFDSSKDLTDTHSILYCGAVAACRVAHVKFPNNDGATRPKLAVPAWQCRIERRIGEARALIGKLICFREGNTRPRVMRFVRRAFSGTDISFRDYLARVTERIDSLKQKICAWASRIRRYKRRVERYTQNRTFQSDERWVYRAWERPDQGVTDTRLPDDSAMYSFWRNIWSVPVSHTEGDWTREVEQACDPIPEMGAIIISPQDVARAVRPLPNWKSPGPDGLHNFWIKWFQGSHARLASQFQSALESGSLPQFLTTGITHLLHKSGSAAEPKNYRPITCLPTVYKVLTSILRAKINQHIDSNSIMSASQNGCRNGSRGTKELLLIDMAISQQVRRSRKNLSTCWIDYKKAYDSVPHTWLMRVLELYKIDATLRTFLMSCMGHWRTVLRYPGCRQIQGNSEPIRIERGIFQGDSLSPLWFCLALNPLSTLLERSGLGYLLRRDGQVISHLLYMDDLKLFAPNNFQLMKLLKVTETFSSAIRMEFGVDKCAVMHVKRGEIMESEGTQLSDSIHLRSLSSTETYKYLGMSEALSINTANMKQSLRERFFGRLNKVLGSLLSGGNKVRAFNGWVMPVLMYSFGILKWTQTELDALDRRVRTLLTANRMHHPRSSVMRLYISRKCGGRGFLSAKTLHNREVYSLREYFLEAEGEMHRDVVSVDKGLTPLSLANGNWRKPKVLDTNDRKVEWQGKELHGRFYRALHGPDVDFLASVSWLRFGDLFGETEGFICAIMDEVMMTNNYRKYIVKDGTVDICRACHRPGESIRHIISGCSSLANGEYLHRHNLVARIIHQQLALKYNLVESEVPYYKYAPDPVLDNGHITLYWDRPITTDRTVVANRPDIVVIDRLERRTMIVDITIPHDENLVKAEKDKQFKYLDLAREVVDMWDVGTAVIVPIVVSANGLIAKSLDQHLRRLSLGSWIKGLIQKAVLLDTARIVRRFLSQEP

SEQ ID NO: 29908 - protein, 1209 aa, Xestia xanthographa
MITRSRAKQHQEAHPPSPGSSLSSASQPPGRATPVSIVSPVAAVASSSSDEFFSPPSTPSPSPRRGRRRGRGRPPAGLGPRGQQAPSRVPAAGGNVSRIRWTQSMNENVMRAYYGATEGGINLTAYRGRMLSLFQVLEPGVSASAQRLSDQVRVIQRNHMLDDTVLDRLRSESRSNLVTPASPLIAVQVQNVSSAPPRSDRDGEEDDSEVISVSTQCNAQLRSALESAFREYRSTPPELRPRLPRLPMHNKNKALMCALDSQLSNCFDSSKDLTDTHSILYCGAVAACRVAHVKFPNNDGATRPKLAVPAWQCRIERRIGEARALIGKLICFREGNTRPRVMRFVRRAFSGTDISFRDYLARVTERIDSLKQKICAWASRIRRYKRRVERYTQNRTFQSDERWVYRAWERPDKGMTDTRLQDDSAMYSFWRNIWSVPVSHTEGDWTREVEQACDPIPEMGAIIISPQDVARAVRPLPNWKSPGPDGLHNFWIKWFQRSHARLASQFQSALESGSLPQFLTTGITHLLHKSGSAAEPKNYRPITCLPTVYKVLTSILRAKINQHIDSNSIMSASQNGCRNGSRGTKELLLIDMAISQQVRRSRKNLSTCWIDYKKAYDSVPHTWLMRVLELYKIDATLRTFLMSCMGHWRTVLRYPGCRQIQGNSDSIRIERGIFQGDSLSPLWFCLALNPLSTLLERSGLGYLLRRDGQVISHLLYMDDLKLFAPNNFQLMKLLKITETFSSAIRMEFGVDKCAVMHVKRGEIMESEGTQLSDSIHLRSLSSTETYKYLGMSEALGINTADMKQSLRERFFGRLNKVLGSLLSGGNKVRAFNGWVMLVLMYSFGILKWTQTELDALDRRVRTLLTANRMHHPRSSVMRLYISRKCGGRGFLSAKTLHNREVYSLREYFLEAEGEMHRDVVSVDKGLTPLSLANGNWRKPKVLDTNDRKVEWQGKELHGRFYRALHGPDVDFLASVSWLRFGDLFGETEGFICAIMDEVMMTNNYRKYIVKDGTVDICRACHRPGESIRHIISGCSSLANGEYLHRHNLVARIIHQQLALKYNLVESEVPYYKYAPDPVLDNGHITLYWDRPITTDRTVVANRPDIVLIDRLERRTMIVDITIPHDENLVKAEKDKQFKYLDLAREVVDMWDVGTAVIVPIVVSANGLIAKSLDQHLRRLSLGSWIKGLIQKAVLLDTARILRRFLSQEP

SEQ ID NO: 29909 - protein, 961 aa, Limenitis camilla
MHKKNRALVCTLDSLLPMYFESSEDLKDTHSILFCAAVAVCRVAHVKLVNTETTRPKPDVAAWQSRIERRIDETRVLIGKLYSFREGNTRPRVMRFVRRAFSGTEICPPEYMARVTERIDTLKQKIYAWANRIRRYRRRVDRYSQNRMFQKDQKWVYRTWERPDQNVDDIHRPDDDDTNKFWRSIWSVSVDHTEGDWMREIRQTREPLQAMEHISITCKDVADAVRYVPNWKSPGPDGLHNFWLKWLRSSHACLASQFQSALESGSLPQFLTTGITHLLHKSGSTTEPKNYRPITCLPTVYKLLTSILRDKIDSHITKNAIMSVSQNGCRNRSRGTKELLLIDMTISQQVRRSRKDLSTCWIDYKKAYDSVPHGWLMRVLELYKVDATLCAFLGSCMRQWRTVLRYPGCRPIQGNNEPIRIKRGLFQGDSLSPLWFCLALNPLSTLLENSGLGYRLRRGGQVISHLLYMDDLKLFVPTKLQLIELLKITKTFSNSIRMEFGVDKCAVMHVKRGKIEESEGIQLSDSVNLRSLSADETYKYLGMSEALGIIEIDMKQSVRERFLARLRKVLKSLLSGGNKVRAYNGWVMPILMYSFGILKWTQKELDDLDRKVRALLTTYRMHHPRSSVMRLYIPRKCGGRGFLNAKTLHNREVCNLREYFLQTDVGMHRDVVAMDKGLTPLSLAKENWRKPIVLSTDNRKEVWKSKELHGRFYRALHGDEVDFKASVSWLRFSNLFGETEGFVCAIMDEVIMTRNYRRYIVRDGTVDICRACHSSGESLRHIISGCPRLANGEYLHRHNQVAKIIHQQLALRYGLVESEVPYYRYAPDPVLENGHVTLYWDRTIITDRTIIANKPDIVVIDRSERCTMIVDVTIPHDGNLVKAEKDKQMKYLDLAHEIVDMWDVDSAVVVPIVVTANGLIAKSLDQHLKRLALDGWVKGLMQKAVLLDTARIVRKFLSLEP

SEQ ID NO: 29910 - protein, 1029 aa, Abrostola tripartita
MDISPDLVIKHTYIQFEIIKPCDMEADDRATTVSTQYNDILRSTLEDTIWEYRVSPPGLRPRLPRLPMHNKNKAMISALDSLLSSYFEGSEDLCDTHSILYCAAATACRVANVKCFDSSTATRSKPAVPAWQCRIESRITEARTLIGKLTAFREGNIRPRVMRFVRRAFAGVDINPREYATRATERIDFYKQKVYAWASRIRRYKRRVDRFSQNRIFNQDQRWVYRNWERSAQGVSDGHLPDDDVTNAFWRSIWSVPVNHTEGSWMLDVEQSCESIPEMGTITISPQDVASAVRPMSNWKSPGPDGLHNFWIKWLRSSHGCLASQFQSAIEVGSLPQFLTTGSTHLLHKTGSTTDPKNFRPITCLPTIYKLLTSILRAKITKHIDDNNIMSASQNGCKNGSRGTKELLLIDMTICQQVRRSKKDLSTCWIDYKKAYDSVPHTWLMRVLELYKIDTTLRTFLLSCMRQWRTVLHYPGCRDIQQDGEPIRIERGIFQGDSLSPLWFCLALNPLSTLLENSGLGYSLRRRSQVISHLLYMDDLKLFAPSRFQLIKLLKITEAFSNSIRMEFGVDKCAVMHVKRGGIIESQGIQLSDSINLRSLSATETYKYLGMSEALGINVVDMKQSLKERFFGRLNKVLKSLLSGGNKVRAFNGWVMPTLMYSFGILKWTQTELDALDRRVRTLLTSNRMHHPRSSVMRLYIPRKCGGRGFLNAKTLHNREVCSLREYFLRAEVGMHREVVAVDKGLTPLFLAKENWCKPVVLSVNDRRDVWQSKELHGRFYKALHGPNVDLLSSVSWLRFGDLFGETEGFVCAIMDEVIMTNNYRKYILKDGTVDICRACHRPGESLRHIMSGCSRLANGEYLHRHNQVARIIHQQLALKYKLVDSEMPYYRYVPDPVLENDHITLYWDRSIITDRTIVANKPDIVVIDRLERRAMIVDITIPHDENLVKAERDKQIKYLDLAHEVVDMWEVDSAIIVPIVVSANGLKAKSLDQHLKRLTLGGWVKGLMQKAVLLDTARIVRRFLSLEP

SEQ ID NO: 29911 - protein, 1202 aa, Griposia aprilina
MLTRSARTRARPPPPDSSLSSASPPSVSSPIVSAVTTPVAVVASSSSDEYFSPPTSPTPVRRQGRGRPPRSLGLRGHPAPSRVPAAGGCVQRMKWTQSMNENVMRAYYRSTEGGTNLTAYRDRMLSLFQELEPTINVSAQRLSDQVRVIQRSHRLDDAALDRLRSELNNHIISTPAQTAVQASTIDEIQPRSNHGVEVEDDRVASVSSQCNARLRSALEDAFREYRSTPTELRPRLPRLPMHKKNRALVCALDSQLKNVFESSENLIDTHSILYCAAVAACRLANVRFPNCDGATRPKPAVPAWQCRIKRRIDGARVLIGKLHCFREGNNRPRVMRFVRRAFSGTGISPREYMSHATERIDFLKQKVCTWASRIRRYKRRVDRYTQNRMFQSDERWVYRAWERPEQNVTDECRPDDATTSTFWRSIWSVPVCHVEADWMRDVGRACETVPEMDAVLITPLDVARAVRPLPNWKSPGPDGLHNFWLKWLISSHACLASQYQSSLESGSLPQFLTTGVTHLLHKSGSPTDPKNYRPITCLSTVYKLLTSILRAKINTHIESNSILSASQNGCRNGSRGTKELLLIDMAISQQVRRSRRDLSTCWIDYKKAYDSVPHTWLMRVLELYKIDTTLRTFLRSCMGQWRTVLRYPGCRQIQANDEPVWIKRGIFQGDSLSPLWFCLALNPLSTLLEDSGLGYRLRKDDQVISHLLYMDDLKLFAPNKLQLMELLKVTETFSSTIRMEFGADKCAVMHVKRGEVMEPEGIQLSDSIHLRSLSSSESYKYLGMSEALGINVADMKQSLRDRFFGRLKKVLISLLSGGNKVRAFNGWVMPVLMYSFGILKWTQTELDALDRRVRTLLTANRMHHPRSSVMRLYIPRKCGGRGFLNAKTLHNREVCSLREYFLKAEVGMHRDVVAVDKGFTPLSMAKENWRKPVVLTTDDRKEVWQSKELHGRFYRALHEPGVDFLASVSWLRFGDLFGETEGFVCAIMDEVILTNNYRRHIMKDGTVDMCRACHRPGESIRHIVSGCSRLANGEYLHRHNQVARIIHQQLALKYKLVDSEVPYYKYVPDPVLENDHITLYWDRSIITDRTIVANKPDIVVIDRLARRTMIIDITIPHDENLVKAEKEKQIKYLDLAHEVVEMWNVSSAVIVPIVVSANGLMAKSLDQHLSRLSLDGWVKGLIQKAVLLDTARIVRRFLSLEP

SEQ ID NO: 29912 - protein, 1202 aa, Griposia aprilina
MLTRSARTRARPPPPDSSLSSASPPPVSSPIVSAVTTPVAVVASSSSDEYFSPPTSPTPVRRQGRGRPPRSLGLRGHPAPSRVPAAGGCVQRMKWTQSINENVMRAYYRSTEGGTNLTAYRDRMLSLFQELEPTINVSAQRLSDQVRVIQRSHRLDDAALDRLRSELNNHIISTPAQTAVQASTIDEIQPRSNHGVEVEDDRVASVSSQCNARLRSALEDAFREYRSTPTELRPRLPRLPMHKKNRALVCALDSQLKKLFESSENLIDTHSILYCAAVAACRLANVRFPNCDGATRPKPAVPAWQCRIERRIDGARVLIGKLHCFREGNNRPRVMRFVRRAFSGTGISPREYMSHATERIDFLKQKVCAWASRIRRYKRRVDRYTQNRMFQSDERWVYRAWERPEQNVTDECRPDDATTSTFWRSIWSVPVCHVEADWMRDVRRACETVPEMDAVLITPLDVARAVRPLPNWKSPGPDGLHNFWLKWLISSHACWASQYQSSLESGSLPQFLTTGVTHLLHKSGSPTDPKNYRPITCLSTVYKLLTSILRAKINTHIESNSIMSASQNGCRNGSRGTKELLLIDMAISQQVRRSRRDLSTCWIDYKKAYDSVPHTWLMRVLELYKIDTTLRTFLRSCMGQWRTVLRYPGCRQIQANDEPVWIKRGIFQGDSLSPLWFCLALNPLSTLLEDSGLGYRLRKDGQVISHLLYMDDLKLFAPNKLQLMELLKVTETFSSTIRMEFGVDKCAVIHVKRGEVMEPEGIQLSDSIHLRSLSSSESYKYLGMSEALGINVADMKQSLRERFFGRLKKVLISLLSGGNKVRAFNGWVMPVLMYSFGILKWTQTELDALDRRVRTLLTANRMHHPRSSVMRLYIPRKCGGRGFLNAKTLHNREVCSLREYFLKAEVGMHRDVVAVDKGFTPLSMAKENWRKPVVLTTDDRKEVWQSKELHGRFYRALHEPGVDFLASVSWLRFGDLFGETEGFVCAIMDEVILTNNYRRHIMKDGTVDMCRACHRPGESIRHIVSGCSRLANGEYLHRHNQVARIIHQQLALKYKLVDSEVPYYKYVPDPVLENDHITLYWDRSIITDRTIVANKPDIVVIDRLARRTMIIDITIPHDENLVKAEKEKQIKYLDLAHEVVEMWNVSSAVIVPIVVSANGLMAKSLDQHLSRLSLDGWVKGLIQKAVLLDTARIVRRFLSLEP

SEQ ID NO: 29913 - protein, 1040 aa, Griposia aprilina
MISHPKKKNKSIHVIAPSSQTVVVLPQSKTSRADEESDDRATNVSTQCNDELRSALEDAIREYRFISPELRPRLPRLPMHNKNRALVVALDAQLSNYFDDCVDLTDTHSILYCAAVAACRVAHIKFANESRATRPKPAVPAWQCRIERRIGGARALIGKLICFREGNTRPRVMRFVRRAFAGTDISPQDYMSCPTERIDFLKQKVYAWANRIRRYKRRVERYTQNRTFQRDERWIYRGWERPDQGVADTCLRDDDAMCSFWRNIWSAPVSYTEGDWTREVERACDPIPEMGAITICPQDVTRAVRPLPNWKSPGPDGLHNFWIKWFGRSHARLAAQYQVALESGSLPQFLTTGVTHLLHKSGSTAEPKNYRPIACLPTVYKVLTSILRDKINKHIYTNYIMSPSQNGCRNGSRGTKELLLIDMAISQQVRRSRKDLSTCWIDYKKAYDSVPHTWLMRVLELYKVEATLRTFLMSCMGQWRTVLRYPAFRNTQRNSEPIRIERGIFQGDSLSPLWFCLALNPLSTLLEDSGLGYRLRRGGQVISHLLYMDDLKLFAPNNSQLMDLLKVTETFSSAIRMEFGVDKCAVMHVKRGEILESVGTQLSDSINLRALSASETYKYLGMSEALGINGTDMKQSLKDRFFGRLKKVLNSLLSGGNKVRAFNGWVMPVLMYSFGILKWTQTELDALDRKVRTLLTANRMHHPRSSVMRLYIPRKCGGRGFLNAKTLHNREICGLREYFLEADVGMHRDVVTVDKGLTPLSLAKENWRKPVVLDTNDRMEVWQSKELHGRFFRALHGPDVDQLASVARLRFSDLFGETEGFVCAIMDEVMMTNNYRRFIVKDGTVDICRACHRPGESIRHIISGCSRLANEEYLHRHNLVARIIHQQLALKYSLVESEVPYYRYVPDPVLENGHITFYWDRSIITDRTIVANKPDIVMVGRLERRAMIVVITVPHDGNLVKAEKDKQIKYLDLAREVVDMWDVDSAIIVPIVVTANGLIAKSLDQHLRRLSLGSWIKGFIQKAVLLDTARIVRRFLSLEP

SEQ ID NO: 29914 - protein, 867 aa, Eilema sororculum
MHFVNRVFSGTGVSPFDYTSRVTERIDFLKQKVYAWANRIKRYKKRCDRYTLNRTFHRDERWVYRNWERADSVGDEHFPDVAATNTFWRNIWSVPVAHTEGDWVRKVKRSCEAIETMEPVIISEDDIACVVRSLPNWKAAGPDGLHNFWLKWLRSSHARLAFQFQSALESGSLPSFMTTGITRLLFKSGCAMNPKNYRPITCLPTVYKLLTSVLRVKIASHITRNSILSCSQNGYRSGARGTKELLIIDTAVNQQVRRNRRDMATCWIDYKKAYDSVPHTWLLRVLELYKVDTTLCTFLEACMGQWSTVLRYPGCRHIPDDGELIKIERGIFQGDSLSPLWFCLALNPLSTILEDSGLGYCLRRGSQVISHLLYMDDLKLFAPNSRQLMELLKVTETFSTSIRMEFGVDKCAVMHVKKGEIVESEGIELSDSTKLRSLSVNDTYKYLGISQALGVNESDMKQSLRERFFCRLKKVLKSLLSGGNKVRAYNDWVIPVLTYSFGILRWTQTELEALDRRVRTLLTPYRMHHPRSSVMRLYNPRKFGGRGFLNIKTLHNREICNLREYFLKVNVDVHRDVVAVDRGLTRLALAKENWRKPAILSINDRKEVWKSKELHGRFHRALYGPDVDLKASVSWLRFGDLFGETEGFVCAITDEVVMTNNYRRYILKDGTVDICRACHRPGESLRHIISGCSRLANGEYLHRHNQVARIVHQQLALKYKLVDSEVPYYRYVPDPVLDDGRVTLYWDRSVITDRTIVANKPDIVVIDRLERRAIIIDVTIPHDENLVKAEKDKQIKYLDLAHEVVDMWNVDSAIIVPIVVSVHGLIAKSLDQHLKRLALDSWVKGLMQKAVLLDTARIVRRFLSLEP

SEQ ID NO: 29915 - protein, 1202 aa, Amphipyra tragopoginis
MLTRSRARARDNQAHLPPPDSSPSSASQQQGLNPASPAAAVASSSSDEYYSPPSSPPPARRRGGTRPPVGLGLRGPLASDRVPAPGGIVPRMKWTQKMNESVMRAYYGATEGGTNLTAYRSRMLSLFQVLEPAVNVSAQRLSDQVRVIQRGHMLDDTVLDRLRSEVQSSPVISPSSQVLEQQQNLAAALPRPNRADEEDDDRAANVSTQCNDELRSALEDAMREYRYTRSDLRPRIPRLPMHRKNRALVCALDSLLSNYFDGSEDLGDTHSILYCAAVAACRVAHVKFTDNERATRPKNAVPAWQCRIERRISEARALIGKLVCFREGNTRPRVMRFVRRAFSGTDVSPREYMSRVTERIDFLKQKVYAWANRIRRYRRRVDRYTQNRLFQSDERWVYRTWERPDQRVGDTRLPDDDVMNTFWRNIWSVPVAHTEGDWMQEVQRACEPIQEMGDIIISPQDVASAVRPMSNWKSPGPDGLHNFWLKWLRSSHARLASQFQSSLESGSLPQFLTTGVTHLLHKSGSTAEPKNYRPITCLPTVYKVLTSILRTKINNHIDNNSIMSASQNGCRNGSRGTKELLLIDMAISQQVRRSRKDLSTCWIDYKKAYDSVPHTWLMRVLELYKVNTTLCAFLTSCMGQWRTVLRYPGCRQIQGIGEPIRIERGIFQGDSLSPLWFCLALNPLSTLLEGSGLGYRLRRGGQVISHLLYMDDLKLFAPNNLRLLELLKVTETFSNSIRMEFGVDKCAVMHVKRGRIMESVGTQLSDSIQLRSLSSTETYKYLGMSEALGVNETDMKQSLKERFFGRLKKVFNSLLSGGNKVRAFNGWVMPVLMYSFGILKWTQTELDALDRRVRSLLTANRMHHPRSSVMRLYIPRKCGGRGFLNAKTLYNREVCSLREYFSQADVGMHRDVVAVDKGFTPLSLAKENWRKPVVLDTNGRREVWRSKELHGRFYRALHGPDVDFLASVAWLRFGDLFGETEGFVCAIMDEVMMTNNYRKYIVKDGTVDICRACHCPGESIRHIVSGCSRLANGEYLHRHNLVARIIHQQLALKYNLVDAEVPYYKYVPDPVLENGHVTLYWDRSIITDRTIVANKPDIVVIDRSERLTMIVDITVPHDENLVKAEKDKEIKYQDLAHEVVAMWDVDSAIIVPIVVTANGLIAKSLDQHLKRLSLGSWIKGLIQKAVLLDTARIVRKFLSLRP

SEQ ID NO: 29916 - protein, 1202 aa, Amphipyra tragopoginis
MLTRSRAKATRPPSSASSLSSASQPPEPAPTVSDVTPAAAVASSSSDEYFSPPTSPPPPRRRGRGRPPASIGPRGPPASDRVPAPGGSVQRMRWTQAMNENCMRAYFGATEGGTNLTAYRGRMLSLFQALEPAVNVSAQRLSDQVRVIQRDHRLDGAALDRLRSEMQSSHVAPLQSQTAAQSQVPSVVAPRSIPADEESDDRVTNVSTQSNEQLRSALELAIREYRSTLPDLRPRLPRLPMNKKNKALMCALDSLLSSYFDGSEDLADTHSILYCAAVAACRVAHVKVDNNDRATRPKPAVPAWQCRIERRIGGARALIGKLICFREGNTRPRVMRFVRRAFSGTDTSPRDYMSCVTERIDFLKQKVYAWANRIRRYKRRVERYTQNRMFQRDQRWVYRAWERADQGVGDAHLPDDDATNSFWRSIWSVPVSHTEGDWMRDVERVCEPILDMGAISISPQDVASAVRPLPNWKSPGPDGLHNFWLKWLRSSHARLASQFQSSLETGTLPQFLTTGVTHLLHKSGSTAEPKNYRPITCLPTVYKLLTSILRCKINSHIENNSIMSASQNGCRNGSRGTKELLLIDMAISQQVRRSRKDLSTCWIDYKKAYDSVPHTWLMRVLELYKVNTTLCAFLTSCMGQWRTVLHYPGCRQIQGIGEPIRIERGIFQGDSLSPLWFCLALNPLSTLLEGSGLGYRLRRGGQVISHLLYMDDLKLFAPNNLQLLDLLKVTETFSNSIRMEFGVDKCAVMHVKRGRIMESVGTQLSDSIQLRSLSSTETYKYLGMSEALGINEADMKQSLRERFYGRLKKVLKSLLSGGNKVRAFNGWVMPVLMYSFGILKWTQTELDALDRRVRTLLTAYRMHHPRSSVMRLYIPRKCGGRGFLNAKTLHNREVCSLREYFSQADVGMHRDVVAVDKGLTPLSLAKENWRKPAVLDTNGRKDVWRSKELHGRFYRALHGPDVDFLASVAWLRFGDLFGETEGFVCAIMDEVMMTNNYRKYVVKDGTVDICRACHCPGESIRHIVSGCSRLANGEYLHRHNLVARIIHQQLALKYNLVDAEVPYYKYVPDPVLENGHVTLYWDRSIITDRTIVANKPDIVVIDRSERRAMIVDITVPHDENLVKAENDKKIKYLDLAHEVVDMWDIDSAVIVPIVVTANGLIAKSLDQHLMRLSLGGWIKGLIQKAVLLDTARIVRKFLSLEP

SEQ ID NO: 29917 - protein, 1202 aa, Amphipyra tragopoginis
MMLTRSQARARNYYAHPPPPDSSPSSASQQQELDPAPPAAAVASSSSDEYFSPPSSPPPVRRRGGARPPACLGPRGQPAPNRVPAAGGNVSRMRWTQSINENVMRAYYGATEGGINLTAYRDRMLSLFQVLEPAINVSTQRLSDQVRVIQRNRRLDDTVLERLRSEVQNNRTVTTPLQAAEQPQLPAVSPRPIHVDEAGDGEVIVVSNQCSDELRSALEGAILEYRATPPELKPRLPRLPMHKKNRALVCALDSLLSNYFDGSEDLGDTHSILYCAAIAACRVANVKLTENERATRPKPAVPAWQYRIERRIDGARALIGKLICFREGNTRPRVMRFVRRAFSGTDISPRDYMSRVTERIDFLKQKVYAWANRIRRYKRRVERYTQNRTFQSDQRRVYRTWERSVPGVGDMRLPDDDAMSSFWRSIWSVPVAHAEGDWTRDIERACEPIPEMGEITISPQDVATAARPLPNWKSPGPDGLHNFWLKWLRSSHARLASQFQSSLESGSLPQFLTTGVTHLLYKSGSAAEPKNYRPITCLPTVYKLLTSILRVKISNHIDNNSILSPSQNGCRNGSRGTKELLLIDMTISQQVRRSRKDVSTCWIDYKKAYDSVPHTWLMRVLELYKINTTLRTFLMSCMGQWRTGLRYPGCRQIRGRGEPIRIERGIFQGDSLSPLWFCLALNPLSTLLEGTGLGYRLRREGQVISHLLYMDDLKLFAPTNLQLMELLKVTENFSNSIRMEFGVDKCAVMHVKRGRIMESEGIQLSNSIQLRSLSPTETYKYLGMSEALGIREADMRQSLMERFFGRLNKVLKSLLSGGNKVRAFNGWVMPVLKYSFGILKWTQTDLDALDRRVRALLTTHRMHHPRSSVMRLYIPRKCGGRGFLNAKTLHNREVCSLREYFLQAEGEMHRDVVAVDGGLTPLALVKENWRKPTVLSTNDREEVWQSKELHGRFYRALHGPDVDFSASVSWLRFGDLFGETEGFVCAIMDEVMMTNNYRKYIVKDGTVDICRACHRPGESIRHIISGCSRLANGEYLHRHNLVARIIHQQLALKYNLVESEVPYYRYVPDPVLENGHATLYWDRSIITDRTIVANKPDIVVIDRAERRTMIVDITVPHDENLVKAEKEKQIKYLDLAHEVVSMWDVDSAVIVPIVVTANGLIAKSLDQHLMRLSLGGWIKGLIQKAVLLDTARIVRRFLSLEP

SEQ ID NO: 29918 - protein, 1101 aa, Noctua pronuba
MLTRLRAKQLAHPPSPGSSFSSASQPPGHATSMSTLSPVAAVASSSSDEFFSPPSTPPPPQRRRGRGRPPAGLGPRGQQAPNRVPAAGGNVSRMRWTQSINEQVMRAYYGATEGGSNLTAYRGRMLSLFQVLEPTVSVSAQRLSDQVRVIQRNHMLDDTVLDRLRSESRSNPVTPASPMIAGLLQSATSTSPRSDHGGEEDDSEVISVSTQCNAQLRSALEGAFREYRSTPPELRPRLPRLPMHKKNKALMCALDSQLSNYFDSSKDLTDTHSILYCGAVAACRVAHVKFPNNDRATRPKLAVPAWQCRIERRIGEARALIGKLICFRESNTRPRVMRFVRRAFSGIDITFRDYLARVTERIDFLKQKICAWASRIRRYKRRVERYTQNRTFQSDERWVYRAWERPDQGVTDTRLPGDDAMCLFWRSIWSVPVSHTESDWTREVEQACDPIQEMGAVIISPQDVACAVRPLPNWKSPGPDGLHNFWIKWFQRSHACLASQFQLALESGSLPQFLTTGITHLLHKSGSTAEPKNYRPITCLPTVYKVLTSILRAKINQHIESISIMSASQNGCRNGSRGTKELLLIDMAISQQVRRSRKDLSTCWIDYKKAYDSVPHTWLMRVLELYKVDATLRTFLMSCMRHWRTVLRYPGCRQIQRNSEPIRIERGIFQGDSLSPLWFCLALNPLSTLLEGSGLGYRLRRGGQVISHLLYMDDLKLFAPNNLQLMKLLKVTETFSSAIRMEFGADKCAVMHVKRGEIMESVGTQLSDSIHLRSLTSTETYKYLGMSEALGINTADMKQSLRERFFGRLNKVLGSLLSGGNKVRAFNGWVMPVLMYSFGILKWTQTELDALDRRVRALLTANRMHHPRSSVMRLYIPRKCGGRGFLNAKTLHNREVCSLREYFLEADVGMHRDVVSVDKGLTPLSLANENWRKPKVLVTNDRKEVWQSKELHGRFYRALHGPDVDFLASVSWLRFGDLFGETEGFVCAIMDEVMMTNNYRKYIVKDGTVDICRACHRPEESIRHIISGCSRLANGEYLHRHNLVARIIHQQLALKYNLVESEVPYYKYAPDPVLDNGNITLYWDRSIITDRTIVANKPTLW

SEQ ID NO: 29919 - protein, 1194 aa, Autographa pulchrina
MLTRSRTRRPARPPPPDSSPSSASQLPDHVPAPAPAVASSSSDEYYSPPTSPTPVRRQGRRRPPSSLAPAGQPASNRAPAPGGDVRRMKWTQGINENVMRAYYGATEGGTNLTAYRARMLSLFQSLKPGVSVSAQRLSDQVRVIQRNHRLDDSTLDRLRSEIQSSPATNTLPPAAAPVSGAPHTAPSDGEEDDGAMTVSTQCSELIRSTLEDAIRDYRTSPPDQRPRLPRLPMHNRNKAIMGALDSLLPIYFESSEDLRDTHSILYCAALTACHVANVAICYNNIAARPKPAVPAWQCRIEQRVAEARTLIAKLIAFKQGNSRPRVMRFVRRAFAGTDISSSEYTARVTERIDLFKQKVCAWASRIRRYKRRVERFYLNRMFQKDQRWVYRAWERPASGVDGGCLPDGDATNSFWRSIWSVPVSHSEGGWMREVEQVCEPIQEMGAISISPQDVANAVRPMANWKTPGPDGLQNFWLKWLRSSHGCLASQFQSAVESASLPQFLTTGSTHLLHKTGSATDPKNYRPITCLPTVYKLLTSILRAKINEHVVSFSIMSAFQNGCKSGSRGTKELLLIDTAICQQVRRSKKDLSTCWIDYKKAYDSVPHTWLMRVLELYKINATLRAFLVSCMGQWSTVLHYPGCRDIQQGGEPIRIERGIFQGDSLSPLWFCLALNPLSTLLENSRLGYSLRRGSQVVSHLLYMDDLKLFANSGLQLMKLLKITESFSNSIRMEFGVDKCAVMHVKRGGVVESQGIQLSDSINLRSLSATETYKYLGMSEALGINAADVKQSLQARFFGRLNKVLKSVLSGGNKVRAFNGWVMPVLMYSFGVLKWTQTELDALDRRVRTLLTANRMHHPRSSVMRLYIPRKCGGRGFLNAKTLHNREVCNLREYFLQVDVGMHRDVVVVDKGLTPLSLGKENWHKPVVLSVKDREVVWQSKELHGRYYRTLHGSDVDFLASVAWLRFGDLFGETEGFVCAIMDEVIMTNNYRKYIIKDGTVDLCRACHCPGESLRHIISGCSRLANGEYLHRHNQVARIIHQQLALRYKLVESEVPYYRYVPDPVLESGRVTLYWDRSIITDRTIVANKPDIVVIDRSERRTIIVDITIPHDENLVKAEKEKQLKYLDLAHEVVDMWEVDSAIIVPIVVTANGIIAKSLDQHLKRLSLGAWVKGLIQKAVLLDTARIVRRFLSLEP

SEQ ID NO: 29920 - protein, 1080 aa, Mamestra brassicae
MLSLFQDLEPTVNVSAQRLSDQVRVIQRNHRLDDAALDRLRSEVLNNLIISTPTQTAVQAPVNDAITPRPNNVSHEVDDRVVTVSSQCNDRLRSALEDALREYRSTPTELRPRLPRLSMHKKNKALVCALDSLLQNTFESSESLVDTHSILFCGAVAACRIANVKFPSYDEAIRPKPAAPAWQCRIERRIDEARALIGKQYCFREGNTRPRVMRFVRRAFLGTGISPRDFTSRVTERIDFLKQKVCAWANRIRRYKRRVDRYSQNRMFQSDERWVYRAWERPEQSVMDVCRPDDNTTSTFWRGIWSVPVCHTEGGWLRDVEHVCEAIPEMDTITITPLDVAKAVRPLPNWKFPGPDGLHNFWLKWYSSSHVLLASQFQSSLESGSLPQFLTTGVTHLLHKTGSPAEPKNYRPITCLSTVYKLLTSILRAKINQHIERNSIMSASQNGCRKGSRGTKELLLIDMAISQQVRRSRKDLSTCWIDYKKAYDSVPHTWLMKVLELYKIDATLRTFLESCMRQWKTVLRYPGCRPIQGSDEPVWIKRGIFQGDSLSPLWFCLALNPLSTLLEDSGLGYRLRRGGQAISHLLYMDDLKLFAPNNLRLMELLKVTETFSSSIRMEFGVDKCAVMHVKKGEIMESEGIQLSDSIQVRSLSSTETYKYLGMSEALGINGADMKQSLKERFFGRLKKVLNSLLSGGNKVRAFNGWVMPVLMYSYGILKWTQTELDTLDRRVRTLLTANRMHHPRSSVMRLYIPRKCGGRGFLNAKTLHNREVCNLRDFFLKTDVGMHRDVVAVDKGLTPLSMAKENWRKPVILTTDDRKEVWKGKELHGRFYRALHEPDVDFPASVSWLRFGDLFGETEGFVCAIMDEVILTNNYRRYIMKDGTVDVCRACHRPGESIRHIISGCSRLANGEYLHRHNQVARIIHQQLALKYQLVDSEVPYYKYVPDPVLENDHVTLYWDRSIITDRTIVANKPDIVVIDRLARRTMIIDVTIPHDVNLVKAEKEKQIKYLDLAHEVVDMWNVDSAVIVPIVVTANGLLSKSFDDHLSKLSLRGWVKGLIQKAVLLDTARIVRRFLSLEP

SEQ ID NO: 29921 - protein, 1110 aa, Mesoligia furuncula
MRWTQSMNENVMRAYYRSTEGGINLTAYRDRMLSLFQELEPTVNVSAQRLSDQVRVIQRNHRLDDIALDRLRSEVLSNHIVSTSAQTAAQASTVDAIPPRSNHVEEEDDRVDTVSSQCNVRLRSALEDALCEYRSTPTELRPRLPRLPMHKKNRALVCALDSQLKNFFESSEDLVDTHSILYCAAVAACRLANVKFPSCDGATRPKPAVPAWQRRIERRIDGTRVLIGKLYCFREGNTRPRVMRFVRRAFSGTGISPREYISRVTERIDFLKQKVCAWASRIRRYKRRVDRYTQNRMFQSDERWVYRAWERPEQNVTEVYRPDDATTSAFWCSIWSVPVCHTEAGWMRDVERVCESVPEMETVLITPSDVAKAVRPLPNWKSPGPDGLHNFWLKWLISSHTYLASQFQSSLESGSLPQFLTTGVTHLLHKSGSPAEPKNYRPITCLSTVYKLLTSILRAKINTHIESNSIMSASQNGCRNGSRGTKELLLIDMAISQQVRRSRKDLSTCWIDYKKAYDSVPHTWLMKVLELYKIDATLRTFLESCMRQWKTVLRYPGCRQIQGNDEPVWIKRGIFQGDSLSPLWFCLALNPLSTLLEDSGLGYRLRRDGQVISHLLYMDDLKLFAPNKLRLMELLKVTETFSSAIRMEFGVDKCAVMHVKRGEIMESEGIQLSDSISLRSLSSSESYKYLGMSEALGINDADMKQSLKERFFCRLKKVLISLLSGGNKVRAFNGWVMPVLMYSFGILKWTQTELDALDRRVRTLLTANRMHHPRSSVMRLYIPRKSGGRGFLNAKTLHNREVCSLREYFLKAEVGMHRDVVAVDKGLTPLSMAKENWRKPVVLSTDDRKKVWQSKELHGRFYRALHEPGVDFLASISWLRFGDLFGETEGFVCAIMDEVILTNNYRRHIMRDGTVDVCRACHRPGESIRHIISGCSRLANGEYLHRHNQVARIIHQQLALQYKLVDSEVPYYKYVPDPVLENDHVTLYWDRSIITDRTIVANKPDIVVIDRLARRTMIVDVTIPHDGNLVKAEKEKQIKYLDLAHEVVDMWNVSSAIIVPIVVSANGLMAESLDQHLSRLSLGGWIKGLIQKAVLLDTARIVRRFLSLEP

SEQ ID NO: 29922 - protein, 1026 aa, Arctia plantaginis
MKWTKSINENVMRAYYRATEVGTNLTAYRVRLVSLFQELEPAVNVSAQRLSDQVRAIQRCHLLDDAVLERIRSDIRNSLIIPSSSHTVDSVANSTPQLASYTDDIDELVESEVISVSTQYNDRIRSALEDAILEYRYLNCNDRPRLFRLPIHKRNLALVGALDSLLPEYLDNSEDLSDTHSILHCAAIAVCRVAGVKIANNVTTTRPKSTVPAWQYRIERRITETRTLIGKLISYRSGNMRPRVMRFVKQAFLGTTISPQQYMSCVTERIDFLKQKIYAWANRIRRYKKRIDRYNQNRMFQRNEKWVYRKWEEPDPCVGDRHLPDENVTNTFWRNIWSVPVTHIEGDWLQDVRRSCESITPMEPVKIDKDDVSCAVRSLPNWKSPGPDGLHNFWLKWFRSSHARLASQFQAALDSGSLPQFLTTGITHLLYKSGSVMDPKNFRPITCLPTMYKLLTSILRLKITLHINNNSIMSVSQNGCRSGTRGTKDLLIIDMTISQQVRCNRKSLATCWIDYKKAYDSVPHTWLLKVLELYKIDTTLCTFLKSCMGQWRTALRYPGCRQTAIHDVLIKIERGIFQGDSLSPLWFCLALNPLSTLLEGSGLGYRLQKDDQVISHLLYMDDLKLLASNKLQLTKLLKVTENFSNSIKMEFGVDKCAVMYVKKGVIVESEGIELLDSTKLRSLSATETYKYLGISQSLGIPESNMKQTLQERFFGRLKKVLKSLLSGGNKVRACNGWVMPVLMYSFGILRWTQTELDALDRKVRTLLTASRMHHPRSSVMRLYIPRKLGGRGLLNIKTLHNREVCNLREYFLHTDVGVHRNVVAVDTGFTPLALAKENWRRPVVLGVNDHREVWKGKELHGRFYRALNGSDIDLKASTTWLRHGDLFGETEGFVCAIMDEVIMTNNYRKYILKDGTVDICRACHRPGESIRHIISGCSRLANGEYLHRHNQEARIVHQQLALKYHLVNLEVPYYRYVPDPVFENGRATLYWDRSIITDRTIVANKPDIVLIDRLERRAMIVDIEND

SEQ ID NO: 29923 - protein, 1202 aa, Amphipyra berbera
MLTRSRTRTTEQRSARPPPPDSPLSSASQPPELGLPVTPAAAASSSSSDEYFSPPTSPRPVRRQGRGRPPNSLGPRGPPAPSRVLATGGYVQRMKWTQSINENVMRAYYGSTEGGTNLTAYRVRMLTLFQELEPAINVSAQRLSDQVRVIQRNHRLDDAALDRLRLEVQNSRAIPVPSHTAVHQLINVAPPRSDRVDGDEDDGAVTVSSQYNDRLRSALEDAIRECRANPESRPRLPRLPMHNKNRALVCALDSLLASYFESSEDLGDTHSILYCAAVAVCRVANVKFNNSERATRPKPAIPAWQCRIERRIDETRALIGKLICFREGNTRPRVMRFVRRAFSGTGISPREYTSRATERIDFLKQKVCAWASRIRRYKRRVVRYTQNRMFQCDQRWVYRAWERPDQSVSGGRLPDDDAMSSFWRSIWSVPVIHTEGDWMRDIERTCESIEEMGEIVISPQDVADAVRPLPNWKSPGPDGLHNFWIKWLRSSHARLASQFQSSLESGSLPQFLTTGVTHLLHKSGSTAEPKNYRPITCLPTVYKLLTSILRSKINTHIGNNSVLSSSQNGCRNGSRGTKELLLIDTAISQQVRRSQKNLSTCWIDYKKAYDSVPHTWLMRVLELYKINTTLRTFLRSCMGQWRTVLRYPGCQPIRGSGEPIRIERGIFQGDSLSPLWFCLALNPLSTLLEGSGLGYPLRRGGQVVSHLLYMDDLKLFAPTKLQLVDLLKVTETFSNSIRMEFGVDKCAVMHVRRGRIMESEGLQLSDSIHLRPLSTNDTYKYLGMSEGLGISEADMKQSLRERFFGRLKKVLKSLLSGGNKVRAFNGWVMPVLMYSFGILKWTQTELDALDRRVRTLLTANRMHHPRSSVMRLYIPRKCGGRGLLNAKTLHNREVCSLREFFLHADAGMHRNVVAVDKGLTPLSLARENWRKPVVLSTNDRREIWQSKELHGRFYRALHGPDVDFLASVSWLRFGDLFGETEGFVCAIMDEVIMTNNYRKYIVKDGTVDICRACHCPGESLRHIISGCSRLANGEYLHRHNQVARIIHQQLALKYNLVESEVPYYRYVPDPVLENGRITLYWDRSIITDRTIVANKPDIVVIDRSERRTMIVDVTIPHDGNLVKAEKDKQIKYLDLAHEVVNMWDVESATIVPIVVSANGLMAKSLDKHLMRLSLGGWIKGLIQKAVLLDTARIVRRFLSLEP

SEQ ID NO: 29924 - protein, 1203 aa, Eupsilia transversa
MLTRSAVRRARLPPPDSPLSSASPPPVPSPIVSAVSTPAAVVASSSSDEYFSPPTSPTPVRRQGRGRPPKSLGLRGQPAPSRVPAAGGCVQRMRWTQSMNENVMRAYYGSTEGGINLTAYRVRMLSLFQELEPTVNVSAQRLSDQVRVIQRNHRLDDAELDRLRSEVLSNHIIPSPAQTAELATPSNVIPPRSNRGLEQEDDRVATVSSQCNDRLRNALEDAFREYRYTPTELRPRLPRLPMHKKNRALVCALDSQLKNFFESSEDLIDTHSILYCAAVAACRLANVKFPNCDAATRPKPAVPAWQCRIERRIDGARVLIGKLYCFREGNTRPRVMRFVRRAFLGTGISPQEYMSRVTERIDFLKQKVCAWASRIRRYKRRVDRYTQNRMFQSDERWVYRAWERPEQNVADVCRPDDAATSAFWRSIWSVPVCHAEAGWMHGVERVCEAIPEMEAVIITPLDVARAVRPLPNWKSPGPDGLHNFWLKWLISSHTRLASQFQSSLESGSLPQFLTTGVTHLLHKSGSPAEPKNYRPITCLSTVYKLLTSILRAKINSHIDSHSIMSASQNGCRNGSRGTKELLLIDMAISQQVRRSRKDLSTCWIDYKKAYDSVPHTWLMRVLELYKIDATLRTFLMSCMGQWRTVLRYPGCRQIQGNDEPVWIKRGIFQGDSLSPLWFCLALNPLSTLLEESGLGYRLRRGGQVISHLLYMDDLKLFAHNKLRLMELLKVTETFSSAIRMEFGVDKCAVMHVKRGEIMESEGTQLSDSIHLRSLSSTESYKYLGMSEALGINVADMKQALKERFFGRLKKVLISLLSGGNKVRAFNGWVMPVLMYSFGILKWTQTELDALDRRVRTLLTANRMHHPRSSVMRLYIPRKCGGRGFLNAKTLHNREVCSLREYFLKTEEGMHRDVVAVDKGLTPLSMAKENWRKPVVLTTDDRKEVWQSKELHGRFYRVLHEPGVDFLASVSWLRFGDLFGETEGFVCAIMDEVILTNNYRRHIMKDGTVDVCRACHRPGESIRHIISGCSRLANGEYLHRHNQVARIIHQQLALKYKLADSEVPYYKYVPDPVLENDHVTLYWDRSIITDRTIVANKPDIVVIDRLARRAMIVDVTIPHDENLVKAEKEKQIKYLDLAHEVVDMWNVSSAIIVPIVVTANGLMAESLDQHLLRLSLGGWIKGLIQKAVLLDTARIVRRFLSLQP

SEQ ID NO: 29925 - protein, 1202 aa, Amphipyra tragopoginis
MLTRSRARARDNQAHLPPPDSSPSSASQQQGLNPASPAAAVASSSSDEYYSPPSSPPPARRRGGTRPPVGLGLRGPLASDRVPAPGGIVPRMKWTQKMNESVMRAYYGATEGGTNLTAYRSRMLSLFQVLEPAVNVSAQRLSDQVRVIQRGHMLDDTVLDRLRSEVQSSPVISPSSQVLEQQQNLAAASPRPNRADEEDDDRAANVSTQCNDELRSALEDAMREYRYTRSDLRPRIPRLPMHRKNRALVCALDSLLSNYFDGSEDLGDTHSILYCAAVAACRVAHVKFTDNERATRPKNAVPAWQCRIERRISEARALIGKLVCFREGNTRPRVMRFVRRAFSGTDVSPREYMSRVTERIDFLKQKVYAWANRIRRYRRRVDRYTQNRLFQSDERWVYRTWERPDQRVSGTRLPDNDVMNTFWRNIWSVPVAHTEGDWMQEVQRACEPIQEMGDIIISPQDVASAVRPMSNWKSPGPDGLHNFWLKWLRSSHARLASQFQSSLESGSLPQFLTTGVTHLLHKSGSTAEPKNYRPITCLPTVYKVLTSILRTKINNHIDNNSIMSASQNGCRNGSRGTKELLLIDMAISQQVRRSRKDLSTCWIDYKKAYDSVPHTWLMRVLDLYKVNTTLCAFLTSCMGQWRTVLRYPGCRQIQGIGEPIRIERGIFQGDSLSPLWFCLALNPLSTLLEGSGLGYRLRRGGQVISHLLYMDDLKLFAPNNLRLLELLKVTETFSNSIRMEFGVDKCAVMHVKRGRIMESVGTQLSDSIQLRSLSSTETYKYLGMSEALGVNETDMKQSLKERFFGRLKKVFNSLLSGGNKVRAFNGWVMPVLMYSFGILKWTQTELDALDRRVRSLLTANRMHHPRSSVMRLYIPRKCGGRGFLNAKTLHNREVCSLREYFSQADVGMHRDVVAVDKGFTPLSLAKENWRKPVVLDTNGRREVWRSKELHGRFYRALHGPDVDFLASVAWLRFGDLFGETEGFVCAIMDEVMMTNNYRKYIVKDGTVDICRACHCPGESIRHIVSGCSRLANGEYLHRHNLVARIIHQQLALKYNLVDAEVPYYKYVPDPVLENGHVTLYWDRSIITDRTIVANKPDIVVIDRSERLTMIVDITVPHDENLVKAEKDKEIKYQDLAHEVVAMWDVDSAIIVPIVVTANGLIAKSLDQHLKRLSLGSWIKGLIQKAVLLDTARIVRKFLSLRP

SEQ ID NO: 29926 - protein, 1202 aa, Amphipyra tragopoginis
MLTRSRAKATRPPSSASSLSSASQPPESAPTVSDVTPAAAVASSSSDEYFSPPTSPPPPRRRGRGRPPASIGPRGPPASDRVPAPGGSVQRMRWTQAMNENCMRAYFGATEGGTNLTAYRGRMLSLFQALEPAVNVSAQRLSDQVRVIQRDHRLDGAALDRLRSEMQSSHVAPLQSQTAAQSQVPSVVAPRSIPADEESDDRVTNVSTQSNEQLRSALELAIREYRSTLPDLRPRLPRLPMNKKNKALMCALDSLLSSYFDGSEDLADTHSILYCAAVAACRVAHVKVDNNDRATRPKPAVPAWQCRIERRIGGARALIGKLICFREGNTRPRVMRFVRRAFSGTDTSPRDYMSCVTERIDFLKQKVYAWANRIRRYKRRVERYTQNRMFQRDQRWVYRAWERADQGVGDAHLPDDDATNSFWRSIWSVPVSHTEGGWMRDVERVCEPILDMGAISISPLDVASAVRPLPNWKSPGPDGLHNFWLKWLRSSHARLASQFQSSLETGTLPQFLTTGVTHLLHKSGSTAEPKNYRPITCLPTVYKLLTSILRCKINSHIENNSIMSASQNGCGNGSRGTKELLLIDMAISQQVRRSRKDLSTCWIDYKKAYDSVPHTWLMRVLELYKVNTTLCAFLTSCMGQWRTVLHYPGCRQIQGIGEPIRIERGIFQGDSLSPLWFCLALNPLSTLLEGSGLGYRLRRGGQVISHLLYMDDLKLFAPNNLQLLDLLKVTETFSNSIRMEFGVDKCAVMHVKRGRIMESVGTQLSDSIQLRSLSSTETYKYLGMSEALGINEADMKQSLRERFYGRLKKVLKSLLSGGNKVRAFNGWVMPVLMYSFGILKWTQTELDALDRRVRTLLTAYRMHHPRSSVMRLYIPRKCGGRGFLNAKTLHNREVCSLREYFSQADVGMHRDVVAVDKGLTPLSLAKENWRKPAVLDTNGRKDVWRSKELHGRFYRALHGPDVDFLASVAWLRFGDLFGETEGFVCAIMDEVMMTNNYRKYVVKDGTVDICRACHCPGESIRHIVSGCSRLANGEYLHRHNLVARIIHQQLALKYNLVDAEVPYYKYVPDPVLENGHVTLYWDRSIITDRTIVANKPDIVVIDRSERRAMIVDITVPHDENLVKAENDKKIKYLDLAHEVVDMWDIDSAVIVPIVVTANGLIAKSLDQHLMRLSLGGWIKGLIQKAVLLDTARIVRKFLSLEP

SEQ ID NO: 29927 - protein, 1199 aa, Amphipyra tragopoginis
MLTRAQARANARPPPPDSSPSSASQQQGLDPASPAVAVASSSSDEYYSPPSSPPPARRQGGTRPPVGLGLRGPLASDRVPAPGGIVPRMKWTRTINENVMRAYYGAIEGGTNLTAYRGRMLSLFQVLEPAVNVSAQRLSDQVRVIQRGHMLDDTVLDRIRSEVQNSPVISPSPQVLEQSQNLAATLPRPNRADEEDDDRATNVSTQCNEELRSALEDAMREYRFIRPDLRPRIPRLPMHRKNRALVCALDSLLSNYFDGSEDLSDTHSILYCAAVAACRVAHIKFTDNERATRPKNDVPAWQCRIERRIAEARALIGKLVCFREGNSRPRVMRFVRRAFSGTDVSPREYMSRVTERIDFLRQKVYAWANRIRRYRRRVDRYTQNRLFQSDERWVYRTWERPDQRVGDTRLPDDDVMNAFWRNIWSVPVTHTEGDWMQEVQRACEPIQEMGDIIISPQDVASAVRPMSNWKSPGPDGQHNFWLKWLRSSHARLASQFQSSLESGSLPQFLTTGVTHLLHKSGSTAEPKNYRPITCLPTVYKVLTSILRAKINNHIDNNSIMSASQNGCRNGSRGTKELLLIDMAISQQVRRSRKDLSTCWIDYKKAYDSVPHTWLMRVLELYKVNTTLCAFLTSCMGQWRTVLHYPGCRQIQGMGEPIRIERGIFQGDSLSPLWFCLALNPLSTLLEGSGLGYRLRRGGQVISHLLYMDDLKLFAPNNLRLLELLKVTETFSNSIRMEFGVDKCAVMHVKRGRIMESVGTQLSDSVHLRSLFSTETYKYLGMSEALGINETDMKQSLRERFYGRLKKVLNSLLSGGNKVRAFNGWVVPVLMYSFGILKWTQTELDALDRRVRSLLTANRMHHPRSSVMRLYIPRKCGGRGFLNAKTLHNREVCSLREYFSQADVGMHRDVVAVDKGLTPLSLAKENWRKPVVLDTNGRREVWRSKELHGRFYRALHGPDVDFLASVAWLRFGDLFRETEGFVCAIMDEVMMTNNYRKYIVKDGTVDICRACHCPGESIRHIVSGCSRLANGEYLHRHNLVARIIHQQLALKYNLVDAEVPYYKYVPDPVLENGHVTLYWDRSIITDRTIVANKPDIVVIDRSKRLTMIVDITVPHDENLVKAEKDKEIKYQDLAHEVVAMWDVDSAIIVPIVVTANGLIAKSLDQHLKRLSLGGWIKGLIQKAVLLDTARIVRKFLSLRP

SEQ ID NO: 29928 - protein, 1202 aa, Amphipyra tragopoginis
MMLTRSQARARNYYAHPPPPDSSPSSASQQQELDPAPPAAAVASSSSDEYFSPPSSPPPVRRRGGARPPACLGPRGQPAPNRVPAAGGNVSRMRWTQSINENVMRAYYGATEGGINLTAYRDRMLSLFQVLEPAINVSTQRLSDQVRVIQRNRRLDDTVLERLRSEVQNNRTVTTPLQAAEQPQLPAVSPRPTHVDEAGDGEVIVVSNQCSDELRSALEGAILEYRATPPELKPRLPRLPMHKKNRALVCALDSLLSNYFDGSEDLGDTHSILYCAAIAACRVANVKLTENERATRPKPAVPAWQYRIERRIDGARALIGKLICFREGNTRPRVMRFVRRAFSGTDISPRDYMSRVTERIDFLKQKVYAWANRIRRYKRRVERYTRNRTFQSDQRRVYRTWERPVPGVSDMRLPDDDAMSSFWRSIWSVPVAHTEGDWMRDIERACETIPEMGEIVISPQDVATAARPLPNWKSPGPDGLHNFWIKWLRSSHACLASQFQSSLESGSLPQFLTTGVTHLLYKSGSTAEPKNYRPITCLPTVYKLLTSILRVKISNHIDNNYILSPSQNGCRSGSRGTKELLLIDMAISQQVRRSQKDLSTCWIDYKKAYDSVPHTWLMRVMELYKINTTLRTLLMSCMRQWRTVLRYPGCREILGRGEPIRIERGIFQGDSLSPLWFCLALNPLSTLLEGTRLGYRLRREGQVISHLLYMDDLKLFAPTNLQLMELLKVTENFSNSIRMEFGVDKCAVMHVKRGRIMESEGIQLSNSIQLRSLSPTETYKYLGMSEALGIREADMRQSLMERFFGRLNKVLKSLLSGGNKVRAFNGWVMPVLMYSFGILKWTQTDLDALDRRVRALLTVHRMHHPRSSVMRLYIPRKCGGRGFLNAKTLHNREVYRLREYFLQAEGEMHRDVVAVDRGLTPLALAKENWRKPVVLSTNDREEVWQSKELHGRFYRALHGPDVDFSASVSWLRFGDLFGETEGFVCAIMDEVMMTNNYRKYIVKDGTVDICRACHRPGESIRHIVSGCSRLANGEYLHRHNLVARIIHQQLALKYNLVESEVPYYRYVPDPVLENGHATLYWDRSIITDRTIVANKPDIVVIDRSERRTMIVDITIPHDENLVKAEKDKQLKYLDLAHEVVAMWDVDSAVIVPIVVTANGLIAKSLDQHLKRLSLDGWIKGLIQKAVLLDTARIVRRFLSLEP

SEQ ID NO: 29929 - protein, 1200 aa, Mythimna impura
MLTRAAARRARHPPPGSPLSSASPPPDLESPVSPAAAVASSSSDEYFSPPTSPTPVRRQRRGRPPKSLGSRGQPAPSRVPAAGGCVQRMRWTQSMNENVMRAYYGSTEGGTNLTAYRDRMLSLFQNLEPTVNVSAQRLSDQVRVIQSNHRLDDATLDRLRSEVLSNQIVSTSIQTQTAATPTTNAISPRSNPNNDDEDDRVVTVSSQCNDELRSALEDALREYRTTPTELRPRLPRLPMHKKNRALVCTLDSLLKNNFESSENLVDTHSILYCGAVAACRLANINFPNIDGTIRPKPAVPAWQCRIERRIDGARVLIGKLHCFREGNTRPRVMRFVRRAFLGTGISPQEYMSRVTERIDFLKQKVCAWASRIRRYKRRVDRYSQNRMFQSDERWVYRAWERPEQNVIDGRRPDDFATITFWRNIWSVPVSHTEGDWMRDVERVCEAIPEMEKVVITPADVAKAVRPLPNWKSPGPDGLQNFWLKWFSNSHAPLASQFQSTLESGSLPEYLTTGVTHLLHKTGNPVEPKNYRPITCLSTVYKLLTSILRAKINRHIENNLIMSASQNGCRNGSRGTKELLLIDMAISQQARRSRKDLSTCWIDYKKAYDSVPHTWLMRVLELYKVDMTLRTFLESCMRQWKTVLRYPGCRPIQGNDEPIRIKRGIFQGDSLSPLWFCLALNPLSTLLEDSGLGYRLRRGGQAISHLLYMDDLKLFAPSNLQLMELLKVTETFSSAIRMEFGVDKCAAMHVKRGEIMESEGIQLPDSIHLRSLSSTETYRYLGMSEALGINNADMKQSLRERFFGRLKKVLNSLLSGGNKVRAFNGWIMPVLMYSFGILKWTQTELDALDRRVRTLLTANRMHHPRSSVMRLYISRKCGGRGFLNAKSLHNREVCSLREYFLKTDVGMHRDVVAVDKGLTPLSMAKEDWRKPVILTTDDRKEIWKGKELHGRFYRALHEPDVDFLASVAWLRFSDLFGETEGFICAIMDEVILTNNYRRYIMKDGTVDVCRACHRPGESIRHIISGCSRLANGEYLHRHNQVARIIHQQLALKYNLVDSEVPYYKYVPDPVLENDHVTLYWDRSIITDRTIVANKPDIVVIDRLARRAVIVDVTIPHDENLVKAEKEKQIKYLDLAHEVVDMWNVDSAIIVPMVVTANGLIAKSFDDHLSKLSLRGWIKGLIQKAVLLDTARIVRRFLSLEP

SEQ ID NO: 29930 - protein, 962 aa, Mamestra brassicae
MHKKNRALVCALDSLLQNTFESSESLVDTHSILFCGAVAACRIANVKFPSYDEAIRPKPAAPAWQCRIERRIDEARALIGKLYCFREGNTRPRVMRFVRRAFLGTGISPRDFTSRVTERIDFLKQKVCAWANRIRRYKRRVDRYSQNRMFQSDERWVYRAWERPEQSVMDVCRPDDNTTSTFWRGIWSVPVCHTEGSWLRDVEHVCEAIPEMDTITITPLDVAKAVRPLPNWKSPGPDGLHNFWLKWYSSSHVLLASQFQSSLESGSLPQFLTTGVTHLLHKTGSPAEPKNYRPITCLSTVYKLLTSILRAKINQHIERNSIMSASQNGCRKGSRGTKELLLIDMAISQQVRRSRKDLSTCWIDYKKAYDSVPHTWLMKVLELYKIDATLRTFLESCMRQWKTVLRYPGCRPIQGSDEPVWIKRGIFQGDSLSPLWFCLALNPLSTLLEDSGLGYRLRRGGQAISHLLYMDDLKLFAPNNLRLMELLKVTETFSSSIRMEFGVDKCAVMHVKKGEIMESEGIQLSDSIQVRSLSSTETYKYLGMSEALGINGADMKQSLRERYFGRLKKVLNSLLSGGNKVRAFNGWVMPVLMYSYGILKWTQTELDALDRRVRTLLTANRMHHPRSSVMRLYIPRKCGGRGFLNAKTLHNREVCNLRDFFLKTDVGMHRDVVAVDKGLTPLSMAKENWHKPVILTTDDRKEVWKGKELHGRFYRALHEPDVDFPASVSWLRFGDLFGETEGFVCAIMDEVILTNNYRRYIMKDGTVDVCRACHRPGESIRHIISGCSRLANGEYLHRHNQVARIIHQQLALKYQLVDSEVPYYKYVPDPVLENDHVTLYWDRSIITDRTIVANKPDIVVIDRLARRTMIIDVTIPHDVNLVKAEKEKQIKYLDLAHEVVDMWNVDSAVIVPIVVTANGLLSKSFDDHLSKLSLRGWVKGLIQKAVLLDTARIVRRFLSLEP

SEQ ID NO: 29931 - protein, 1202 aa, Mesoligia furuncula
MLTRLAARRARLPPPDSSLSSAPPPPESSPIVSAVTPAVAVASSSSDEYFSPPTSPTPVRRQGRGRPPSSLGLRGHPAPSRVPATGGCVQRMRWTQSMNENVMRAYYRSTEGGINLTAYRDRMLSLFQELEPTVNVSAQRLSDQVRVIQRNHRLDDIALDRLRSEVLSNHIVSTSAQTAAQASTVDAIPPRSNHVEEEDDRVDTVSSQCNVRLRSALEDALCEYRSTPTELRPRLPRLPMHKKNRALVCALDSQLKNFFESSEDLVDTHSILYCAAVAACRLANVKFPSCDGATRPKPAVPAWQRRIERRIDGTRVLIGKLYCFREGNTRPRVMRFVRRAFSGTGISPREYISRVTERIDFLKQKVCAWASRIRRYKRRVDRYTQNRMFQSDERWVYRAWERPEQNVTDVYRPDDATTSAFWCSIWSVPVCHTEAGWMRDVERVCESVPEMETVLITPSDVAKAVRPLPNWKSPGPDGLHNFWLKWLISSHTCLASQFQSSLESGSLPQFLTTGVTHLLHKSGSPAEPKNYRPITCLSTVYKLLTSILRAKIISRFIESNSIMSASQNGCRNGSRGTKELLLIDMAISQQVRRSRKDLSTCWIDYKKAYDSVPHTWLMKVLELYKIDATLRTFLESCMRQWKTVLRYPGCRQIQGNDEPVWIKRGIFQGDSLSPLWFCLALNPLSTLLEDSGLGYRLRRDGQVISHLLYMDDLKLFAPNKLRLMELLKVTETFSSAIRMEFGVDKCAVMHVKRGEIMESEGIQLSDSISLRSLSSSESYKYLGMSEALGINDADMKQSLKERFFCRLKKVLISLLSGGNKVRAFNGWVMPVLMYSFGILKWTQTELDALDRRVRTLLTANRMHHPRSSVMRLYIPRKSGGRGFLNAKTLHNREVCSLREYFLKAEVGMHRDVVAVDKGLTPLSMAKENWRKPVVLSTDDRKKVWQSKELHGRFYRALHEPGVDFLASISWLRFGDLFGETEGFVCAIMDEVILTNNYRRHIMRDGTVDVCRACHRPGESIRHIISGCSRLANGEYLHRHNQVARIIHQQLALKYKLVDSEVPYYKYVPDPVLENDHVTLYWDRSIITDRTIVANKPDIVVIDRLARRTMIVDVTIPHDGNLVKAEKEKQIKYLDLAHEVVDMWNVSSAIIVPIVVSANGLMAESLDQHLSRLLLGGWIKGLIQKAVLLDTARIVRRFLSLEP

SEQ ID NO: 29932 - protein, 1201 aa, Mesoligia furuncula
MLTRLAARRARLPPPDSSLSSAPPPPESSPIVSAVTPAVAVASSSSDEYFSPPTSPTPVRRQGRGRPPNSLGLRGHPAPSRVPATGGCVQRMRWTQSMNENVMRAYYRSTEGGINLTAYRDRMLSLFQELEPTVNVSAQRLSDQVRVIQRNHRLDDIALDRLRSEVLSNHIVSTSTQTAAQASTVDAIPPRSNHVEEEDDRVDTVSSQCNVRLRSALEDALCEYRSTPTELRPRLPRLPMHKKNRALVCALDSQLKNFFESSEDLVDTHSILYCAAVAACRLANVKFPSCDGATRPKPAVPAWQRRIERRIDGTRVLIGKLYCFREGNTRPRVMRFVRRAFSGTGISPREYISRVTERIDFLKQKVCAWASRIRRYKRRVDRYTQNRMFQSDERWVYRAWERPEQNVTDVYRPDDATTSAFWCSIWSVPVCHTEAGWMRDVERVCESVPEMETVLITPSDVAKAVRPLPNWKSPGPDGLHNFWLKWLISSHTCLASQFQSSLESGSLPQFLTTGVTHLLHKSGSPAEPKNYRPITCLSTVYKLLTSILRAKINTHIESNSIMSASQNGCRNGSRGTKELLLIDMAISQQVRRSRKDLSTCWIDYKKAYDSVPHTWLMKVLELYKIDATLRTFLESCMRQWKTVLRYPGCRQIQGNDEPVWIKRGIFQGDSLSPLWFCLALNPLSTLLEDSGLGYRLRRDGQVISHLLYMDDLKLFAPNKLRLMELLKVTETFSSAIRMEFGVDKCAVMHVKRGEIMESEGIQLSDSISLRSLSSSESYKYLGMSEALGINDADMKQSLKERFFCRLKKVLISLLSGGNKVRAFNGWVMPVLMYSFGILKWTQTELDALDRRVRTLLTANRMHHPRSSVMRLYIPRKSGGRGFLNAKTLHNREVCSLREYFLKAEVGMHRDVVAVDKGLTPLSMAKENWRKPVVLSTDDRKKVWQSKELHGRFYRALHEPGVDFLASISWLRFGDLFGETEGFVCAIMDEVILTNNYRRHIMRDGTVDVCRACHRPGESIRHIISGCSRLANGEYLHRHNQVARIIHQQLALKYKLVDSEVPYYKYVPDPVLENDHVTLYWDRSIITDRTIVANKPDIVVIDRLARRTMIVDVTIPHDGNLVKAEKEKQIKYLDLAHEVVDMWNVSSAIIVPIVVSANGLMAESLDQHLSRLSLGGWIKGLIQKAVLLDTARIVRRFLSLEP

SEQ ID NO: 29933 - protein, 1202 aa, Griposia aprilina
MLTRSARTRARPPPPDSSLSSASPPPVSSPIVSAVTTPVAVVASSSSDEYFSPPTSPTPVRRQGRGRPPRSLGLRGHPAPSRVPAAGGCVQRMKWTQSMNENVMRAYYRSTEGGTNLTAYRDRMLSLFQELEPTINVSAQRLSDQVRVIQRSHRLDDAALDRLRSELNNHIISTPAQTAVQASTIDEIQPRSNHGVEVEDDRVASVSSQCNARLRSALEDAFREYRSTPTELRPRLPRLPMHKKNRALVCALDSQLKNVFESSENLIDTHSILYCAAVAACRLANVRFPNCDGATRPKPAVPAWQCRIERRIDGARVLIGKLHCFREGNNRPRVMRFVRRAFSGTGISPREYMSHATERIDFLKQKVCAWASRIRRYKRRVDRYTQNRMFQSDERWVYRAWERPEQNVTDECRPDDATTSTFWRSIWSVPVCHVKADWMRDVGRACETVPEMDAVLITPLDVARAVRPLPNWKSPGPDGLHNFWLKWLISSHACLASQYQSSLESGSLPQFLTTGVTHLLHKSGSPTDPKNYRPITCLSTVYKLLTSILRAKINTHIESNSIMSASQNGCRNGSRGTKELLLIDMAISQQVRRSRRDLSTCWIDYKKAYDSVPHTWLMRVLELYKIDTTLRTFLRSCMGQWRTVLRYPGCRQIQANDEPVWIKRGIFQGDSLSPLWFCLALNPLSTLLEDSGLGYRLRKDGQVISHLLYMDDLKLFAPNKLQLMELLKVTETFSSTIRMEFGVDKCALMHVKRGEVMEPEGIQLSDSIHLRSLSSSESYKYLGMSEALGINVADMKQSLRERFFGRLKKVLISLLSGGNKVRAFNGWVMPVLMYSFGILKWTQTELDALDRRVRTLLTANRMHHPRSSVMRLYIPRKCGGRGFLNAKTLHNREVCSLREYFLKAEVGMHRDVVAVDKGFTPLSMAKENWRKPVVLTTDDRKEVWQSKELHGRFYRALHEPGVDFLASVSWLRFGDLFGETEGFVCAIMDEVILTNNYRRHIMKDGTVDMCRACHRPGESIRHIVSGCSRLANGEYLHRHNQVARIIHQQLALKYKLVDSEVPYYKYVPDPVLENDHITLYWDRSIITDRTIVANKPDIVVIDRLARRTMIIDITIPHDENLVKAEKEKQIKYLDLAHEVVEMWNVSSAVIVPIVVSANGLMAKSLDQHLSRLSLDGWVKGLIQKAVLLDTARIVRRFLSLEP

SEQ ID NO: 29934 - protein, 1162 aa, Griposia aprilina
MLTRSARTRARPPPPDSSLSSASPPPVSSPIVSAVTTPVAVVASSSSDEYFSPPTSPTPVRRQGRGRPPRSLGLRGHPAPSRVPAAGGCVQRMKWTQSMNENVMRAYYRSTEGGTNLTAYRDRMLSLFQELEPTINVSAQRLSDQVRVIQRSHRLDDAALDRLRSELNNHIISTPAQTAVQASTIDEIQPRSNHGVEVEDDRVASVSSQCNARLRSALEDAFREYRSTPTELRPRLPRLPMHKKNRALVCALDSQLKNVFESSENLIDTHSILYCAAVAACRLANVRFPNCDGATRPKPAVPAWQCRIKRRIDGARVLIGKLHCFREGNNRPRVMRFVRRAFSGTGISPREYMSHATERIDFLKQKVCAWASRIRRYKRRVDRYTQNRMFQSDERWVYRAWERPEQNVTDECRPDDATTSTFWRSIWSVPVCHVEADWMRDVGRACETVPEMDVVLITPLDVARAVRPLPNWKSPGPDGLHNFWLKWLISSHACLASQYQSSLESGSLPQFLTTGVTHLLHKSGSPTDPKNYRPITCLSTVYKLLTSILRAKINTHIESNSIMSASQNGCRNGSRGTKELLLIDMAISQQVRRSRRDLSTCWIDYKKAYDSVPHTWLMRVLELYKIDTTLRTFLRSCMGQWRTVLRYPGCRQIQANDEPVWIKRGIFQGDSLSPLWFCLALNPLSTLLEDSGLGYRLRKDGQVISHLLYMDDLKLFAPNKLQLMELLKVTETFSTTIRMEFGVDKCAVMHVKRGEVMEPEGIQLSDSIHLRSLSSSESYKYLGMSEALGINVADMKQSLRERFFGRLKKVLISLLSGGNKVRAFNGWVMPVLMYSFGILKWTQTELDALDRRVRTLLTANRMHHPRSSVMRLYIPRKCGGRGFLNAKTLHNREVCSLREYFLKAEVGMHRDVVAVDKGFTPLSMAKENWRKPVVLTTDDRKEVWQSKELHGRFYRALHEPGVDFLASVSWLRFGDLFGETEGFVCAIMDEVILTNNYRRHIMKDGTVDMCRACHRPGESIRHIVSGCSRLANGEYLHRHNQVARIIHQQLALKYKLVDSEVPYYKYVPDPVLENDHITLYWDRSIITDRTIVANKPDIVVIDRLARRTMIIDITIPHDENLVKAEKEKQIKYLDLAHEVVEMWNVSSAVIVPIVVSANGLMA

SEQ ID NO: 29935 - protein, 969 aa, Furcula furcula
MLDDAVLDRLRSEVQGSRVAPCIPSSQAVAPAVNIVPAPRPATNSDDDRDDMTTDVSTNLNTQLRSTLEDVVREYRTMPLNLRPRLPRLPMHKRNRALVCALDSLLSSYFDSSEDLADAHSLLYCAAMTACRVARVKFPSTDAATRPRPAVPAWQFRIECRIGEARVLIGKLNCFREGNTRPRVMRFVRRAFSGTGIDPREYLSRVTERIDFLKQKVCAWANRIRRYKARVDRYSQNNMFQRDQRWVYRSWERSSQIEGDGRRPDDSAMTTFWRNIWSVPVTHSEGDWMRDVEQICEPLPEMGAITIRPQDVADAVRPMPNWKAPGPDGLHNFWLKWIRSSHICLASLFQSALESGSLPEFMTMGITHLLHKTSCTTDPKNYRPITCLPTVYKTLTSILRAKIYRHVEDNSIMSASQNGCRSGARGTKELLLIDMAICQQARRNRKDLSTCWIDYKKAYDSVPHTWLMRVLELYKVNPTLRTFLASCMRQWRTVLLYPGSRQILGNGDPIRIERGIFQGDSLSPLWFCLALNPLSTLLRGSGLGCRLRRGGQVISHLLYMDDLKLFAPTELQLMGLLKVTETFSNSISMEFGVDKCAVMHVKRGRMVESRSVQLLDSTDLRTLSATETYKYLGMSQALGINETDMKQSLRERFLGRLRKVLKSILSGGNRVRAYNGWVMPVLMYSFGILKWTQTELDTLDRTVRTLLTTYRMHHPRSSEMRLYIPRKCGGRGFLNAKTLHNREICNLREYFLHCGGVMHTDVVAVDNGLTPLSLAKGNWRKPVVLTTGDRGAVWQSKELHGRFYRALHGPDVDFSASVAWLRFGDLFGETEGFVCAIMDEVVMTNNYRKYILRDGTIDICRACHRPGESLRHIISGCSRLANGEYLHRHNQVARIIHQQLALKYRLVMSEVPYYRYVPEPVLEDGHITLYWDRSIITDRTIVANKPDIVLIDRTERRAMTSLSLMMRTS

SEQ ID NO: 29936 - protein, 1200 aa, Arctia plantaginis
MLTRARSRALTTSPDSSLRSVLPSPEATTEVPAVAEASSSTSSDEFFSPPTSPTPVRRQGRGRPPTSLGSRGLLTSNRVPATGGDVRRMKWTKSINENVMRAYYRATEVGTNLTAYRVRLVSLFQELEPAVNVSAQRLSDQVRAIQRCHLLDDAVLERIRSDIRNSLIIPSSSHTVDSVANSTPQLASYTDDIDELVESEVISVSTQYNDRIRSALEDAILEYRYLNCNDRPRLFRLPIHKRNLALVGALDSLLPEYLDNSEDLSDTHSILYCAAIAACRVAGVKIANNVTTTRPKSTVPAWQYRIERRITETRTLIGKLISYRSGNMRPRVMRFVKQAFLGTTISPQQYMSCVTERIDFLKQKIYAWANRIRRYKKRIDRYNQNRMFQRNEKWVYRKWEEPDPCVGDRHLPDENVTNTFWRNIWSVPVTHIEGDWLQDVRRSCESITPMEPVKIDKDDVSCAVRSLPNWKSPGPDGLHNFWLKWFRSSHARLASQFQAALDSGSLPQFLTTGITHLLYKSGSVMDPKNFRPITCLPTMYKLLTSIVRLKITLHINNNSIMSVSQNGCRSGTRGTKDLLIIDMTISQQVRCNRKSLATCWIDYKKAYDSVPHTWLLKVLELYKIDTTLCTFLKSCMGQWRTALRYPGCRQTAIHDVLIKIERGIFQGDSLSPLWFCLALNPLSTLLEGSGLGYRLQKDDQVISHLLYMDDLKLLASNKLQLTKLLKVTENFSNSIKMEFGVDKCAVMYVKKGVIVESEGIELLDSTKLRSLSATETYKYLGISQSLGIPESNMKQTLQERFFGRLKKVLKSLLSGGNKVRACNGWVMPVLMYSFGILRWTQTELDALDRKVRTLLTASRMHHPRSSVMRLYIPRKLGGRGLLNIKTLHNREVCNLREYFLHTDVGVHRNVVAVDTGFTPLALAKENWRRPVVLGVNDRREVWKGKELHGRFYRALNGSDIDLKASTTWLRHGDLFGETEGFVCAIMDEVIMTNNYRKYILKDGTVDICRACHRPGESIRHIISGCSRLANGEYLHRHNQVARIVHQQLALKYHLVNLEVPYYRYVPDPVLENGRATLYWDRSIITDRTIVANKPDIVLIDRLERRAMIVDIAVPHDENLVKVEKEKQIKYLDLSHEIVDMWNVDSVIIVPIVVSAHGLIAKSLDQHLKRLTLDGWIKGLMQKAVLLDTARIVRRFLSLES

SEQ ID NO: 29937 - protein, 1202 aa, Amphipyra berbera
MLTRSRTRTTEQRSARPPPPDSPLSSASQPPELGLPVTPAAAASSSSSDEYFSPPTSPRPVRRQGRGRPPNSLGPRGPPAPSRVLAAGGYVQRMKWTQSINENVMRAYYGSTEGGTNLTAYRVRMLTLFQELEPAINVSAQRLSDQVRVIQRNHRLDDAALDRLRLEVQNSRAIPVPSQTAVHQLINVAPPRSDRVDGDEDDGAVTVSSQYNDRLRSALEDAIRECRANPESRPRLPRLPMHNKNRALVCALDSLLASYFESSEDLGDTHSILYCAAVAACRVANVKFNNSERATRPKLAVPAWQCRIERRIDETRALIGKLICFREGNTRPRVMRFVRRAFSGTGISPREYTSRATERIDFLKQKVCAWASRIRRYKRRVERYTQNRMFQCDQRWVYRAWKRPDQSVSGGRLPDDDAMSSFWRSIWSVPVIHTEGDWMRDIERTCESIEEMGEIVISPQDVAGAVRPLPNWKSPGPDGLHNFWIKWLRSSHARLASQFQSSLESGSLPQFLTTGVTHLLHKSGSTAEPKNYRPITCLPTVYKLLTSILRSKINTHIGNNSVLSSSQNGCRNGSRGTKELLLIDTAISQQVRRSQKSLSTCWIDYKKAYDSVPHTWLMRVLELYKINTTLRTFLRSCMGQWRTVLRYPGCQPIRRSGEPIRIERGIFQGDSLSPLWFCLALNPLSTLLEGSGLGYPLRRGGQVVSHLLYMDDLKLFAPTKLQLVDLLKVTETFSNSIRMEFGVDKCAVMHVRRGRIMESEGLQLSDSIHLSPLSANDTYKYLGMSEGLGISEADMKQSLRERFFGRLKKVLKSLLSGGNKVRAFNGWVMPVLMYSFGILKWTQTELDALDRRVRTLLTANRMHHPRSSVMRLYIPRKCGGRGLLNAKTLHNREVCSLREFFLHADVGMHRDVVAVDKGLTPLSLARENWRKPVVLSTNDRREIWQSKELHGRFYRALHGPDVDFLASVSWLRFGDLFGETEGFVCAIMDEVIMTNNYRKYIVKDGTVDICRACHCPGESLRHIISGCSRLANGEYLHRHNQVARIIHQQLALKYNLVESEVPYYRYVPDPVLENGRITLYWDRSIITDRTIVANKPDIVVIDRSERRTMIVDVTIPHDGNLVKAEKDKQIKYLDLAHEVVNMWDVESATIVPIVVTANGLMAKSLDKHLMRLSLGGWIKGLIQKAVLLDTARIVRRFLSLEP

SEQ ID NO: 29938 - protein, 1097 aa, Noctua janthe
MITRAVYRRARLTTPDSSLSSASPPPDPGSPVSPAAAVASSSSDEYFSPPTSPTPVRRQGRGRPPKSLGLRGHPAPNRVPAAGGCVQRMRWTQTINENVMRAYYGSTEGGTNLTVYRVRMLSLFQVLEPIVNVSAQRLSDQLRVIQRNHMLDDAALDRLRSEVLSNRIVLTPAQTAVQASAIDATPPRSNPAVVEEDDRVAMVSSQCNDRLRSALEDALREYRSTPTKLRPRLPRLPMHNKNRALVCALDSQLKNIFESSENLVDTHSILYCGAVAACRLANVKFPNYDVAIRPKPAVPAWQRRIECRIDEARVLIGKLHCFREGNTRPRVMRFVRQAFSGTGISPQEYMSRVTERIDFLKQKVYAWANRIRRYKRRVDRYSENRIFQNDERWVYRAWERPEQNMTDVCRPVDAATSSFWRSIWSVPVCHTEADWMRDVERACEPIPEMEPILITPIDIARAVRPLPNWKSPGPDGLHNFWLKWLSSSHTCLASQFQSSLESGSLPQFLTTGVTHLLHKSGSPAEPKNYRPITCLSTVYKLVTSILRVKINTHIDKNFIMSASQNGCRNGSRGTKELLLIDMAISQQVRRSRKDLSTCWIDYKKAYDSVPHTWLMRVLELYKIDATLRAFLESCMGQWRTVLRYPGCRQIQGNDEPVWIKRGIFQGDSLSPLWFCLALNPLRTLLEDSGLGYQLRRGGQVISHLLYMDDLKLFAPNKLRLMELLKVTETFSNAIRMEFGVDKSAVMYVKRGEIMESEGIQLSDSIHLRSLSSSESYKYLGMSESLGINVTDIKQSLRERFFGRLNKVLNSLLSGGNKVRAFNGWVMPVLMYSFGVLKWTQTELDALDRRVRTLLTANRMHHPRSSVMRLYIPRKCGGRGFLNAKTLHNREICSLREYFLKTEVGMHRDVVAVDKGLTPLSMAKKNWRKPVGLTTDDRKEVWQGKELHGRFYRALHGPDVDFLASVSWLRFGDLFGETEGFVCAIMDEVMLTNNYRKYIMKDGTVDVCRACHRPGESIRHIISGCSRLANGEYLHRHNQVARIIHQQLALKHKLVESEVPYYKYVPDPVLEKDHVTLYWDSDRPISAPCNDSRCYHSA

SEQ ID NO: 29939 - protein, 868 aa, Agrochola circellaris
MRFVRRAFLGTGISPRENMPRVTERIDFLKQKVCAWASRIRRYKRRVERYTQNRMFQSDERWVYRAWERPEQNVADVCRPDDAATSAFWRSIWSVPVCHTEADWMRDVERVCETIPEMEKIEITPLDIARAVRPLPNWKSPGPDGLHNFWLKWLISSHTCLASQFQSSLESGSLPQFLTTGVTHLLHKSGSPAEPKNYRPITCLSTVYKLLTSILRAKINTHIDNNSIMSASQNGCRNGSRGTKELLLIDMAISQQVRRSRKDLSTCWIDYKKAYDSVPHTWLMRVLELYKIDATLRTFLMSCMGQWRTVLRYPGCRQIQGNDEPVWIKRGIFQGDSLSPLWFCLALNPLSTLLEDSGLGYRLRRGGQVISHLLYMDDLKLFAPNNLRLMELLKVTETFSSAIRMEFGVDKCAVMHVKRGEIMESEGTQLSESIHLRSLSSSESYKYLGMSEALGINVADMKQSLKERFFGRLKKVLISLLSGGNKVRAFNGWVMPVLMYSFGILKWTQTELDALDRRVRTLLTANRMHHPRSSVMRLYIPRKCGGRGFLNAKTLHNREVCNLREYFLKAEVGMHRDVVAVDKGLTPLSMAKENWHKPVVLTTDDRKEVWQSKELHGRFYRALHEPGVDFLASVSWLRFGDLFGETEGFVCAIMDEVILTNNYRRYIMKDGTVDVCRACHRPGESIRHIISGCCRLANGEYLHRHNQVARIIHQQLALKYKLVVSEVPYYKYVPDPVLENDHVTLYWDRSIITDRTIAANKPDIVVIDRLARRAMIVDVTIPHDGNLVKAEKEKQIKYLDLAHEVVDMWNVSSAIIVPIVVTANGLMAESLDQHLSRLSLGGWIKGLIQKAVLLDTARIVRRFLSLQP

SEQ ID NO: 29940 - protein, 917 aa, Amphipyra tragopoginis
MGLISYAQMYQIGTCLPSAFECANSARSGAAIRAAHLPARSPLLLYASTFVYPFTYVYRTDTSPRDYMSRTTERIDFLKQKVYAWANRIRRYKRRVERYTLNRTFQSDQRRVYRAWERPDTCGSDVRLPDDDAMSSFWRSIWSVPVAHTEGGWMRDIERACEPILEMGAIIISPQDVAGAARPLPNWKSPGPDGLHNFWLKWLRSSHACLASQFQSSLESGSLPQFLTTGATHLLYKSGSTAEPKNYRPITCLPTVYKLLTSILRVKISNHIDSNSILSPSQNGCRSGSRGTKELLLIDMAISQQVRRSRKDLSTCWIDYKKAYDSVPHTWLMRVLELYKINTTLRTFLMSCMRQWRTVLRYPGCREIRGRGEPIRIERGIFQGDSLSPLWFCLALNPLSTLLEGTRQGYRLRREGQVISHLLYMDDLKLFAPTDLRLMELLKVTENFSSSIRMEFGVDKCAVMHVKRGGIVESEGIQLSNSIQLRSLSPTETYKYLGMSEALGISEADMRQSLRERFFGRLNKVLRSLLSGGNKVRAFNGWVMPVLMYSFGILKWTQTDLDALDRRVRALLTVHRMHHPRSSVMRLYIPRKCGGRGFLNAKTLHNREVCSLREYFLQAEGVMHRDVVAVDKGLTPLALAKENWRKPAVLSTNDREEVWQSKELHGRFYRALHGPEVDFPASVSWLRFGDLFGETEGFVCAIMDEVMMTNNYRKYIVKDGTVDICRACHRPGESIRHIVSGCSRLANGEYLHRHNLVARIIHQQLALKYNLVESEVPYYRYVPDPVLENGHVTLYWDRSIITDRTIVANKPDIVVIDRSERRTVIVDITVPHDENLVKAEKDKQIKYLDLAHEVVGMWDVDSAVIVPIVVTANGLIAKSLDQHLKRLSLGGWIKGLIQKAVLLDTARIVRRFLSLEP

SEQ ID NO: 29941 - protein, 1200 aa, Amphipyra tragopoginis
MLTRSKARARDAHPPPPDSSPSSASQQQGLDPASPAAAVASSSSDEYYSPPSSPPPARRRGGTRPPGGLGLRGPLASDRVPAPGGIVPRMKWTQKMNESVMRAYYGATEGGTNLTAYRSRMLSLFQVLEPAVNVSAQRLSDQVRVIQRGHMLDDTVLDRLRSEVQSSPVISPSSQVLEQQQNLAAALPRPNRADEEDDDRVANVSTQCNDELRSALEDAMREYRYTRSDLRPRIPRLPMHRKNRALVCALDSLLSNYFDGSEDLGDAHSILYCAAVAACRVAHVKFTDNERATRPKNAVPAWQCRIERRISEARALIGKLVCFREGNTRPRVMRFVRRAFSGTDVSPREYMSRVTERIDFLKQKVYAWANRIRRYRRRVDRYTQNRLFQSDERWVYRTWERPDQRVSDTRLPDNDVMNIFWRNIWSVPVAHTEGDWMQEVQRACEPIQEMGDIIISPQDVASAVRPMSNWKSPGPDGLHNFWLKWLRSSHARLASQFQSSLESGSLPQFLTTGVTHLLHKSGSTAEPKNYRPITCLPTVYKVLTSILRTKINNHIDNNSIMSASQNGCRNGSRGTKELLLIDMAISQQVRRSRKDLSTCWIDYKKAYDSVPHTWLMRVLELYKVNTTLCAFLTSCMGQWRTVLRYPGCRQIQGIGEPIRIERGIFQGDSLSPLWFCLALNPLSTLLEGSGLGYRLRRGGQVISHLLYMDDLKLFAPNNLRLLELLKVTETFSNSIRMEFGVDKCAVMHVKRGRIMESVGTQLSDSIQLRSLSSTETYKYLGMSEALGVNETDMKQSLKERFFGRLKKVFNSLLSGGNKVRAFNGWVMPVLMYSFGILKWTQTELDALDRRVRSLLTANRMHHPRSSVMRLYIPRKCGGRGFLNAKTLHNREVCSLREYFSQADVGMHRDVVAVDKGFTPLSLAKENWRKPVVLDSNGRREVWRSKELHGRFYRALHGPDVDFLASVAWLRFGDLFGETEGFVCAIMDEVMMTNNYRKYVVKDGTVDICRACHCPGESIRHIVSGCSRLANGEYLHRHNLVARIIHQQLALKYNLVDAEVPYYKYVPDPVLENGHVTLYWDRSIITDRTIVANKPDIVVIDRSERLTMIVDITVPHDENLVKAEKDKEIKYQDLAHEVVAMWDVDSAIVVPIVVTANGLIAKSLDQHLKRLSLGSWIKGLIQRAVLLDTARIVRKFLSLRP

SEQ ID NO: 29942 - protein, 1204 aa, Noctua pronuba
MITRSRAKQQKAHPPSPGSSLSSASQPPGRATSVSSVSPVAAVASSSSDEFFSPPSTPSPPRRRGRGRPPAGLGPRGQQAPNRVPAAGGNVSRMRWTQSINENVMRAYYGATEGGSNLTAYRGRMLSLFQVLEPGVSVSAQRLSDQVRVIQRNHMLDDTVLDRLRFDSRSNLVTPASPMIAVQLQNVSSAPPRSDHDGEEDDDEVISVSTQCNAQLRSALEGAFREYRSIPPELRPRLPRLPMHKKNKALVCALDSQLSTCFDSSKDLADTHSILYCGAVAACRVAHVKFPNNDRATRPKLAVPAWQRRIELRIGEARALIGKLICFREGNTRPRVMRFVRRAFSGTGISFRDYLARVTERIDFLKQKICAWANRIRRYKRRVERYTQNRTFQSDERWVYRAWERPDQGVTDTRLPDADAMCLFWRSIWSVPVSHTEGDWTREVEQACDPIPEMGAIIISPQDVACAVRPLPNWKSPGPDGLHNFWIKWFQRSHARLASQFQSALESGSLPQFLTTGITHLLHKSGSTAEPKNYRPITCLPTVYKVLTSILRAKINHHIDSNSIMSASQNGCRNGSRGTKELLLIDMAISQQVRRSRRDLSTCWIDYKKAYDSVPHTWLMRVLELYKVDATLRTFLKSCMGHWRTVLRYPGCRQIQGNSEPIRIERGIFQGDSLSPLWFCLALNPLSTLLEGSGLGYRLRRGGQVISHLLYMDDLKLFAPNNLQLMKLLKVTETFSSAIRMEFGVDKCAVMHVKRGEIMESVGTQLSDSIHLRSLSSTETYKYLGMSEALGINTTDMKQSLRERFFGRLNKVLGSLLSGGNKVRAFNGWVMPVLMYSFGILKWTQTELDALDRRVRALLTANRMHHPRSSVMRLYIPRKCGGRGFLNAKTLHNREVCSLREYFLEAEVGMHRDVVSVDKGLTPLSLANENWRKPRVLDSNDRKEVWQGKELHGRFYRALHGPDVDFLASVSWLRFGDLFGETEGFVCAIMDEVMMTNNYRKYIVKDGTVDICRACHRPGESIRHIISGCSRLANGEYLHRHNLVARIIHQQLALKYNLVESEVPYYKYAPDPVLDDGNITLYWDRSIITDRTIVANKPDIVVIDRLERRAMIVDITVPHDENLVKAEKDKQFKYLDLAREVVDMWDVSTAVIVPIVVSANGLIAKSLDQHLRRLSLGSWIKRLIQKAVLLDTARIVRRFLSQEP

SEQ ID NO: 29943 - protein, 1200 aa, Mythimna impura
MLTRSRAKKANTHPTSSGSSLSSASQPPGPAPTVSPEIPVAAVASSSSDEYFSPPTTPPPARRRGRGRPPASLGPRGPPASDRVLAAGGSVQRMRWTQSINENVMRSYFGATEGGSNLTAYRGRMLSLFQVLEPAVNVSAQRLSDQVRVIQRNRMLDDAVLDRLRLESRSSRVSPASPQAAVQLQSNVSLRPDHVGEDDDDGAISVSNQCNVRLRSALEDAFREYRFTPAELRPRLPRLPMHKKNRALVCALDSQLSNCFDSSEDLTDTHSILYCAAVAACRVARVKFPNSDRVTRPAVPAWQCRIERRIGEARALIGKLICFREGNTRPRVMRFVRRAFSGTNISPRDYLPHITERIDFLKQKVYAWANRIRRYKRRVERYTQNRTFQRNERWVYRAWERPDQGVIDTCLPDDDAMCSFWRSIWSVPVSHTEGDWTREIERTCDLIPEMEPITISPQDVARAVRPLPNWKSPGPDGLHNFWLKWFQRSHARLASQFQSALESGSLPQFLTTGITHLLHKSGSTAEPKNYRPITCLPTVYKVLTSILRAKINSHIETNSIMSASQIGCRNGSRGTKELLLIDVAISQQVRRSRRDLSTCWIDYKKAYDSVPHTWLMRVLELYKVDATLRTFLMSCMRQWRTALHYPGCRQIRESSEPIRIERGIFQGDSLSPLWFCLALNPLSTLLEGSGLGYRLKRGGQVISHLLYMDDLKLFASNNLQLMELLKVTETFSSAIRMEFGLDKCAVMHVKRGEIMESVGTQLSDSIYIRSLCSTETYKYLGMSEALGINAADMKQSLRERFFGRLKKVLNSLLSGGNKVRAFNGWVMPVLMYSFGILKWTQTELDALDRRVRSLLTANRMHHPRSSVMRLYIPRKCGGRGFLNAKTLHNSEICSLREYFLKTDVGMHRDVVAVDKGLTPLSLVNENWRKPTVMDTNERRAVWQGKELHGRFYRALHGPDVDLLASVSWLRFGDLFGETEGFVFAIMDEVMMTNNYRKYIVKDGTVDICRACHRPGESIRHIISGCSHLANGDYLHRHNLVARIIHQQLALKYNLVESEVPYYRYVPDPVLENGSVTLYWDRSIITDRTIVANKPDIVVIDRLERRTMIVDIAVPHDENLVKAEKDKQTKYLDLAREVVDMWEVDRAVIVPIVVTANGLIAKSLEQHLRRLSLGSWIKGLIQKAVLLDTARIVRRFLSQEP

SEQ ID NO: 29944 - protein, 1129 aa, Cosmia trapezina
MLTRSAARARPPPPDSSLSSASPPPVSSPTVNALTTPVAAVASSSSDEYFSPPSSPTPPRRRGRGRPPAGLGPRGQPAPNRVPAAGGNVSRMRWTQSINENVMRAYYGATEGGINLTAYRGRMLSLFQVLEPAVNVSAQRLSDQVRVIQHNHRLDNATLDRLRSEMQSSSASNPPPSQNVMHVPAEIPLRANQRDEEENARAISADNLCNVEIRSALEDAIREYRFTSPDLRPRLPRLPMNKKNRALVCALDALLPNFIESSADLCDTHSILYCTAVAACRVACVKFPNTDRATRPKPAAPAWQCRIERRINEARVLIGKLICFREGNTRPRVMRFVRRAFSGTNISPQEYVSRITERIDFLKQKVYAWANRIRRYRRRVDRYSQNRMFQSDERWVYRAWERPIPTQGVTDVRPPDNETMSAFWRSIWSVPVSHTEGDWMRVVEQACDSIPNMEAVTISPLDVACAVRPLPNWKSPGPDGLHNFWIKWLQRSHACLASQFQSSLETGSLPLLFTTGVTHLLHKSGSTAEPKNYRPITCLPTVYKVLTSILRAKIAHHIYNNSIMSVSQNGCRNGSRGTKELLLIDMTISQQVRRSRRDLSTCWIDYKKAYDSVPHTWLIRVLELYKIDATLRTFLMSCMGQWKTVLLCPGCRWIPGIDEPIRIERGIFQGDSLSPLWFCLALNPLSTLLEDSGLGYRLRRGGQVISHLLYMDDLKLFAPNNLRLMELLKVTENFSSAIRMEFGVDKCAVMHVKRGEIMESVGTQLSDSIHLRSLSSTETYKYLGMSEALGINVADMKQSLKERFFGRLKKVFNSLLSGGNKVRAFNGWVMPVLMYSFGVLKWTQTELDALDRRVRTLLTAYRMHHPRSSVMRLYIPRKCGGRGFLNAKTLHNREICSLREYFLEADVEMHRDVVAVDKGLTPLSLAKENWRKPAVLDTNDRREVWQGKELHGRFFRALHGPDVDFLASVSWLRFGDLFGETEGFVCAIMDEVIMTNNYRKYIVKDGTVDICRACHRPGESIRHIVSGCSRLANGEYLHRHNLVARIIHQQLALQYNLVESEVPYYRYVPDPVLENGQATLYWDRSIITDRSTVANKPDIVKINKINKYPWTFHTTPSSPKLSNLMFVLW

SEQ ID NO: 29945 - protein, 1199 aa, Mamestra brassicae
MLTRAASRRARPPSPDPSLSSASPPPDSGSPMSPAVAVASSSSDEYFSPPTSPTPVRRQGRGRPPRGLGPRGQPAPSRVPATGGCVQRMRWTQSMNENVMRAYYGSTEGGTNLTAYRVRMLSLFQDLEPTVNVSAQRLSDQVRVIQRNHRLDDAALDRLRSEVLNNLIISTPTQTAVQAPVNDAITPRPNNVSHEVDDRVVTVSSQCNDRLRSALEDALREYRSTPTELRPRLPRLSMHKKNRALVCALDSLLQNTFESSESLVDTHSILFCGAVAACRIANVKFPSYDEAIRPKPAAPAWQCRIERRIDEARALIGKLYCFREGNTRPRVMRFLRRAFLGTGISPRDFTSRVTERIDFLKQKVCAWANRIRRYKRRVDRYSQNRMFQSDERWVYRAWERPEQSVMDVCRPDDNTTSTFWRGIWSVPVCHTEGGWLRDVEHVCEAIPEMDTITITPLDVAKAVRPLPNWKSPGPDGLHNFWLKWYSSSHVLLASQFQSSLESGSLPQFLTTGVTHLLHKTGSPAEPKNYRPITCLSTVYKLLTSILRAKINQHIERNSIMSASQNGCRKGSRGTKELLLIDMAISQQVRRSRKDLSTCWIDYKKAYDSVPHTWLMKVLELYKIDATLRTFLESCMRQWKTVLRYPGCRPIQGSDEPVWIKRGIFQGDSLSPLWFCLALNPLSTLLEDSGLGYRLRRGGQAISHLLYMDDLKLFAPNNLRLMELLKVTETFSSSIRMEFGVDKCAVMHVKKGEIMESEGIQLSDSIQVRSLSSTETYKYLGMSEALGINGADMKQSLRERFFGRLKKVLNSLLSGGNKVRAFNGWVMPVLMYSYGILKWTQTELDALDRRVRTLLTANRMHHPRSSVMRLYIPRKCGGRGFLNAKTLHNREVCNLRDFFLKTDVGMHRDVVAVDKGLTPLSMAKENWRKPVILTTDDRKEVWKGKELHGRFYRALHEPDVDFPASVSWLRFGDLFVETEGFVCAIMDEVILTNNYRRYIMKDGTVDVCRACHRPGESIRHIISGCSRLANGEYLHRHNQVARIIHQQLALKYQLVDSEVPYYKYVPDPVLENDHVTLYWDRSIITDRTIVANKPDIVVIDRLARRTMIIDVTIPHDVNLVKAEKEKQIKYLDLAHEVVDMWNVDSAVIVPIVVTANGLLSKSFDDHLSKLSLRGWVKGLIQKAVLLDTARIVRRFLSLEP

SEQ ID NO: 29946 - protein, 1111 aa, Omphaloscelis lunosa
MRWTQSMNENVMRAYYGSTEGGTNLTAYRVRMLSLFQELEPTVNVSAQRLSDQVRVIQRNHRLDDTALDRLRSEVLSNHIVSAREQTAAEASNIDPTPPRFNHGVEEEDDKVATVSSQCNNRLRSALEDAFREYRYTPTELRPRLPRLPMHKKNRALMCALDSQLTNFFESSEDLIDTHSILYCAAVAACRLANVKFPNCDGATRPKPAVPAWQCRIERRIDGARVLIGKLYCFREGNTRPRVMRFVRRAFSGTEISPQDYMSRVTERIDFLKQKVCAWASRIRRYKRRVDRYTQNRMFQSDERWVYRAWERPEQNVTDVCRPDDAATSAFWRSIWSVPVCHTEAGWMQDVERVCETIPEMDAVFITPLDVARAVRPLPNWKSPGLDGLHNFWLKWLSSSQTCLASQFQSSLESGSLPQFLTTGVTHLLHKSGNPAEPKNYRPITCLSTVYKLLTSILRTKINTHIDSNSIMSVSQNGCRNGSRGTKELLLIDMAISQQVRRSRKDLSTCWIDYKKAYDSVPHTWLMRVLELYKVDTTLRTFLMSCMGQWRTVLRYPGCRRTQGNDEPVWIKRGIFQGDSLSPLWFCLALNPLSTLLEDSGLGYRLRRGGQVISHLLYMDDLKLFAPNKLRLMELLKVTETFSGAIRMEFGVDKCAVMHVKRGEIMESEGIQLSDSIHFRPLSSAENYRYLGMSESLGINVADMKQSLKERFFGRLKKVLISFLSGGNKVRAFNGWVMPVLMYSFGILKWTQTELDALDRRVRTLLTANRMHHPRSSVMRLYIPRKCGGRGFLNAKTLHNREVCSLREYFFKADVGMHRDVVAVDNGLTPLSMAKENWRKPVVLTTDDRKEIWQSKALHGRFYRALHEPSVDFLASVSWLRFGDLFGETEGFICAIMDEVILTNNYRRHIMKDGTVDVCRACHRPGESIRHIISGCSRLANGEYLHRHNQVARIIHQQLALKYKLVDSEVPYYKYVPDPVLENDHATLYWDRSIITDRTIVANKPDIVVIDRLARHAMIVDVTIPHDENLVKAEKEKQIKYLDLAHEVVGMWNVSSAIIVPIVVTANGLMAKSLDHHLSRLSLGGWIKRLIQKAVLLDKARIVRRFLSLQP

SEQ ID NO: 29947 - protein, 1236 aa, Sesamia nonagrioides
MLTRQAARRARSPPPDSSPSSASPPPVPSANVSAVTTPVAVVASSSSDEYFSPPTSPRPVRRQGRGRPPKSLGLRGHPAPSRVPAAGGCVQRMRWTQTMNENVMRAYYRATEGGTNLTAYRERMLSLFQALEPTVNVSAQRLSDQVRVIQRNHRLDDIALDRLRSEVLSNQITPTLTQTAAQASIIDAAPPRSNRVEEEDDRVETVSSQYNDRLRNALEDAFRDYRSTPTDLRPRLPRLPMHKKNRALVCALDSLLKNFFESSEDLIDTHSILYCAAVAACRLANVKFPNCEEAARPKPAVPAWQRRIERRIDGTRVLIGKLYCFRDGNTRPRVMRFVRQAFSGTGISPREYRNHLTERIDFLKQKVCAWASRIRRYKRRVDRYTQNRMFQSDEMWVYRAWERPEQNEADVCRPDDATTSAFWRGIWSVSVCHTEGDWIQNVEQVCEIIPEMDTILITPSDVAAAVRSLPNWKSPGPDGLHNFWLKWLSNSHTCLASQFQSSLESGSLPQFLTTGITHLLHKSGSTAEPKNYRPITCLPTVYKVLTSILKAKINNHLNSNSIMSVSQNGCKSGSRGTKELLLIDMAISQQVRRSRKDLSTCWIDYKKAYDSVPHTWLMRVLELYKVNATLRTFLRSCMGQWKTVLRYPGSRRIQGNDEPVWIKRGIFQGDSLSPLWFCLALNPLSTLLEDSGLGYRLQRGGQVISHLLYMDDLKLFAPNKLHLMKLLNVTETFSSGIKMEFGVDKCAVMHVKRGQIMESEGITLPDSIHLRSLSSFESYKYLGMSEALGINGADMKQSLKERFFGRLKKVLKSLLSGGNKVRAFNGWVMPVLMYSFGILKWTQTELDALDRRVRTLLTANRMHHPRSSVMRLYIPRKCGGRGFLNAKTLHNREVCSLREHFFKTVVGMHHDVVTVDKGLTPLSMAKENWHKPIILTTDDRKLIWQSKELHGRFYRALHEPDVDFLASVSWLRFSNLFGETEGFVCAIMDEVILTNNYRRYIMKDGTIDMCRACHHPGESIRHIISGCSRLANSEYLHRHNQVARIIHQQLALKYKLVDSEVPYYKYVPDPVLENDHVTLYWDRSIVTDRTIVANKPDIVVIDRLARLAMIVDVTIPHDGNLVKAEKEKQIKYLDLAHEIVDMWNVNSAVIVPIVVSANGLIAKSLDQQLLRLSLGSWIKGLIQKAVLLDTARIVRRFLSLEPLAPVAWTLLPPSVEHYFFIFLNVFVCFLYKYLKM

SEQ ID NO: 29948 - protein, 1202 aa, Amphipyra berbera
MLTRSRTRTTEQRSARPPPPDSPLSSASQPPELGLPVTPAAAALSSSSDEYFSPPTSPRPVRRQGRGRPPNSLGPRGPPAPSRVLAAGGYVQRMKWTQSINENVMRAYYGSTEGGTNLTAYRVRMLTLFQELEPAINVSAQRLSDQVRVIQRNHRLDDAALDRLRLEVQNSRAIPVPSQTAVHQLINVAPPRSDRVDGDEDDGAVTVSSQYNDRLRSALEDAIRECRANPESRPRLPRLPMHNKNRALVCALDSLLASYFESSEDLGDTHSILYCAAVAACRVANVKFNNSERATRPKLAVPAWQCRIERRIDETRALIGKLICFREGNTRPRVMRFVRRAFSGTGISPREYTSRATERIDFLKQKVCAWASRIRRYKRRVERYTQNRMFQCDQRWVYRAWERPDQSVSGGRLPDDDAMSSFWRSIWSVPVIHTEGDWMRDIERTCESIEEMGEIVISPQDVAGAVRPLPNWKSPGPDGLHNFWIKWLRSSHARLASQFQSSLESGSLPQFLTTGVTHLLHKSGSTAEPKNYRPITCLPTVYKLLTSILRSKINTHIGNNSVLSSSQNGCRNGSRGTKELLLIDTAISQQVRRSQKSLSTCWIDYKKAYDSVPHTWLMRVLELYKINTTLRTFLRSCMGQWRTVLRYPGCQPIRRSGEPIRIERGIFQGDSLSPLWFCLALNPLSTLLEGSGLGYPLRRGGQVVSHLLYMDDLKLFAPTKLQLVDLLKVTETFSNSIRMEFGVDKCAVMHVRRGRIMESEGLQLSDSIHLSPLSANDTYKYLGMSEGLGISEADMKQSLRERFFGRLKKVLKSLLSGGNKVRAFNGWVMPVLMYSFGILKWTQTELDALDRRVRTLLTANRMHHPRSSVMRLYIPRKCGGRGLLNAKTLHNREVCSLREFFLHADAGMHRDVVAVDKGLTPLSLARENWRKPVVLSTNDRREIWQSKELHGRFYRALHGPDVDFLASVSWLRFGDLFGETEGFVCAIMDEVIMTNNYRKYIVKDGTVDICRACHCPGESLRHIISGCSRLANGEYLHRHNQVARIIHQQLALKYNLVESEVPYYRYVPDPVLENGRITLYWDRSIITDRTIVANKPDIVVIDRSERRTMIVDVTIPHDGNLVKAEKDKQIKYLDLAHEVVNMWDVESATIVPIVVTANGLMAKSLDKHLMRLSLGGWIKGLIQKAVLLDTARIVRRFLSLEP

SEQ ID NO: 29949 - protein, 868 aa, Mythimna ferrago
MRFVRRAFSGTDISPRDYLPCVTERIDFLKQKIYAWANRIRRYKRRVERYTQNRTFQSNERWVYRAWERPDQGVTDTRLPDDDAMCSFWRSIWSAPVSHTEGDWIREVERACDLLPEMGAITISPQDVARAVRPLPNWKSPGPDGLHNFWLKWFQGSHARLASQFQSALESGSLPQFLTTGITHLLHKSGSTAEPKNYRPITCLPTVYKVLTSILRAKINSHIDTNSIMSVSQNGCRNGSRGTKELLLIDIAISQQVRRSRKNLSACWIDYKKAYDSVPHTWLMRVLELYIVDATLRTFLMSCMGQWRTVLHYPGCRQIWENSEPIRIERGIFQGDSLSPLWFCLALNPLSTLLEGSGLGYRLKRGGQVISHLLYMDDLKLFAPNNLQLMELLKVTETFSSAIRMDFGVDKCAVIHVKRGEIMESEGIQLSDSIHLRSLSSTETYKYLGMSEALDINTDDMKQSLKERFFGRLNKVLNSLLSGGNKVRAFNGWVMPVLMYSFGILKWTQTELDALDRRVRTLLTANRMHHPRSSVMRLYIPRKCGGRGFLNAKSLHNREVCSLREYFLAVDVGMHRDVVAVDKGLTPLSLANENWRKPLVLDTNDRREVWQGKELHGRFYRALHGPDVDLLASVSWLRFGDLFGETEGFVFAIMDEVMMTNNYRKYIVKDGTVDICRACHRPGESIRHIISGCSRLANGDYLHRHNLVARIIHQQLALKYNLVESEVPYYRYVPDPVLDNGSITLYWDRSIITDRTIVANKLDIVVIDRLERRAMIVDIAVPHDENLVKAEKDKQIKYLDLAREVVDMWEVDKAIIVPIVVTANGLIAKSLEQHLRRLSLGSWIKGQIQKAVLLDTARIVRRFLSQEP

SEQ ID NO: 29950 - protein, 975 aa, Ptilodon capucinus
MPNHLRPRIPRLPMLIGNRALVGALDSLLSIYFDSSDNLADTHSILYCAAITVCRVARVKVFNTDTATRPKPAVPAWQCRIERRISEARALIGKLSCFREGNTRPRVMRFVKRAFAGTDVSPREYISRVTERIDFLKQKIYAWANRIRRYKVRVDRYSQNSMFQRDQRWVYRSWERPSEPVSELQRPDDNATTTFWRDIWSVPVTHYEGDWIGDVERMCEPIKEMEAISIGPLDVANAVRSLPNWKAPGPDGLHNFWLKWLRSSHVRLASQFQSALQFGSLPEFITTGVTHLLHKTGSTTDPKNYRPITCLPTIYKTLTSILRAKIARHVEDNSIMSASQNGCRSGSRGTKELLLIDMTICQQARRNRKDLSTCWIDYKKAYDSVPHTWLVRVLELYKIDTTLRTFLESCMRQWKTVLLCPGSRQILGNGEPIRIERGIFQGDSLSPLWFCLALNPLSTLLEESGFGFRLRRGGQVISHLLYMDDLKLFAPTALQLTGLLKVTETFSNSIRMEFGVDKCAVMHAKQGRLVESEGIQLSDSIQLRSLAATETYKYLGMSQGLGISETDMKQLLRDRFLGRLKKVLKSLLSGGNKVRAYNSWVMPVLMYSFGILKWTQTELDTLDRTVRTTLTSYRMHHPRSSVMRLYIPRKCGGRGFLNVKTLHNREICSLREYFVRADGEMHVDVVAVDNGLTPLSLAKENWRKPVVLTTDDRRLVWQGKELHGRYYRALHGPDVDLAASVAWLRFGDLFGETEGFVCAIMDEVVMTNNYRKYILRDGTIDICRACHRPGESLRHIISGCSRLANGQYLHRHNQVARIIHQQLALKYRLVTSEVPYYRYESQPVLEEGHISLYWDRSIITDRTIVANKPDIVLIDRQERRAMIVDITVPHDENLVKAEKDKESKYLDLAHEVVDMWDIDAAIIVPIVVSAHGLLAKSLDKHLKRLALGGWIKGQIQKAVLLETARIVRKFLSLEP

SEQ ID NO: 29951 - protein, 1199 aa, Amphipyra tragopoginis
MLTRAQARANARPPPPDSSPSSASQQQGLDPASPAVAVASSSSDEYYSPPSSPPPARRRGGTRPPVGLGLRGPLASDRVPAPGGIVPRMKWTRTINENVMRAYYGAIEGGTNLTAYRGRMLSLFQVLEPAVNVSAQRLSDQVRVIQRGHMLDDTVLDRIRSEVQNSPVISPSPQVLEQSQNLAATLPRPNRADEEDDDRATNVSTQCNEELRSALEDAMREYRFIRPDLRPRIPRLPMHRKNRALVCALDSLLSNYFDGSEDLSDTHSILYCAAVAACRVAHIKFTDNERATRPKNAVPAWQCRIERRIAEARALIGKLVCFREGNSRPRVMRFVRRAFSGTDVSPREYMSRVTERIDFLKQKVYAWANRIRRYRRRVDRYTQNRLFQSDERWVYRTWERPDQRVSDTRLPDDDVMNAFWRNIWSVPVTHTEGDLMQEVQRACEPIQEMGDIIISPQDVASAVRPMSNWKSPGPDGLHNFWLKWLRSSHARLASQFQSSLESGSLPQFLTTGVTHLLHKSGSTAEPKNYRPITCLPTVYKVLTSILRAKINNHIDNNSIMSASQNGCRNGSRGTKELLLIDMAISQQVRRSRKDLSTCWIDYKKAYDSVPHTWLMRVLELYKVNTTLCAFLTSCMGQWRTVLHYPGCRQIQGMGEPIRIERGIFQGDSLSPLWFCLALNPLSTLLEGSGLGYRLRRGGQVISHLLYMDDLKLFAPNNLRLLELLKVTETFSNSIRMEFGVDKCAVMHVKRGRIMESVGTQLSDSIHLRSLSSTETYKYLGMSEALGINETDMKQSLRERFYGRLKKVLNSLLSGGNKVRAFNGWVMPVLMYSFGILKWTQTELDALDRRVRSLLTANRMHHPRSSVMRLYIPRKCGGRGILNAKTLHNREVCSLREYFSQADVGMHRDVVAVDKGLTPLSLAKENWRKPVVLDTNGRREVWRSKELHGRFYRALHGPDVDFLASVAWLRFGDLFGETEGFVCAIMDEVMMTNNYRKYIVKDGTVDICRACHCPGESIRHIVSGCSRLANGEYLHRHNLVARIIHQQLALKYNLVDAEVPYYRYVPDPVLENGHVTLYWDRSIITDRTIVANKPDIVVIDRSKRLTVIVDITVPHDENLVKAEKDKEIKYQDLAHEVVAMWDVDSAIIVPMVVTANGLIAKSLDQHLKRLSLGSWIKGLIQKAVLLDTARIVRKFLSLRP

SEQ ID NO: 29952 - protein, 1207 aa, Amphipyra tragopoginis
MLTRSRAKTLQRTHPTPSASSLSSASQPPEPASIVSDVTPAAAVASSSSDEYFSPATSPSPPPARRRGRGRPPTCLGPRGPPASDRVPAPGGSVQRMRWTQSMNENCMRAYFGATEGGTNLTAYRGRMLSLFQTLEPAVNVSAQRLSDQVRVIQRDHRLDDAALGRLRDEMQNSHATPPPSQIRTQPLVPPAVPLQPNHADEEEQDRAISAGTQYSEIMRSALEDALREFRSTPPELRPRLPRLPMHNKNRALVCALDSLLSNVLESSKDIGDTHSILYCAAVAACRVAHVKFPNDNRATRPKSTVPAWQCRIERRIDEARVLIGKLTCFREGNIRPRVMRFVRRAFSGTDVSPGEYVSRVTERIDFLKQKVYAWANRIRRYRRRVDRYTQNRIFQSDQRWVYRTWERPDQGVSDTHLPDNDVMNAFWRNIWSVPVTHTEGDWMQEVQRACEPIQEMGAVTIGPQDVTSAVRPMPNWKSPGPDGLHNFWIKWLRSSHARLASQFQSSLESGSLPSFLTTGVTHLLFKSGSTAEPKNYRPITCLPTVYKLLTSILRAKINNHIDNNAIMSDSQNGCRNGSRGTKELLLIDMAISQQVRRSRKDPSTCWIDYKKAYDSVPHAWLMRVLELYKINATLRTFLMSCMGQWRTVLHYPGCRQIQGNGELIRIERGIFQGDSLSPLWFCLALNPLSTLLEGSGLGYRLRRGGQVISHLLYMDDLKLFAPNNLQLVELLKVTETFSNSIRMEFGVDKCAVMHVKRGRIMESVGTQLSDAIHLRSLSSTETYKYLGMSEALGINEADMKQSLKERFFGRLIKVLKSLLSGGNKVRAFNGWVMPVLMYSFGILRWTQTELDALDRRVRTLLTAYRMHHPRSSVMRLYIPRKCGGRGFLNAKTLHNREVCSLREYFSQADVGMHRDVVAVDKGLTPLSLAKENWRKPVVLDTNGRREVWRSKELHGRFYRALHGPDVDFLASVAWLRFGDLFGETEGFVCAIMDEVMMTNNYRKYVVKDGTVDICRACHCPGESIRHIVSGCSRLANGEYLHRHNLVARIIHQQLALKYNLVDTEVPYYKYVPDPVLENGHVTLYWDRSIITDRTIVANKPDIVVIDRLERRTVIVDIAVPHDENLVKAENDKKIKYLDLAHEVVDMWDVDSAVIVPIVVTANGLIAKSLDQHLMRLSLGSWIKGLIQKAVLLDTARIVRKFLSLEP

SEQ ID NO: 29953 - protein, 1201 aa, Amphipyra tragopoginis
MLTRARTREARPPPPDSPLSSASQPPESSPTVSAVTPAAAVASSSSDEYFSPPTSPTPVRRQGRRRPPNSLGPRGPPAPSRVLATGGCVQRMKWTQSINENVMRAYYGSTEGGTNLTAYRVRMLTLFQELEPAINVSVQRLSDQVRVIQRNHRLDDAALDRLRLEVQNSRVTPVPSQTAVHHININVVPPRSDCVDGDVDDRAVTVSSQYNDRLRSALEDAIREYRANPELRPRLPRLPMHNKNRALVCALDSLLSSYFESSEDLVDTHSILYCAAVAACRVANVKFNNSERATRPKPAIPAWQCRIERRIDGARALIGKLICFREGNTRPRVMRFVRRAFSETGISPREYMSQVTERIDFLKQKVCAWASRIRRYKRRVERYAQNRMFQCDQRWVYRAWERPDQGVSDGRLPDDDAMSSFWRSIWSVPVTHTEGDWTRDIERACEPIEEMGEILISPQDVASAARPLPNWKSPGPDGLHNFWIKWLRSSHARLASQFQSSLESGSLPQFLTTGVTHLLHKSGSTAEPKNYRPITCLPTVYKLLTSILRTKINTHVENNSIMSPSQNGCRNGSRGTKELLLIDMAISQQVRRSRKSLSTCWIDYKKAYDSVPHTWLMRVLELYKINATLRTFLTSCMRQWRTVLRYPGCRPILGSGEPISIERGIFQGDSLSPLWFCLALNPLSTLLEGSGLGYPLRRGGQVVSHLLYMDDLKLFAPTKLQLVELLNVTETFSNSIRMEFGVDKCAVMHVRRGGIMESEGLQLSDSIHLRSLSANDTYKYLGMSEGLGISEADMKQSLRERFFGRLKKVLKSLLSGGNKVRAFNGWVMPVLMYSFGILKWTQTELDALDRRVRTLLTANRMHHPRSSVMRLYIPRKCGGRGLLNAKTLHNREVCSLREYFLHADAGMHRDVVAVDKGLTPLNLAKENWRKPVVLSTNDRREVWQSKELHGRFYRALHGPDVDFLASVSWLRFGDLFGETEGFVCAIMDEVIMTNNYRKYIVKDGTVDICRACHCPGESLRHIISGCSRLANGEYLHRHNQVARIIHQQLALRYNLVESEVPYYKYVPDPVLENGHITLYWDRSIITDRTIVANKPDIVVIDRSERRTVIVDVTIPHDENLVKAEKDKQIKYLDLAHEVVNMWDVDSATIVPIVVTANGLMAKSLDQHLKRLSLGGWIKGLIQKAVLLDTARIVRRFLSLEP

SEQ ID NO: 29954 - protein, 1201 aa, Amphipyra tragopoginis
MLTRARTREARPPPPDSPLSSASQPPESSPTVSAVTPAAAVASSSSDEYFSPPTSPTPVRRQGRRRPPNSLGPRGPPAPSRVLATGGCVQRMKWTQNINENVMRAYYGSTEGGTNLTAYRVRMLTLFQELEPAINVSAQRLSDQVRVIQRNHRLDDAALDRLRLEVQNSRVTPVSSQTAVHHININVVPPRSDCVDGDVDDRAVTVSSQYNDRLRSALEDAIREYRANPELRPRLPRLPMHNKNRALVCALDSLLSSYFESSEDLVDTHSILYCAGVAACRVANVKFNNSERATRPKPAVPAWQCRIERRIDGARALIGKLICFREGNTRPRVMRFVRRAFSGTGIGPREYMSQVTERIDFLKQKVCAWASRIRRYKRRAERYAQNRMFQCDQRWVYRAWERPDQGVSDGRLPDDDAMSSFWRSIWSVPVTHTEGDWTRDIERACEPIEEMGEILISPQDVASAARPLPNWKSPGPDGLHNFWIKWLRSSHARLASQFQSSLESGSLPQFLTTGVTHLLHKSGSTAEPKNYRPITCLPTVYKLLTSILRTKINTHVENNSIMSPSQNGCRNGSRGTKELLLIDMAISQQVRRSRKSLSTCWIDYKKAYDSVPHTWLMRVLELYKINTTLRTFLTSCMRQWRTVLRYPGCRPTLGSGEPISIERGIFQGDSLSPLWFCLALNPLSTLLEGSGLGCPLRRGGQVVSHLLYMDDLKLFAPTKLQLVELLKVTETFSNSIRMEFGVDKCAVMHVRRGGIMESEGLQLSDSIHLRSLSANDTYKYLGMSEGLGISEADMKQSLRERFFGRLKKVLKSLLSGGNKVRAFNGWVMPVLMYSFGILKWTQTELDALDRRVRTLLTANRMHHPRSSVMRLYIPRKCGGRGLLNAKTLHNREVCSLREYFLHADAGMHREVVAVDKGLTPLNLAKENWRKPVVLSTNDRREVWQSKELHGRFYRALHGPDVDFLASVSWLRFGDLFGETEGFVCAIMDEVIMTNNYRKYIVKDGTVDICRACHCPGESLRHIISGCSRLANGEYLHRHNQVARIIHQQLALKYNLVESEVPYYRYVPDPVLENGHITLYWDRSIITDRTIVANKPDIVVIDRSERRTMIVDVTIPHDESLVKAEKDKQIKYLDLAHEVVNMWDVDSATIVPIVVTANGLMAKSLDQHLKRLSLGGWIKGLMQKAVLLDTARIVRRFLSLEP

SEQ ID NO: 29955 - protein, 962 aa, Noctua pronuba
MHKKNKALMCALDSQLSNCFDSSKDLADTHSILYCGAVAACRVAHVKFPNNDRATRPKLAVPAWQCRIERRIGEARALIGKLICFREGNTRPRVMRFVRRAFSGTDISFRDYLTRVTERIDFLKQKICAWASRIRRYKRRVERYTQNRTFQSDERWVYRAWERPDQGVTDTRLPDDDAMCSFWRSIWSVPVSHTEGDWTREVERACDPIPQMGAINISPQDVACAVRPLPNWKSPGPDGLHNFWIKWFQRSHARLASQFQSALESGSLPQFLTTGITHLLHKSGSTAEPKNYRPITCLPTVYKVLTSILRAKINHRIDSNSIMSASQNGCRNGSRGTKELLLIDTAISQQVRRSRRDLSTCWIDYKKAYDSVPHTWLMRVLELYKVDATLRTFLMSCMGHWRTVLRYPGCRQIQGNSEPIRIERGIFQGDSLSPLWFCLALNPLSTLLEGSGLGYRLRRGGQVISHLLYMDDLKLFAPNNLQLMKLLKVTETFSSAIRMEFGVDKCAVMHVKRGEIMESVGMQLSDSIYLRSLSSTETYKYLGMSEALGINTADMKQSLRERFFGRLNKVLGSLLSGGNKVRAFNGWVMPVLMYSFGILKWTQTELDALDRRVRALLTANRMHHPRSSVMRLYIPRKCGGRGFLNAKTLHNRELCSLREYFLEADVGMHRDVVSVDKGLTPLSLANGNWRKPRVLDTNDRKEVWQGKELHGRFYRALHGPDVDFLASVSWLRFGDLFGETEGFVCAIMDEVMMTNNYRKYIVKDGTVDICRACHRPGESIRHIISGCSRLANGEYLHRHNLVARIIHQQLALKYNLVESEVPYYKYAPDPVLDDGNITLYWDRSIITDRTIVANKPDIVVIDRLERRAMIVDITVPHDENLVKAEKDKQFKYLDLAHEVVDMWDVNTAVIVPIVVSANGLIAKSLDQHLKRLALGSWIKGLIQKAVLLDTARIVRRFLSQEP

SEQ ID NO: 29956 - protein, 1090 aa, Ochropleura plecta
MLTRRRAQEQQALPPSPGSSLSSASQSPGRATHVSAVSPVAAVASSSSDEFFSPPSSPPPTRQRRGRGRPPAGLGSRGQQAPIRIPAAGGNVSRMRWTSSINANVMRAYYGSTEGGTNLTAYRVRMLSLFQDLEPTINVSAQRLSDQVRVIQRNHMLDDAALDRLRSEVLSNRIILTTPQTAVQASVIDGMQPRSDPAVVEEDDRVATVSSQCNERLRSALEDALRDYRSTPAELRPRLPRLPMHKKNRALVCALDSQLKNLFESNEDLVDTHSILYCGAVAVCRLANVKFPSCDVATRPKPSVPTWQCRIERRIDEARVLIGKLYCFREGNTRPRVMRFVRRAFSGTGISPQEYMSRTTERIDFLKQKVYAWANRIRRYKRRVDRYLQNRIFRSDERWVYRAWERPEQSVTDVCRPDDVATSSFWHSIWSVPVCHTEADWMRDVERVCETIPDMEPILITSLDIASAVRPLPNWKSPGPDGLHNFWLKWLTSSHTRLASQFQSCLESGSLPQFLTTGVTHLLYKSGSPAEPKNYRPITCLSTVYKLLTSILRAKINSHIDKNSIMSASQNGCRNGSRGTKELLLIDMAISQQVRRSRKDLSTCWIDYKKAYDSVPHTWLKRVLELYKIDATLRAFLESCMGQWRTVLRYPGCRQIQGNDEPVWIKRGIFQGDSLSPLWFCLALNPLSTLLEDSGLGYRLRRGGQVISHLLYMDDLKLIASNKLRLMELLKVTETFSNAIRMEFGVDKCAVMYVKRGEIMESEGIQLSDSIHLRSLSSSESYKYLGMSEALGINVADMKQLLRERFFGRLKKVLKSLLSGGNKVRAFNSWVMPVIMYSFGILKWTQTELDALDRRVRTLLTGNRMHHPRSSVMRLYIPRKCGGRGFLNAKTLHNREVCSLREYFLKTDVGMHRDVVAVDKGLTPLSMAKENWRKPVVLTTDDRKVVWQGKELHGRFYKALHGPDVDFLASVSWLRFGDLFGETEGFVCAIMDEVMLTNNYRKYIMKDGTVDVCRACHRPGESIRHIISGCSRLANSEYLHRHNQVARIIHQQLALKYNLVESEVPYYKYVPDPVLEKDHVTRVLGSVYHY

SEQ ID NO: 29957 - protein, 962 aa, Xestia xanthographa
MHNKNKALMCALDSQLSNCFDSSKDLTDTHSILYCGAVAACRVAHVKFPNNDGATRPKLAVPAWQCRIERRIGEATALIGKLICFREGNTRPRVMRFVRRAFSGTDISFRDYLARVTERIDSLKQKICAWASRIRRYKRRVERYTQNRTFQSDERWVYRAWERPDQGVTDTRLPDDSAMYSFWRNIWSVPVSHTEGDWTREVEQACDPIPEMGAIIISPQDVARAVRPLPNWKSPGPDGLHNFWIKWFQRSHARLASQFQSALESGSLPQFLTTGITHLLHKSGSAAEPKNYRPITCLPTVYKVLTSILRAKINQHIDSNSIMSASQNGCRNGSRGTKELLLIDMAISQQVRRSRKNLSTCWIDYKKAYDSVPHTWLMRVLELYKIDATLRTFLMSCMGHWRTVLRYPGCRQIQGNSEPIRIERGIFQGDSLSPLWFCQALNPLSTLLERSGLGYLLRRDGQVISHLLYMDDLKLFAPNNFQLMKLLKVTETFSSAIRMEFGVDKCAVMHVKRGEIMESEGTQLSDSTHLRSLSSTETYKYLGMSEALGINTADMKQSLRERFFGRLNKVLGSLLSGGNKVRAFNGWVMPVLMYSFGILKWTQTELDALDRRVRTLLTANRMHHPRSSVMRLYISRKCGGRGFLSAKTLHNREVYSLREYFLEAEGEMHRDVVSVDKGLTPLSLANGNWRKPKVLDTNDRKVEWQGKELHGRFYRALHGPDVDFLASVSWLRFGDLFGETEGFICAIMDEVMMTNNYRKYIVKDGTVDICRACHRPGESIRHIISGCSSLANGEYLHRHNLVARIIHQQLALKYNLVESEVPYYKYAPDPVLDNGHITLYWDRPITTDRTVVANRPDIVVIDRLERRTMIVDITIPHDENLVKAEKDKQFKYLDLAREVVDMWDVGTAVIVPIVVSANGLIAKSLDQHLRRLSLGSWIKGLIQKAVLLDTARIVRRFLSQEP

SEQ ID NO: 29958 - protein, 1192 aa, Limenitis camilla
MLTRARAKNVRSPTSPGSSDNSTSQVPEHTEEVVAVVSSSSDEYFSPPTSPSPVRRPGRGRPPRSLGPRGQPASRQVPAIDGYVQRMKWTQCINENVMRAYYGSTEGGTNLTAYRDRMLSLFQKLEPSINVSAQRLSDQVRIILRNHRLNDTVLERIRSEVHDSRVIPSSIQATLPGPSPPSPNQRDEEEDDTTITAGKKYDELLRSALEDAIREYRYTTDEIRPRLPRLPMHKKNRALVCTLDSLLPMYFESSEDLKDTHSILFCAAVAVCRVAHVKLVNTETTRPKPDVAAWQSRIERRIDETRVLIGKLYSFREGNTRPRLMRFVRRAFSGTEICPPEYMARVTERIDTLKQKIYAWANRIRRYRRRVDRYSQNRMFQKDQKWVYRTWERPDQNVDDIHRPDDDDTNKFWRSIWSVSVDHTEGDWMREIRQTREPLQAMEHISITCKDVADAVRSVPNWKSPGPDGLHNFWLKWLRSSHACLASQFQSALESGSLPQFLTTGITHLLHKSGSTTEPKNYRPITCLPTVYKLLTSILRDKIDSHITKNAIMSVSQNGCRNRSRGTKELLLIDMTISQQVRRSRKDLSTCWIDYKKAYDSVPHGWLMRVLELYKVDATLCAFLGSCMRQWRTVLRYPGCRPIQGNNEPIRIKRGIFQGDSLSPLWFCLALNPLSTLLENSGLGYRLRRGGQVISHLLYMDDLKLFVPTKLQLIELLKITKTFSNSIRMEFGVDKCAVMHVKRGKIEESEGIQLSDSVNLRSLSADETYKYLGMSEALGIIEIDMKQSVRERFLARLRKVLKSLLSGGNKVRAYNGWVMPILMYSFGILKWTQKELDDLDRKVRALLTTYRMHHPRSSVMRLYIPRKCGGRGFLNAKSLHNREVCNLREYFLQTDVGMHRDVVAMDKGLTPLSLAKENWRKPIVLSTDNRKEVWKSKELHGRFYRALHGDEVDFKASVSWLRFGNLFGETEGFVCAIMDEVIMTRNYRRYIVRDGTVDICRACHSSGESLRHIISGCPRLANGEYLHRHNQVAKIIHQQLALRYGLVESEVSYYRYAPDPVLENGHVTLYWDRTIITDRTIIANKPDIVVIDRSERCTMIVDVTIPHDGNLVKAEKDKQMKYLDLAHEIVDMWDVDSAVVVPIVVTANGLIVKSLDQHLKRLALDGWVKGLMQKAVLLDTARIVRKFLYLEP

SEQ ID NO: 29959 - protein, 1200 aa, Arctia plantaginis
MLTRARSRALTTSPDSSLRSVLPSPEATTEVPAVAEASSSTSSDEFFSPPTSPTPVRRQGRGRPPTSLGSRGLLTSNRVPATGGDVRRMKWTKSINENVMRAYYRATEVGTNLTAYRVRLVSLFQELEPAVNVSAQRLSDQVRAIQRCHLLDDAVLERIRSDIRNSLIIPSSSHIVDSVANSTPQLASYTDDIDELVESEVISVSTQYNNRIRSALEDAILEYRYLNCNDRPRLFRLPIHKRNLALVGALDSLLPEYLDNSEDLSDTHSILYCAAIAVCRVAGVKIANNVTTTRPKSTVPAWQYRIERRITETRTLIGKLISYRSGNMRPRVMRFVKQAFLGTTISPQQYMSCVTERIDFLKQKIYAWANRIRRYKKRIDRYNQNRMFQRNEKWVYRKWEEPDPCVGDRHLPDENVTNTFWRNIWSVPVTHIEGDWLQDVRRSCECITPMEPVKIDKDDVSCAVRSLPNWKSPGPDGLHNFWLKWFRSSHARLASQFQAALDSGSLPQFLTTGITHLLYKSGSVMDPKNFRPITCLPTMYKLLTSILRLKITLHINNNSIMSVSQNGCRSGTRGTKDLLIIDMTISQQVRCNRKSLATCWIDYKKAYDSVQHTWLLKVLELYKIDTTLCTFLKSCMGQWRTALRYPGCRQTAIHDVLIKIERGIFQGDSLSPLWFCLALNPLSTLLEGSGLGYRLQKDDQVISHLLYMDDLKLLASNKLQLTKLLKVTENFSNSIKMEFGVDKCAVMYVKKGVIVESEGIELLDSTKLRSLSATETYKYLGISQSLGIPESNMKQTLQERFFGRLKKVLKSLLSGANKVRACNGWVMPVLMYSFGILRWTQTELDALDRKVRTLLTASRMHHPRSSVMRLYIPRKLGGRGLLNIKTLHNREVCNLREYFLHTDVGVHRNVVAVDTGFTPLALAKENWRRPVVLGVNDRREVWKGKELHGRFYRALNGSDVDLKASTTWLRHGDLFGETEGFVCAIMDEVIMTNNYRKYILKDGTVDICRACHRPGESIRHIISGCSRLANGEYLHRHNQVARIVHQQLALKYHLVNLEVPYYRYVPDPVLENGRATLYWDRSIITDRTIVANKPDIVLIDRLERRAMIVDIAVPHDENLVKVEKEKQIKYLDLSHEIVDMWNVDSVIIVPIVVSAHGLIAKSLDQHLKRLTLDGWIKGLMQKAVLLDTARIVRRFLSLES

SEQ ID NO: 29960 - protein, 1111 aa, Agrochola circellaris
MRWTQSMNENVMRAYYGSTEGGTNLTAYRVRMLSLFQELEPTANVSAQRLSDQVRVIQRNHRLDDAALDRLRSEVLSNHIVSTPTQTAAQASSIDAIPPRSNHGVAEEDDRAATVSSQCNVRLRSALEDAFREYRYTPTELRPRLPRLPMHKKNRALVCALDSQLRNYFENSEDLIDTHSILYCAAVAACRLANVKFPNCDGVTRPKPAVPAWQCRIEQRIDGARALIGKLYCFREGNTRPRVMRFVRRAFLGTGISPREYMPRVTERIDFLKQKVCAWASRIRRYKRRVERYTQNRMFQSDQRWVYRAWERPKQNVADVCRPDDAATSAFWRSIWSVPVCHTEADWMRDVERVCETIPEMEKIEITPLDIARAVRPLPNWKSPGPDGLHNFWLKWLISSHTCLASQFQSSLESGSLSQFLTTGVTHLLHKSGSPAEPNNYRPITCLSTVYKLLTSILRAKINTHIDNNSIMSASQNGCRNGSRGTKELLLIDMAISQQVRRSRKDLSTCWIDYKKAYDSVPHTWLMRVLELYKIDATLRTFLMSCMGQWRTVLRYPGCRQIQGNDEPVWIKRGIFQGDSLSPLWFCLALNPLSTLLEDSGLGYRLRRGGQVISHLLYMDDLKLFAPNKLRLMELLKVTETFSSAIRMEFGVDKCAVMHVKRGEIMESEGTQLSESIHLRSLSSSESYKYLGMSEALGINVADMKQSLKERFFGRLKKVLISLLSGGNKVRAFNGWVMPVLMYSFGILKWTQTELDALDRRVRTLLTANRMHHPRSSVMRLYIPRKCGGRGFLNAKTLHNREVCNLREYFLKAEVGMHRDVVAVDKGLTPLSMAKENWHKPVVLTTDDRKEVWQSKELHGRFYRALHEPGVDFLASVSWLRFGDLFGETEGFVCAIMDEVILTNNYRRYIMKDGTVDVCRACHRPGESIRHIISGCCRLANGEYLHRHNQVARIIHQQLALKYKLVVSEVPYYKYVPDPVLENDHVTLYWDRSIITDRTIAANKPDIVVIDRLARHAMIVDVTIPHDGNLVKAEKEKQIKYLDLAHEVVDMWNVSSAIIVPIVVTANGLMAESLDQHLSRLSLGGWIKGLIQRAVLLDTARIVRRFLSLQP

SEQ ID NO: 29961 - protein, 1203 aa, Eupsilia transversa
MLTRSAVRRARLPPPDSPLSSASPPPVPSPIVSAVSTPAAVVASSSSDEYFSPPTSPTPVRRQGRGRPPKSLGLRGQPAPSRVPAAGGCVQRMRWTQSMNENVMRAYYGSTEGGINLTAYRVRMLSLFQELEPTVNVSAQRLSDQVRVIQRNHRLDDAELDRLRSEVLSNHIIPSPAQTAELATPSNVIPPRSNRGLEQEDDRVATVSSQCNDRLRNALEDAFREYRYTPTELRPRLPRLPMHKKNRALVCALDSQLKNFFESSEDLIDTHSILYCAAVAACRLANVKFPNCDAATRPKPAVPAWQCRIERRIDGARVLIGKLYCFREGNTRPRVMRFVRRAFSGTGISPQEYMSRVTERIDFLKQKVCAWASRIRRYERRVDRYTQNRMFQSDERWVYRAWERPEQNVADVCRPDDAATSAFWRSIWSVPVCHAEAGWMHGVERVCEAIPEMEAVIITPLDVARAVRPLPNWKSPGPDGLHNFWLKWLISSHTRLASQFQSSLESGSLPQFLTTGVTHLLHKSGSPAEPKNYRPITCLSTVYKLFTSILRAKINSHIDSHSIMSASQNGCRNGSRGTKELLLIDMAISQQVRRSRKDLSTCWIDYKKAYDSVPHTWLMRVLELYKIDATLRTFLMSCMGQWRTVLRDPGCRQIQGNDEPVWIKRGIFQGDSLSPLWFCLALNPLSTLLEESGLGYRLRRGGQVISHLLYMDDLKLFAHNKLRLMELLKVTETFSSAIRMEFGVDKCAVMHVKRGEIMESEGTQLSDSIHLRSLSSTESYKYLGMSEALGINVADMKQALKERFFGRLKKVLISLLSGGNKVRAFNGWVMPVLMYSFGILKWTQTELDALDRRVRTLLTANRMHHPRSSVMRLYIPRKCGGRGFLNAKTLHNREVCSLREYFFKTEEGMHRDVVAVDKGLTPLSMAKENWRKPVVLTTDDRKEVWQSKELHGRFYRVLHEPGVDFLASVSWLRFGDLFGETEGFVCAIMDEVILTNNYRRHIMKDGTVDVCRACHRPGESIRHIISGCSRLANGEYLHRHNQVARIIHQQLALKYKLADSEVPYYKYVPDPVLENDHVTLYWDRSIITDRTIVANKPDIVVIDRLARRAMIVDVTIPHDENLVKAEKEKQIKYLDLAHEVVDMWNVSSAIIVPIVVTANGLMAESLDQHLLRLSLGGWIKGLIQKAVLLDTARIVRRFLSLQP

SEQ ID NO: 29962 - protein, 868 aa, Amphipyra tragopoginis
MRFVRRAFSGTDVSPREYMSRVTERIDFLKQKVYAWANRIRRYRRRVDRYTQNRLFQSDERWVYRTWERPDQRVSDTRLPDNDVMNTFWRNVWSVPVAHTEGDWMQEVQRACEPIQEMGDIIISPQDVASAVRPMSNWKSPGPDGLHNFWLKWLRSSHARLASQFQSSLESGSLPQFLTTGVTHLLHKSGSTAEPKNYRPITCLPTVYKVLTSILRTKINNHIDNNSIMSASQNGCRNGSRGTKELLLIDMAISQQVRRSRKDLSTCWIDYKKAYDSVPHTWLMRVLELYKVNTTLCAFLTSCMGQWRTVLRYPGCRQIQGIGEPIRIERGIFQGDSLSPLWFCLALNPLSTLLEGSGLGYRLRRGGQVISHLLYMDDLKLFAPNNLRLLELLKVTETFSNSIRMEFGVDKCAVMHVKRGRIMESVGTQLSDSIQLRSLSSTETYKYLGMSEALGVNETDMKQSLKERFFGRLKKVFNSLLSGGNKVRAFNGWVMPVLMYSFGILKWTQTELDALDRRVRSLLTANRMHHPRSSVMRLYIPRKCGGRGFLNAKTLHNREVCSLREYFSQADVGMHRDVVAVDKGFTPLSLAKENWRKPVVLDTNGRREVWRSKELHGRFYRALHGPDVDFLASVAWLRFGDLFGETEGFVCAIMDEVMMTNNYRKYIVKDGTVDICRACHCPGESIRHIVSGCSRLANGEYLHRHNLVARIIHQQLALKYNLVDAEVPYYKYVPDPVLENGHVTLYWDRSIITDRTIVANKPDIVVIDRSERLTMIVDITVPHDENLVKAEKDKEIKYQDLAHEVVAMWDVDSAIIVPIVVTANGLIAKSLDQHLKRLSLGSWIKGLIQKAVLLDTARIVRKFLSLRP

SEQ ID NO: 29963 - protein, 1194 aa, Autographa pulchrina
MLTRSRTRRPARPPPPDSSPSSASQLPDHVQAPAPAVASSSSDEYYSPPTSPTPVRRQGRRRPPSSLVPSGQPASNRAPAPGGDVRRMKWTQGINENVMRAYYGATEGGTNLTAYRARMLSLFQVLEPGVSVSAQRLSDQVRVIQRNHRLDDSTLDRLRSEIQSSPATNTLPPATAPVSGAPHTAPSDGEEDDGAMTVSTQCSELIRSTLEDAIRDYRTSPPDQRPRLPRLPMHNRNKAIMGALDSLLPIYFESSEDLRDTHSILYCAALTACRVANVAICYSNIAARPKPAVPAWQCRIEQRVAEARTLIAKLIAFKQGNSRPRVMRFVRRAFAGTDISSSEYTARVTERIDLFKQKVCAWASRIRRYKRRVERFYLNRMFQKDQRWVYRVWERPASGVDGGCLPDGDATNSFWRSIWSVPVSHSEGGWMREVEQVCEPIQEMGAITISPQDVANAVRPMANWKTPGPDGLQNFWLKWLRSSHGCLASQFQSAVESASLPQFLTTGSTHLLHKTGSATDPKNYRPITCLPTVYKLLTSILRAKISEHVVSFSIMSASQNGCRSGSRGTKELLLIDTAICQQVRRSKKDLSTCWIDYKKAYDSVPHTWLMRVLELYKINATLRAFLVSCMGQWSTVLHYPGCRDIQQGGEPIRIERGIFQGDSLSPLWFCLALNPLSTLLENSRLGYSLRRGSQVISHLLYMDDLKLFANSGLQLMKLLKITESFSNSIRMEFGVDKCAVMHVKRGGVVESQGIQLSDSINLRSLSATETYKYLGMSEALGINGADVKQSLQARFFGRLNKVLKSVLSGGNKVRAFNGWVMPVLMYSFGVLKWTQTELDALDRRVRTLLTANRMHHPRSSVMRLYIPRKCGGRGFLNAKTLHNREVCNLREYFLQVDVGMHRDVVVVDKCLTPLSLGKENWHKPVVLSVKDREVVWQSKELHGRYYRTLHGSDVDFLASVAWLRFGDLFGETEGFVCAIMDEVIMTNNYRKYIIKDGTVDICRACHCPGESLRHIISGCSRLANGEYLHRHNQVARIIHQQLALRYKLVESEVPYYRYVPDPVLENGRVTLYWDRSIITDRTIVANKPDIVVIDRSERRAIIVDITIPHDENLVKAEKEKQLKYLDLAHEVVDMWEVDSAIIVPIVVTANGIIAKSLDQHLKRLSLGAWVKGLMQKAVLLDTARIVRRFLSLEP

SEQ ID NO: 29964 - protein, 1194 aa, Autographa pulchrina
MLTRSRKRKPARPPSPDSSPSSASQLPDHVQAPAPAVASSSSDEYYSPPTSPTPVRRQGRRRPPSSLAPAGQPASNRAPAPGGDVRRMKWTQGINENVMRAYYGATEGGTNLTAYRARMLSLFQVLEPGVSVSAQRLSDQVRVIQRNHRLDDSTLDRLRSEIQSSPATNTLPLAAAPVSGAPHTAPSDGEEDDGAMTVSTQCSELIRSTLEDTIRDYRTSPPDQRPRLPRLPMHNRNKAIMGALDSLLPIYFESSEDLRDTHSILYCAALTACRVANVAICYSNIAARPKPAVPAWQCRIEQRVAEARTLIAKLIAFKQGNSRPRVMRFVRRAFAGTDISSSEYTARVTERIDLFKQKVCAWANRIRRYKRRVERFYLNRMFQKDQRWVYRAWERPASGVDGGCLPDGDATNSFWRSIWSVPVSHSEGGWMREVEQVCEPIQEMGAITISPQDVANAVRPMANWKTPGPDGLQNFWLKWLRSSHGCLASQFQSAVESASLPQFLTTGSTHLLHKTGSATDPKNYRPITCLPTVYKLLTSILRAKINEHVVSFSIMSASQNGCRSGSRGTKELLLIDTAICQQVRRSKKDLSTCWIDYKKAYDSVPHTWLMRVLELYKINATLRAFLVSCMGQWSTVLHYPGCRDIQQGGEPIRIERGIFQGDSLSPLWFCLALNPLSTLLENSRLGYSLRRGSQVISHLLYMDDLKLFANSGLQLMKLLKITESFSNSIRMEFGVDKCAVMHVKRGGVVESQGIQLSDSINLRSLSATETYKYLGMSEALGINAADVKQSLQARFFGRLNKVLKSVLSGGNKVRAFNGWVMPVLMYSFGVLKWTQTELDALDRRVRTLLTANRMHHPRSSVMRLYIPRKCGGRGFLNAKTLHNREVCNLREYFLQVDVGMHRDVVVVDKGLTPLSLGKENWHKPVVLSVKDREVVWQSKELHGRYYRTLHGSDVDFLASVAWLRFGDLFGETEGFVCAIMDEVIMTNNYRKYIIKDGTVDICRACHCPGESLRHIISGCSRLANGEYLHRHNQVARIIHQQLALRYKLVESEVPYYRYVPDPVLENGRVTLYWDRSIITDRTIVANKPDIVVIDRSERRAIIVDITIPHDENLVKAEKEKQLKYLDLAHEVVDMWEVDSAIIVPIVVTANGIIAKSLDQHLKRLSLGAWVKGLMQKAVLLDTARIVRRFLSLEP

SEQ ID NO: 29965 - protein, 1155 aa, Notodonta dromedarius
MNTSHRRRRHHLYVDGEAGHRAIWELWANPALNRILVPGGVVRRMRWTSSINENVMRAYYEATEGGTNLTAYRGRMLSLFQILEPAVNVSAQRLSDQVRVIQRGHMLADSLLDQLRSEALSSRVVPVASSQPVSLPVTTVESWPAVSGDTDRNDTASEVSTQYDGILRSTLEDVVREYRFVPPHVRPRLPRLPMHNKNRALVCSTNMLLSSYFESSENLMDTHSLLYCTAIAVCRVARVKFPDTDVATRPKPAVPAWQCRIERRINEARIFIGKLSCFRAGNTRPRVMRFVRRIFSGTNVGPQEYLNHVTERIDFLKQKVYAWANRIRRYKARVDRYYQNSMFQRDQRWVYRSWEQSSQRDGEVHRPDDDDMIKFWRNIWSVPMTHSEGGWIGDVGQVCEPIQEMDSITIEAKDVANAVRSLPNWKAPGPDGLHNFWLKWLRSSHACLASQFQSALESRLLPEFITTGVTHLLHKSGSTTDPKNYRPITCLPTIYKTLTSVLREKICRHIDDNSIMSASQNGCRSGARGTKELLLIDMAICQQVRRNRKDLSTCWIDYKKAYDSVPHTWLMRVLELYKVNATLRAFLATCMGQWRTVLLYPGSRRILGNGDPIRIERGIFQGDSLSPLWFCLAMNPLSTLLGGSGLGFRLRRGGQVISHLLYMDDLKLFAPTELQLTGLLKVTETFSKSIRMEFGVDKCAVMHVKKGRMVESRCIRLSDSIQLRSLSGTETYRYLGMSQALGICETDMKQSVRERFLGRLKKVLKSVLSGGNKVRAYNGWVMPVLIYSFGILKWSQTELDTLDRTVRTLLTAHRMHHPRSSVMRLYIPRKCGGRGFLNAKTLHNREVFNLREYFLHAVGEMHADVVAVDNGLTPLSLSKEHWRRPVVLTTDDRMAVWQGKELHGRYYRALHGPDVDLAASVAWLQFGDLFGETEGFVCAIMDEVVMTNNYRRFIIRDGTIDICRACHRPGESLRHIISGCSRLANGEYLHRHNQVARIVHQQLALKYRLVASEVPYYRYVPEPVLEDGHITLYWDRSIITDRTIVANRPDIVLIDRQERHAMLVDVTVPHDGNLVKAEKDKECKYLDLVHEVVDMWDIDTAIIVPIVVSAHGLIGKSLDKHLKRLSLGSWIKGQIQKAVLLETARIVRKFLSLEP

SEQ ID NO: 29966 - protein, 1196 aa, Limenitis camilla
MLNIMLTRARAKNVRSPTSPGSSDNSTSQVPEHTEEVVAVVSSSSDEYFSPPTSPSPVRRPGRGRPPRSLGPRGQPASRQVPAIDGYVQRMKWTQCINENVMRAYYGSTEGGTNLTAYRDRMLSLFQKLEPSINVSAQRLSDQVRIILRNHRLNDTVLERIRSEVHDSRVIPSSIQATLPGPSPPSPNQRDEEEDDTTITAGKKYDELLRSALEDAIREYRYTSDEIRPRLPRLPMHKKNRALVCTLDSLLPMYFESSEDLKDTHSILFCAAVAVCRVAHVKLVNTETTRPKPDVAAWQSRIERRIDETRVLIGKLYSFREGNTRPRVMRFVRRAFSGTEICPPEYMARITERIDTLKQKIYAWANRIRRYRRRVDRYSQNRMFQKDQKWVYRTWERPDQNVDDIHRPDDDDTNKFWRSIWSVSVDHTEGDWMREIRQTREPLQAMEHISITCKDVADAVRSVPNWKSPGPDGLHNFWLKWLRSSHACLASQFQSALESGSLPQFLTTGITHLLHKSGSTTEPKNYRPITCLPTVYKLLTSILRDKIDSHITKNAIMSVSQNGCRNRSRGTKELLLIDMTISQQVRRSRKDLSTCWIDYKKAYDSVPHGWLMRVLELYKVDATLCAFLGSCMRQWRTVLRYPGCRPIQGNNEPIRIKRGIFQGDSLSPLWFCLALNPLSTLLENSGLGYRLRRGGQVISHLLYMDDLKLFVPTKLQLIELLKITKTFSNSIRMEFGVDKCAVMHVKRGKIEESEGIQLSDSVNLRSLSADETYKYLGMSEALGIIEIDMKQSVRERFLARLRKVLKSLLSGGNKVRAYNGWVMPILMYSFGILKWTQKELDDLDRKVRALLTTYRMHHPRSSVMRLYIPRKCGGRGFLNAKTLHNREVCNLREYFLQTDVGMHRDVVAMDKGLTPLSLAKENWRKPIVLSTDNRKEVWKSKELHGRFYRALHGDEVDFKASVSWLRFGNLFGETEGFVCAIMDEVIMTRNYRRYIVRDGTVDICRACHSSGESLRHIISGCPRLANGEYLHRHNQVAKIIHQQLALRYGLVESEVPYYRYAPDPVLENGHVTLYWDRTIITDRTIIANKPDIVVIDRSERCTMIVDVTIPHDGNLVKAEKDKQMKYLDLAHEIVDMWDVDSAVVVPIVVTANGLIAKSLDQHLKRLALDGWVKGLMQKAVLLDTARIVRKFLSLEP

SEQ ID NO: 29967 - protein, 1105 aa, Cosmia trapezina
MMQTRAKTRNQAHPPSPDSSLSSASQPPVRASTVSAVSPVAAVASSSSDEFFSPPSSPTPPRRRGRGRPPAGLGPRGQPAPNRVPAAGGNVSRMRWTQSINENVMRAYYGATEGGINLTAYRGRMLSLFQVLEPAVNVSAQRLSDQVRVIQHNHRLDNATLDRLRSEMQSSSASNPPPSQNVMHVPAEIPLRANQRDEEENARAISADNLCNVEIRSALEDAIREYRFTSPDLRPRLPRLPMNKKNRALVCALDALLPNFIESSADLCDTHSILYCTAVAACRVACVKFPNTDRAIRPKPAAPAWQCRIERRINEARVLIGKLICFREGNTRPRVMRFVRRAFSGTNISPQEYVSRVTERIDFLKQKVYAWANRIRRYRRRVDRYSQNRMFQSDERWVYRAWERPIPTQGVTDVRPPDNETMSAFWRSIWSVPVSHTEGDWMRIVEQACDSIPNMDAVTISPLDVACAVRPLPNWKSPGPDGLHNFWIKWLQRSHACLASQFQSSLETGSLPLLFTTGVTHLLHKSGSTAEPKNYRPITCLPTVYKVLTSILRAKIAHHIYNNSIMSVSQNGCRNGSRGTKELLLIDMTISQQVRRSRKDLSTCWIDYKKAYDSVPHTWLIRVLELYKIDATLRTFLMSCMGQWKTVLLYPGCRRIPGIDEPIRIERGIFQGDSLSPLWFCLALNPLSTLLEDSGLGYRLRRGGQVISHLLYMDDLKLFAPNNLRLMELLKVTENFSSAIRMEFGVDKCAVMHVKRGEIMESVGTQLSDSIHLRSLSSTETYKYLGMSEALGINVADMKQSLRERFFGRLKKVFNSLLSGGNKVRAFNGWVMPVLMYSFGVLKWTQTELDALDRRVRTLLTAYRMHHPRSSVMRLYIPRKCGGRGFLNAKTLHNREICSLREYFLEADVGMHRDVAAVDKGLTPLSLAKENWRKPAVLDTNDRREVWQGKELHGRFFRALHGPDVDFLASVSWLRFGDLFGETEGFVCAIMDEVIMTNNYRKYIVKDGTVDICRACHHPGESIRHIVSGCSRLANGEYLHRHNLVARIIHQQLALQYNLVESEVPYYRYVPDPVLENGQATLYWDRSIITDRTIVANKPDIVVID

SEQ ID NO: 29968 - protein, 1104 aa, Abrostola tripartita
MKWSQQINENVMRAYYGSTEGGTNLTAYRDRMLALFQDLEPAVNVSAQRLSDQVRVILRNHRLDDATLDRLRSEVHSSPVTCRPVHVVVPPIGPPPCDMEADDRATTVSTQYNDILRSTLEDTIREYRVSPPGLRPRLPRLPMHNKNKAMISALDSLLSSYFEGSEDLCDTHSILYCAAATACRVANVKCFDSSTATRPKPAVPAWQCRIESRITEARTLIGKLTAFREGNIRPRVMRFVRRAFAGVDINPREYATRATERIDFYKQKVYAWASRIRRYKRRVDRFSQNRIFNQDQRWVYRNWERSAQGVSDGHLPDDDVTNAFWRSIWSVPVNHTEGSWMLDVEQSCESIPEMGTITISPQDVASAVRPMSNWKSPGPDGLHNFWIKWLRSSHGCLASQFQSAIEVGSLPQFLTTGSTHLLHKTGSTTDPKNFRPITCLPTIYKLLTSILRAKITKHIDDNNIMSASQNGCKNGSRGTKELLLIDMTICQQVRRSKKDLSTCWIDYKKAYDSVPHTWLMRVLELYKIDTTLRTFLLSCMRQWRTVLHYPGCRDIQQDGEPIRIERGIFQGDSLSPLWFCLALNPLSTLLENSGLGYSLRRRSQVISHLLYMDDLKLFAPSRFQLIKLLKITEAFSNSIRMEFGVDKCAVMHVKRGGIIESQGIQLSDSINLRSLSATETYKYLGMSEALGINVVDMKQSLKERFFGRLNKVLKSLLSGGNKVRAFNGWVMPTLMYSFGILKWTQTELDALDRRVRTLLTSNRMHHPRSSVMRLYIPRKCGGRGFLNAKTLHNREVCSLREYFLRAEVGMHREVVAVDKGLTPLFLAKENWCKPVVLSVNDRRDVWQSKELHGRFYKALHGPNVDLLSSVSWLRFGDLFGETEGFVCAIMDEVIMTNNYRKYILKDGTVDICRACHRPGESLRHIMSGCSRLANGEYLHRHNQVARIIHQQLALKYKLVDSEMPYYRYVPDPVLENDHITLYWDRSIITDRTIVANKPDIVVIDRLERRAMIVDITIPHDENLVKAERDKQIKYLDLAHEVVDMWEVDSAIIVPIVVSANGLMAKSLDQHLKRLTLGGWVKGLMQKAVLLDTARIVRRFLSLEP

SEQ ID NO: 29969 - protein, 1194 aa, Autographa gamma
MLTRSRARKPARPPSPDPSPSSASQLPDHVPAPAPAVASSSSDEYYSPPTSPTPVRRQGRRRPPCSLAPSGQPASNRAPAPGGDVRRMKWTLSINENVMRAYYGATEGGTNLTAYRARMLSLFQALEPGVSVSAQRLSDQVRVIQRNHRLDDSTLDRLRSEIQHSPATSTSPPVAAPVSGAPLTAPSDGEEEDGAITVSTQCNELIRSTLEDAIRVYRRSPPDQRPRLPRLPMHNRNKAIMGALDSLLPVYFESSEDLRDTHSILYCAALTACRVANVAMCHSNIATRPKPAVPAWQCRIEQRVAEARTLIAKLKAFKQGNSRPRVMRFVRRAYAGTDISPSEFIARVTERIDLFKQRVCAWANRIRRYKRRAERFHLNRMFQKDQRWVHRLWERPVSAMDGGCLPDGDATNSFWRSIWSVPVTHSEGGWMREVEQVCEPIQEMGAITISPQDVANAVRPMANWKTPGPDGLQNFWLKWLRSSHSCLASQFQSAVESASLPQFLTTGSTHLLHKTGSATDPKNYRPITCLPTVYKLLTSILRAKINEHIVNFSIMSASQNGCRSGSRGTKELLLIDTAICQQVRRSKKDLSTCWIDYKKAYDSVPHTWLMRVLELYKINTTLRAFLMSCMGQWSTVLHYPGCRDIQQGGEPIRIERGIFQGDSLSPLWFCLALNPLSTLLENSGLGYSLRRGGQVISHLLYMDDLKLCATSGFQLMELLKITESFSNSISMEFGVDKCAVMHVKRGGIVESQGIQLSDSINLRSLSATDTYKYLGMSEALGINVADVKQSLQARFFGRLNKVLKSVLSGGNRVRAFNGWVMPVLMYSFGVLKWTQTELDALDRRVRTLLTANRMHHPRSSVMRLYIPRKCGGRGFLNAKTLHNREVCNLREYFLQVDVGMHRDVVVVDKGFTPLSLGKENWHKPVVLSVKDREDVWQSKELHGRYYRTLHGPDVDFLASVAWLRFGDLFGETEGFVCAIMDEVIMTNNYRKYIIKDGTVDICRACHCPGESLRHIISGCSRLANGEYLHRHNQVARIIHQQLALRYKLVESEVPYYRYVPDPVLENGRVTLYWDRSIITDRTIVANKPDIVVIDRSERRAIIVDVTISHDENLVKAEKEKQLKYLDLAHEVVDMWEVDSAMIVPIVVTANGIIAKSLDQHLKRLSLGTWVKGLIQKAVLLDTARIVRRFLSLES

SEQ ID NO: 29970 - protein, 1204 aa, Mythimna ferrago
MLTRSRARRLETHPTTSGSPLNSAAQPPGPAPAVSPVIPEAAVASSSSDEYFSPPTTPPPARRRGRGRPPASLGPRGPPASDRVPAVGGSVQRMRWTSSINENVMRSYFGATEGGINLTAYRGRMLSLFQVLEPAVNVSVQRLSDQVRVIQRNRMLDDAVLDRLRLESQSSRVSAATPSAVAQRQPSAAPRPDHVSDADDDAAISVSTQCNERLRGALEDAFREYRSIPPELRPRLPRLPMHKRNRALVCALDSQLSICFDSSEDLADTHSILYCAAVAACRVAHVKFPNCNRATRPAVPAWQCRIERRIGEARALIGKLILAYYCFREGNTRPRVMRFVRRAFSGTDISPRDYLPCVTERIDFLKQKIYAWANRIRRYKRRVERYTQNRTFQSNERWVYRAWERPDQGVTDTRLPDDDAMCSFWRSIWSAPVSHTEGDWIREVERACDLLPEMGAITISPQDVARAVRPLPNWKSPGPDGLHNFWLKWFQGSHARLASQFQSALESGSLPQFLTTGITHLLHKSGSTAEPKNYRPITCLPTVYKVLTSILRAKINSHIETNSIMSVSQNGCRNGSRGTKELLLIDIAISQQVRRSRKNLSACWIDYKKAYDSVPHTWLMRVLELYKVDATLRTFLMSCMGQWRTVLHYPGCRQIWENSEPIRIERGIFQGDSLSPLWFCLALNPLSTLLEGSGLGYRLKRGGQVISHLLYMDDLKLFAPNNLQLMELLKVTETFSSAIRMDFGVDKCAVIHVKRGEIMESEGIQLSDSIHLRSLSSTETYKYLGMSEALGINTDDVKQSLKERFFGRLNKVLNSLLSGGNKVRAFDGWVMPVLMYSFGILKWTQTELDALDRRVRTLLTANRMHHPRSSVMRLYIPRKCGGRGFLNAKSLHNREVCSLREYFLAVDVGMHRDVVAVDKGLTRLSLANENWRKPLVLDTNDRREVWQGKELHGRFYRALHGPDVDLLASVSWLRFGDLFGETEGFIFAIMDEVMMTNNYRKYIVKDGTVDICRACHRPGESIRHIISGCSRLANGDYLHRHNLVARIIHQQLALKYNLVESEVPYYRYVPDPVLDNGSITLYWDRSIITDRTIVANKPDIVVIDRLERRTMIVDIAVPHDENLVKAEKDKQIKYLDLAREVVDMWEVDRAIIVPIVVTANGLIAKSLEQHLRRLSLGSWIKGLIQKAVLLDTARIVRRFLSQEP

SEQ ID NO: 29971 - protein, 1200 aa, Mythimna ferrago
MLTRAAAQRARLPPPDSLLSSASPPPDPGSTVSPAAAVASSSSDEYFSPPTSPTPVRRPGRGRPPNGLGFRGQPAPSRVPAAGGCVQRMKWTQSMNENVMRAYYGSTEGGTNLTAYRVRMLSLFQDLEPTVNVSAQRLSDQVRVIQRNHRLDDAALDRLRSQVLSNPIVSTPQQIQTAGPSTSVTTTPRYVHVEYEADDRVDRVSSQCNDRLRSALEDALREYRSTPTELRPRLPRLPMHKKNRALVCALDSLLKNIFESSDNLLDTHSILYCGAVAACRLANVKFPCYGVATRPTPAAPAWQCRIERRIDEARALIGKLYCFREGNTRPRVMRFVRRAFSGTEISPREYMSRVTERIDFLKQKVCAWANRIRRYKRRVDRYSQNRMFQSDERWVYRAWERPGQNVTDGFRPDSVATNTFWRSIWSEPVCHNEGGWMRDVERVCEAIPEMDKVFITPLDVARAVRPLPNWKSPGPDGLQNFWLKWYSSSYAILASQFQSSLESGSLPQILTTGTTHLLHKTGSTADPKNYRPITCLSTVYKLLTSILRVKITLHIEKNSIMFASQNGCRNGSRGTKELLLIDMAISQQVRRSRKDLSTCWIDYKKAYDSVPHTWLMKVLELYKIDATLRTFLESCMRQWKTVLRYPGCRPIQGNDEPIWIKRGIFQGDSLSPLWFCLALNPLSTLLEDSGLGYRLRRGGQVLSHLLYMDDLKLFAHNNSQLMELLKVTETFSSAIRMEFGVDKCAVMHVRRGEIVESEGIQLSDSIHLRSLSSTETYKYLGMSEALGINVVDMKQTLKERFFGRLKKVLNSLLSGGNKVRAFNGWVMPVLMYSFGILKWTQTELDALDRRVRTLLTANRMHHPRSSVMRLYIPRKCGGRGFLNAKTLHNREVCSLREYFLKTDVGMHRDVVAVDKGLTPLSMAKENWRKPVVLTTDDRKEVWKGKELHGRFFRALHEPDVDFSASVAWLRFSNLFGETEGFVCAIMDEVILTNNYRRHIMKDGTVDVCRACHRPGESIRHIISGCSRLANGEYLHRHNQVARILHQQLALKYNLVDSEVPYYRYVPDPVLENDHVTLYWDRSIITDRTIVANKPDIVVIDRLARRAMIVDVTIPHDENLVKAEKEKQIKYLDLAHEVVDMWNVDSAIIVPIVVTANGLIAKSFDDHLSKLSLHGWIKGLIQKAVLLDTARIVRRFLSLEP

SEQ ID NO: 29972 - protein, 1200 aa, Mythimna ferrago
MLTRSRARSQIAQPTSSGSSLNSASQPPGPAPAVSPVIPEAAVASSSSDEYFSPPTTPPPARRRGRGRPPACLGPRGPPASDRVPAAGGSVQRMRWTSSINENVMRSYFGATEGGINLTAYRGRMLSLFQMLEPAVNVSVQRLSDQVRVIQRNRMLDDAVLDRLRLESQSSRVSAATPSAAAQRQPSAAPRPDHVGDADDDAAISVSTQCNERLRGALEDAFREYRSIPPEVRPRLPRLPMHKRNRALVCALDSQLSICFDSSENLADTHSILYCAAVAACRVAHVKFPNCNRATRPAVPAWQCRIERRIGEARALIGKLICFREGNTRPRVMRFVRRAFSGTDISPRDYLPCVTERIDFLKQKIYAWANRIRRYKRRVERYTQNRTFQSNERWVYRAWERPDQGVTDTRLPDDDAMCSFWRSIWSAPVSHTEGDWIREVERACDLLPEMGAITISPQDVARAVRPLPNWKSPGSDGLHNFWLKWFQGSHARLASQFQSVLESGSLPQFLTTGITHLLHKSGSTAEPKNYRPITCLPTVYKVLTSILRAKINSHIETNSIMSVSQNGCRNGSRGTKELLLIDIAISQQVRRSRKNLSACWIDYKKAYDSVPHTWLMRVLELYKVDATLRTFLMSCMGQWRTVLHYPGCRQIWENSEPIRIERGIFQGDSLSPLWFCLALNPLSTLLEGSGLGYRLKRGGQVISHLLYMDDLKLFAPNNLQLMELLKVTETFSSAIRMDFGVDKCAVIHVKRGEIMESEGIQLSDSIHLRSLSSTETYKYLGMSEALDINTDDMKQSLKERFFGRLNKVLNSLLSGGNKVRAFNGWVMPVLMYSFGILKWTQTELDALDRRVRTLLTANRMHHPRSSVMRLYIPRKCGGRGFLNAKSLHNREVCSLREYFLAVDVGMHRDVVAVDKGLTPLSLANENWRKPLVLDTNDRREVWQGKELHGRFYRALHGPDVDLLASVSWLRFGDLFGETEGFVFAIMDEVMMTNNYRKYIVKDGTVDICRACHRPGESIRHIISGCSRLANVDYLHRHNLVARIIHQQLALKYNLVESEVPYYRYVPDPVLDNGSITLYWDRSIITDRTIVANKPDIVVIDRLERRTMIVDIAVPHDENLVKAEKDKQIKYLDLAREVVDMWEVDKAIIVPIVVTANGLIAKSLEQHLRRLSLGSWIKGQIQKAVLLDTARIVRRFLSQEP

SEQ ID NO: 29973 - protein, 1200 aa, Mythimna ferrago
MLTRSRARRLETHPTTSGSSLNFASQPPGPAPAVSPVFPEAAVASSSSDEYFSPPTTPPPARRRGRGRPPASLGPRGPPASDRVPAVGGSVQRMRWTSSINENVMRSYFGASEGGINLTAYRGRMLSLFQVLEPAVNVSVQRLSDQVRVIQRNRMLDDAVLDRLRLESQSSRVSAATPSAAAQRQPSAAPRPDHVGDAADDAAISVSTQCNERLRGALEDAFREYRSIPPELRPRLPRLPMHKRNRALVCGLDSQLSNCFDSSEDLADTHSILYCAAVAACRVAHVKFPNCNRATRPAVPAWQCRIERRIGEARALIGKLICFREGNTRPRVMRFVRRAFSGTDISPRDYLPCVTERIDFLKQKIYAWANRIRRYKRRVERYTQNRTFQSNERLVYRARERPDQGVTDTRLPDDDAMCSFWRSIWSAPVSHTEGDWIREVERACDLLPEMGAITISPQDVARAVRPLPNWKSPGPDGLHNFWLKWFQGSHARLASQFQSTLESGSLPQFLTTGITHLLPKSGSTAEPKNYRPITCLPTVYKVLTSILRAKINSHIETNSIMSVSQNGCRNGSRGTKELLLIDIAISQQVRRSRKNLLACWIDYKKAYDSVPHTWLMRVLELYKVDATLRTFLMSCMGQWKTVIRYPGCRQIWENSEPIRIERGIFQGDSLSPLWFCLALNPLSTLLEGSGLGYRLKRGGQVISHLLYMDDLKLFAPNNLKLMELLKVTETFSSAIRMDFGVDKCAVIHVKRGEIMESEGIQLSDSIHLRSLSLTETYKYLGMSEALSINTDDVKQSLKERFFGRLNKVLNSLLSGGNKVRAFNGWVMPVLMYSFGILKWTQTELDALDRRVRTLLTANRMHHPRSSVMRLYIPRKCGGHGFLNAKSLHNREVCSLREYFLAVDVGMHRDVVAVDKGLTPLSLANENWRKPLVLDTNDRREVWQGKELHGRFYRALHGPNVDLLASVSWLRFGDLFGETEGFVFAIMDEVMMTNNYRKYIVKDGTVDICRACHRPGKSIRHIISGCSRLANGDYLHRHNLVARIIHQQLALKYNLVESEVPYYRYVPDPVLDNGSITLYWDRSIITDRTIVANKPDIVVIDRLERRTMIVEIAVPHDENLVKAEKDKQIKYLDLAREVVDMWEVDRAIIVPIVVTANGLIAKSLEQHLRRLSLGSWIKGLIQKAVLLDTARIVKRFLSQEP

SEQ ID NO: 29974 - protein, 1091 aa, Mythimna ferrago
MLTRAAAQRARIPPPDSLLSSASPPPDPGSSVSPAAAVASSSSDEYFSPPTSPTPVRRPGRGRPPNGLGFRGQPAPSRVPAAGGCVQRMKWTQSMNENVMRAYYGATEGGTNLTAYRVRMLSLFQDLEPTVNVSAQRLSDQVRVIQRNHRLDDAALDRLRSQVLSNPIVSTPQQIQTVGPSTSVTTTSRYDHVEDEADDRVDKVSSQCNDRLRSALEDALREYRSTPTELRPRLPRLPMHKKNRALVCALDSLLKNVFESSDSLLDTHSILYCGAVAACRLANVKFPCYGVATRPTPAAPAWQCRIERRIDEARALIGKLYCFREGNTRPRVMRFVRRAFSGTEISPREYMSRVTERIDFLKQKVCAWANRIRRYKRRVDRYSQNRMFQSDERWVYRAWERPGQNVTDGFRPDSVVTNTFWRSIWSEPVCHNEGGWMRDVERVCEAIPEMDKVFITPLDVARAVRPLPNWKSPGPDGLQNFWLKWYSSSHAILASQFQSSLESGSLPQILTTGTTHLLHKTGSTADPKIYRPITCLSTVYKLLTSILRVKITLHIEKNSIMFASQNGCRNGSRGTKELLLIDMAISQQVRRSRKDLSTCWIDYKKAYDSVPHTWLMKVLELYKIDATLRTFLESCMRQWKTVLRYPGCRPIQGNDEPIWIRRGIFQGDSLSPLWFCLALNPLSTLLEDSGLGYRLRRGGQVLSHLLYMDDLKLFAHNNSQLMELLKVTETFSSAIRMEFGVDKCAVMHVRRGEIVESEGIQLSDSIHLRSLSSTETYKYLGMSEALGINVADMKQTLKERFFGRLKKVLNSLLSGGNKVRAFNGWVMPVLMYSFGILKWTQTELDALDRRVRTLLTANRMHHPRSSVMRLYIPRKCGGRGFLNAKTLHNREVCSLREYFLKTDVGMHRDVVAVDKGLTPLSMAKENWRKPVVLTTDDRKEVWKGKELHGRFFRALHEPDVDFSASVAWLRFSNLFGETEGFVCAIMDEVILTNNYRRHIMKDGTVDVCRACHRPGESIRHIISGCSRLANGEYLHRHNQVARILHQQLALKYNLVDSEVPYYRYLFIYLFNNSCTHLTYIRKEDRNKKIGT

SEQ ID NO: 29975 - protein, 1202 aa, Amphipyra tragopoginis
MLTRSRAKATRPPSSASSLSSASQPPEPAPTVSDVTPAAAVASSSSDEYFSPPTSPPPPRRRGRGRPPASIGPRGPPASDRVPAPGGSVQRMRWTQAMNENCMRAYFGATEGGTNLTAYRGRMLSLFQALEPAVNVSAQRLSDQVRVIQRDHRLDGAALDRLRSEMQSSHVAPLQSQTAAQSQVPSVVAPRSIPADEESDDRVTNVSTQSNEQLRSALELAIREYRSTLPDLRPRLPRLPMNKKNKALMCALDSLLSSYFDGSEDLADTHSNLYCAAVAACRVAHVKVDNNDRATRPKPAVPAWQCRIERRIGGARALIGKLICFREGNTRPRVMRFVRRAFSGTDTSPRDYMSCVTERIDFLKQKVYAWANRIRRYKRRVERYTQNRMFQRDQRWVYRAWERADQGVGDAHLPDDDATNSFWRSIWSVPVSHTEGDWMRDVERVCEPILDMGAISISPQDVASAVRPLPNWKSPGPDGLHNFWLKWLRSSHARLASQFQSSLETGTLPQFLTTGVTHLLHKSGSTAEPKNYRPITCLPTVYKLLTSILRCKINSHIENNSIMSASQNGCRNGSRGTKELLLIDMAISQQVRRSRKDLSTCWIDYKKAYDSVPHAWLMRVLELYKVNTTLCAFLTSCMGQWRTVLHYPGCRQIQGIGEPIRIERGIFQGDSLSPLWFCLALNPLSTLLEGSGLGYRLRRGGQVISHLLYMDDLKLFAPNNLQLLDLLKVTETFSNSIRMEFGVDKCAVMHVKRGRIMESVGTQLSDSIQLRSLSSTETYKYLGMSEALGINEADMKQSLRERFYGRLKKVLKSLLSGGNKVRAFNGWVMPVLMYSFGILKWTQTELDALDRRVRTLLTAYRMHHPRSSVMRLYIPRKCGGRGFLNAKTLHNREVCSLREYFSQADVGMHRDVVAVDKGLTPLSLAKENWRKPAVLDTNGRKDVWRSKELHGRFYRALHGPDVDFLASVAWLRFGDLFGETEGFVCAIMDEVMMTNNYRKYVVKDGTVDICRACHCPGESIRHIVSGCSRLANGEYLHRHNLVARIIHQQLALKYNLVDAEVPYYKYVPDPVLENGHVTLYWDRSIITDRTIVANKPDIVVIDRSERRAMIVDITVPHDENLVKAENDKKIKYLDLAHEVVDMWDIDSAVIVPIVVTANGLIAKSLDQHLMRLSLGGWIKGLIQKAVLLDTARIVRRFLSLEP

SEQ ID NO: 29976 - protein, 1099 aa, Hecatera dysodea
MITRAATLRARHPPPGSPLSSASPPPDIEPQVSPAAAVASSSSDEYFSPPTSPTPVRRQGRGRPPRGLGPRGQPAPSRVPATGGCVQRMRWTQSMNENVMRAYYGSTEGGTNLTAYRVRMLSLFQDLEPAVNVSAQRLSDQVRVIQRSHRLDDAALERLRSEVLNNLIIATQTQTAVQAPASGASIPRANNDSDEVDDRVVTVSSQCNDRLRSALEDALREYRSTPTELRPRLLRLPMHKKNRALVCALDSLLQNTFVSSENLVDTQSILYCGAVAACRLANVKFPSCDDAIRPKPAAPAWQCRIERRIDEARALIGKLYCFREGNTRPRVMRFVRRAFAGTGISPHEYTSRITERIDFLKQKVCAWANRIRRYKRRVDRYSQNRMFQSDERWVYRNWERPEQSVTDVCRPDDIATSTFWRSIWSVPVRHTEGDWMRDVERVCEAIPQMEKVIITPTDVATAVRPLPNWKSPGPDGLHNFWLKWYSSSHALLASQFQSSLESGSLPQFLTTGVTHLLHKTGSPAEPKNYRPITCLSTVYKLLTSILRVKINKHIENNSIMSSSQNGCRKGSRGTKELLLIDMAISQQVRRTRKDLSTCWIDYKKAYDSVPHTWLMKVLELYRIDETLRTFLESCMRQWKTVLRYPGCRPIQGNDEPVWIKRGIFQGDSLSPLWFCLALNPLSTLLEDSGLGYRLRRGGQAISHLLYMDDLKLFAHNKLQLMELLKVTENFSSAIRMEFAVDKCAVMHVKKGEIVESEGIQLSDSIHVRSLSSTETYKYLGMSEALGINGADMKQSLKERFFGRLKKVLNSLLSGGNKVRAFNGWVMPVLMYSFGILKWTQTELDALDRRVRTLLTANRMHHPRSSVMRLYIPRKCGGRGFLNAKTLHNREMCSLREYFLKADVGMHRDVVAVDKGLTPLSMAKENWRKPVILTTDDRKEVWRGKELHGRFYRALYGSDVDFSASVAWLRFGDLFGETEGFVCAIMDEVIMTNNYRRHIMRDGTVDVCRACHRPGESIRHIISGCSRLANGEYLHRHNQVTRIIHQQLALKYKLVDSEVPYYKYVPDPVLENNNNNNNNNNALLSHNKQKPEIRLHYKTL

SEQ ID NO: 29977 - protein, 1200 aa, Mythimna impura
MLTRAAARRARHPPPGSPLSSASPPPDLGSPVSPVAAVASSSSDEYFSPPTSPTPVRRPGRGRPPKSLGPGGQPAPSRVPAAGGCVQRMRWTQSMNENVMRAYYGSTEGGTNLTAYRDRMLSLFQDLEPTVNVSAQRLSDQVRVIQRNHRLDDATLDRLRSEVLSNQIVSTSIQTQTAATPTTNAISPRSNPNNDDADDRVVTVSSQCNDELRSALEDALREYRTTPTELRPRLPRLPMHKKNRALVCTLDSLLKNNFESSENLVDTHSILYCGAVAACRLANINFPNIDGTIRPKPAVPAWQYRIERRIDGARVLIGKLHCFREGNTRPRVMRFVRRAFLGTGISPQEYMSRVTERIDFLKQKVCAWASRIRRYKRRVDRYSQNRMFQSDERWVYRAWERPEQNVIDGRRPDDFATITFWRNIWSVPVSHTEGDWMRDVERVCEAIPEMEKVVITPADVAKAVRPLPNWKSPGPDGLQNFWLKWFSNSHAPLASQFQSTLESGSLPEYLTTGITHLLHKTGNPVEPKNYRPITCLSTVYKLLTSILRAKINRHIENNLIMSASQNGCRNGSRGTKELLLIDMAISQQACRSRKDLSTCWIDYKKAYDSVPHTWLMRVLELYKVDMTLRTFLESCMRQWKTVLRYPGCRPIQGNDEPIRIKRGIFQGDSLSPLWFCLALNPLSTLLEESGLGYRLRRGGQAISHLLYMDDLKLFAPSNLQLMELLKVTETFSSAIRMEFGVDKCAAMHVKRGEIMESEGIQLPDSIHLRSLSSTETYRYLGMSEALGINNADMKQSLKERFFGRLKKVLNSLLSGGNKVRAFNGWVMPVLMYSFGILKWTQTELDALDRRVRTLLTANRMHHPRSSVMRLYISRKCGGRGFLNAKTLHNREVCSLREYFLKTDVGMHRDVVAVDKGLTPLSMAKEDWRKPVILTTDDRKEIWKGKELHGRFYRALHEPDVDFLASVAWLRFSDLFGETEGFICAIMDEVILTNNYRRYIMKDGTVDVCRACHRPGESIRHIISGCSRLANGEYLHRHNQVARIIHQQLALKYNLVDSEVPYYKYVPDPVLENDHVTLYWDRSIITDRTIVANKPDIVVIDRLARRAVIVDVTIPHDENLVKAEKEKQIKYLDLAHEVVDMWNVDSAVIVPMVVTANGLIAKSFDDHLSKLSLRGWIKGLIQKAVLLDTARIVRRFLSLEP

SEQ ID NO: 29978 - protein, 1200 aa, Mythimna impura
MLTRAAARRARHPPPGSPLSSASPPPDLGSPVSPVAAVASSSSDEYFSPPTSPTPVRRPGRGRPPKSLGPGGQPAPSRVPAAGGCVQRMRWTQSMNENVMRAYYGSTEGGTNLTAYRDRMLSLFQDLEPTVKVSAQRLSDQVRVIQRNPRLDDATLDRLRSEVLSNQIVSTSKQTQTAATPITNAISPRSNPNNDDADDRVVTVSSQCNDELRSALEDALREYRTTPTELRPRLPRLPMHKKNRALVCTLDSLLKNNFESSENLVDTHSILYCGAVAACRLANINFPNIDGTIRPKPAVPAWQYRIERRIDGARVLIGKLHCFREGNTRPRVMRFVRRAFLGTGISPQEYMSRVTERIDFLKQKVCAWASRIRRYKRRVDRYSQNRMFQSDERWVYRAWERPEQNVIDGRRPDDFATITFWRNIWSVPVSHTEGDWMRDVERVCEAIPEMEKVVITPANVAKAVRPLPNWKSPGPDGLQNFWLKWFSNSHAPLASQFQSTLESGSLPEYLTTGITHLLHKTGNPVEPKNYRPITCLSTVYKLLTSILRAKINRHIENNLIMSASQNGCRNGSRGTKELLLIDMAISQQARRSRKDLSTCWIDYKKAYDSVPHTWLMRVLELYKVDMTLRTFLESCMRQWKTVLRYPGCRPIQGNDEPIRIKRGIFQGDSLSPLWFCLALNPLSTLLEESGLGYRLRRGGQAISHLLYMDDLKLFAPSNLQLMELLKVTETFSSAIRMEFGVDKCAAMHVKRGEIMESEGIQLPDSIHLRSLSSTETYRYLGMSEALGINNADMKQSLKERFFGRLKKVLNSLLSGGNKVRAFNGWVMPVLMYSFGILKWTQTELDALDRRVRTLLTANRMHHPRSSVMRLYISRKCGGRGFLNAKTLHNREVCSLREYFLKTDVGMHRDVVAVDKGLTPLSMAKEDWRKPVILTTDDRKEIWKGKELHGRFYRALHEPDVDFLASVAWLRFSDLFGETEGFICAIMDEVILTNNYRRYIMKDGTVDVCRACHRPGESIRHIISGCSRLANGEYLHRHNQVARIIHQQLALKYNLVDSEVPYYKYVPDPVLENDHVTLYWDRSIITDRTIVANKPDIVVIDRLARRAVIVDVTIPHDENLVKAEKEKQIKYLDLAHEVVDMWNVDSAVIVPMVVTANGLIAKSFDDHLSKLSLRGWIKGLIQKAVLLDTARIVRRFLSLEP

SEQ ID NO: 29979 - protein, 1200 aa, Mythimna impura
MLTRAAARRARHPPPGSPLSSASPPPDLESPVSPAAAVASSSSDEYFSPPTSPTPVRRQRRGRPPKSLGSRGQPAPSRVPAAGGCVQRMRWTQSMNENVMRAYYGSTEGGTNLTAYRDRMLSLFQDLEPTVNVSAQRLSDQVRVIQRNHRLDDATLDRLRSEVLSNQIVSTSIQTQTAATPTTNAISPRSNPNNDDADDRVVTVSSQCNDELRSALEDALREYRTTPTELRPRLPRLPMHKKNRALVCTLDSLLKNNFESSENLVDTHSILYCGAVAACRLANINFPNIDGTIRPKPAVPAWQYRIERRIDGARVLIGKLHCFREGNTRPRVMRFVRRAFLGTGISPQEYMSRVTERIDFLKQKVCAWASRIRRYKRRVDRYSQNRMFQSDERWVYRAWERPEQNVIDGRRPDDFATITFWRNIWSVPVSHTEGDWMRDVERVCEAIPEMEKVVITPADVAKAVRPLPNWKSPGPDGLQNFWLKWFSNSHAPLASQFQSTLESGSLPEYLTTGVTHLLHKTGNPVEPKNYRPITCLSTVYKLLTSILRAKINRHIENNLIMSASQNGCRNGSRGTKELLLIDMAISQQARRSRKDLSTCWIDYKKAYDSVPHTWLMRVLELYKVDMTLRTFLESCMRQWKTVLRYPGCRPIQGNDEPIRIKRGIFQGDSLSPLWFCLALNPLSTLLEESGLGYRLRRGGQAISHLLYMDDLKLFAPSNLQLMELLKVTETFSSAIRMEFGVDKCAAMHVKRGEIMESEGIQLPDSIHLRSLSSTETYRYLGMSEALGINNADMKQSLKERFFGRLKKVLNSLLSGGNKVRAFNGWVMPVLMYSFGILKWTQTELDALDRRVRTLLTANRMHHPRSSVMRLYISRKCGGRGFLNAKTLHNREVCSLREYFLKTDVGMHRDVVAVDKGLTPLSMAKEDWRKPVILTTDDRKEIWKGKELHGRFYRALHEPDVDFLASVAWLRFSDLFGETEGFICAIMDEVILTNNYRRYIMKDGTVDVCRACHRPGESIRHIISGCSRLANGEYLHRHNQVARIIHQQLALKYNLVDSEVPYYKYVPDPVLENDHVTLYWDRSIITDRTIVANKPDIVVIDRLARRAVIVDVTIPHDENLVKAEKEKQIKYLDLAHEVVDMWNVDSAVIVPMVVTANGLIAKSFDDHLSKLSLRGWIKGLIQKAVLLDTARIVRRFLSLEP

SEQ ID NO: 29980 - protein, 1195 aa, Notodonta dromedarius
MLTRLQARLRPPGLLPRSASQPLGLIQDETLTTAAASSESDEYFSPPSSPPPVRRRRGRPPGNLGTLGQPALNRILVPGGVVRRMRWTSSINENVMRAYYEATEGGTNLTAYRGRMLSLFQILEPAVNVSAQRLSDQVRVIQRGHMLADSLLDQLRSEALSSRVVPVASSQPVSLPVTTVESWPAVSGDTDRNDTASEVSTQYDGILRSTLEDVVREYRFVPPHVRPRLPRLPMHNKNRALVCSTNMLLSSYFESSENLMDTHSLLYCTAIAVCRVARVKFPDTDVATRPKPAVPAWQCRIERRINEARIFIGKLSCFRAGNTRPRVMRFVRRIFSGTNVGPQEYLNHVTERIDFLKQKVYAWANRIRRYKARVDRYYQNSMFQRDQRWVYRSWEQSSQRDGEVHRPDDDDMIKFWRNIWSVPMTHSEGGWIGDVEQVCEPIQEMDSITIEAKDVANAVRSLPNWKAPGPDGLHNFWLKWLRSSHTCLASQFQSALESRLLPEFITTGVTHLLHKSGSTTDPKNYRPITCLPTIYKTLTSVLREKICRHIDDNSIMSASQNGCRSGARGTKELLLIDMAICQQVRRNRKDLSTCWIDYKKAYDSVPHTWLMRVLELYKVNATLRAFLATCMGQWRTVLLYPGSRRILGNGDPIRIERGIFQGDSLSPLWFCLAMNPLSTLLGGSGLGFRLRRGGQVISHLLYMDDLKLFAPTELQLTGLLKVTETFSKSIRMEFGVDKCAVMHVKKGRMVESRCIRLSDSIQLRSLSGTETYRYLGMSQALGICETDMKQSVRERFLGRLKKVLKSVLSGGNKVRAYNGWVMPVLIYSFGILKWSQTELDTLDRTVRTLLTAHRMHHPRSSVMRLYIPRKCGGRGFLNAKTLHNREVFNLREYFLHAVGEMHADVVAVDNGLTPLSLGKEHWRRPVVLTTDDRMAVWQGKELHGRYYRALHGPDVDLAASVAWLQFGDLFGETEGFVCAIMDEVVMTNNYRRFIIRDGTIDICRACHRPGESLRHIISGCSRLANGEYLHRHNQVARIVHQQLALKYRLVASEVPYYRYVPEPVLEDGHITLYWDRSIITDRTIVANRPDIVLIDRQERHAMLVDVTVPHDGNLVKAEKDKECKYLDLVHEVVDMWDIDTAIIVPIVVSAHGLIGKSLDKHLKRLSLGSWIKGQIQKAVLLETARIVRKFLSLEP

SEQ ID NO: 29981 - protein, 954 aa, Xestia xanthographa
MCALDSQLSNCFDSSKDLTDTHSILYCGAVAACRVAHVKFPNNDGATRPKLAVPAWQCRIERRIGEARALIGKLICFREGNTRPRVMRFVRRAFSGTDISFRDYLARVTERIDSLKQKICAWASRIRRYKRRVERYTQNRTFQSDERWVYRAWERPDQGVTDTRLPDDSAMYSFWRNIWSVPVSHTEGDWTREVEQACDPIPEMGAIIISPQDVARAVRPLPNWKSPGPDGLHNFWIKWFQGSHARLASQFQSALESGSLPQFLTTGITHLLHKSGSAAEPKNYRPITCLPTVYKVLTSILRAKINQHIDSNSIMSASQNGCRNGSRGTKELLLIDMAISQQVRRSRKNLSTCWIDYKKAYDSVPHTWLMRVLELYKIDATLRTFLMSCMGHWRTVLRYPGCRQIQGNSEPIRIERGIFQGDSLSPLWFCLALNPLSTLLERSGLGYLLRRDGQVISHLLYMDDLKLFAPNNFQLMKLLKVTETFSSAIRMEFGVDKCAVMHVKRGEIMESEGTQLSDSIHLRSLSSTETYKYLGMSEALGINTADMKQSLRERFFGRLNKVLGSLLSGGNKVRAFNGWVMPVLMYSFGILKWTQTELDALDRRVRTLLTANRMHHPRSSVMRLYISRKCGGRGFLSAKTLHNREVYSLREYFLEAEGEMHRDVVSVDKGLTPLSLANGNWRKPKVLDTNDRKVEWQGKELHGRFYRALHGPDVDFLASVSWLRFGDLFGETEGFICAIMDEVMMTNNYRKYIVKDGTVDICRACHRPGESIRHIISGCSSLANGEYLHRHNLVARIIHQQLALKYNLVESEVPYYKYAPDPVLDNGHITLYWDRPITTDRTVVANRPDIVVIDRLERRTMIVDITIPHDENLVKAEKDKQFKYLDLAREVVDMWDVGTAVIVPIVVSANGLIAKSLDQHLRRLSLGSWIKGLIQKAVLLDTARIVRRFLSQEP

SEQ ID NO: 29982 - protein, 1209 aa, Xestia xanthographa
MITRSRAKQHQEAHPPSPGSSLSSASQPPGRATPVSIVSPVAAVASSSSDEFFSPPSTPSPSPRRGRRRGRGRPPAGLGPRGQQAPSRVPAAGGNVSRIRWTQSMNENVMRAYYGATEGGINLTAYRGRMLSLFQVLEPGVSASAQRLSDQVRVIQRNHMLDDTVLDRLRSESRSNLVTPASPLIAVQVQNVSSAPPRSDRDGEEDDSEVISVSTQCNAQLRSALESAFREYRSTPPELRPRLPRLPMHNKNKALMCALDSQLSNCFDSSKDLTDTHSILYCGAVAACRVAHVKFPNNDGATRPKLAVPAWQCRIERRIGEARALIGKLICFREGNTRPRVMRFVRRAFSGTDISFRDYLARVTERIDSLKQKICAWASRIRRYKRRVERYTQNRTFQSDERWVYRAWERPDQGVTDTRLPDDSAMYSFWRNIWSVLVSHTEGDWTREVEQACDPIPEMGAIIISPQDVARAVRPLPNWKSPGPDGLHNFWIKWFQRSHARLASQFQSALESGSLPQFLTTGITHLLHKSGSAAEPKNYRPITCLPTVYKVLTSILRAKINQHIDSNSIMSASQNGCRNGSRGTKELLLIDMAISQQVRRSRKNLSTCWIDYKKAYDSVPHTWLMRVLELYKIDATLRTFLMSCMGHWRTVLRYPGCGQIQGNSEPIRIERGIFQGDSLSPLWFCLALNPLSTLLERSGLGYLLRRDGQVISHLLYMDDLKLFAPNNFQLMKLLKVTETFSSAIRMEFGVDKCAVMHVKRGEIMESEGTQLSDSIHLRSLSSTETYKYLGMSEALGINTADMKQSLRERFFGRLNKVLGSLLSGGNKVRAFNGWVMPVLMYSFGILKWTQTELDALDRRVRTLLTANRMHHPRSSVMRLYISRKCGGRGFLSAKTLHNREVYSLREYFLEAEGKMHRDVVSVDKGLTPLSLANGNWRKPKVLDTNDRKVEWQGKELHGRFYRALHGPDVDFLASVSWLRFGDLFGETEGFICAIMDEVMMTNNYRKYIVKDGTVDICRACHRPGESIRHIISGCSSLANGEYLHRHNLVARIIHQQLALKYNLVESEVPYYKYAPDPVLDNGHITLYWDRPITTDRTVVANRPDIVVIDRLERHTMIVDITIPHDENLVKAEKDKQFKYLDLAREVVDMWDVGTAVIVPIVVSANGLIAKSLDQHLRRLSLGSWIKGLIQKAVLLDTARIVRRFLSQEP

SEQ ID NO: 29983 - protein, 1202 aa, Cosmia trapezina
MLTRSAARARPPPPDSSLSSASPPPVPSPTVSAVTTPAAVVASSSSDEYFSPPTSPTPVRRQGRGRPPKSLGLRGQPAPSWVPAAGGCVQRMRWTQSMNENVMRAYYGSTEGGTNLTAYRVRMLSLFQELEPTVNVSAQRLSDQVRVIQRNHRLDDAALDRLRSEILNDRIVSTPAQTAVQASIIDAVPPRSTHVVGEGDDRVATVSSQSNDRLRSALEDAFREYRSTPTELRPRLPRLPMHKKNRALVCALDSQHKDFFESSEDLVDTHSILYCAAVAACRLANVKFPNCDGATRPKPAVPAWQCRIERRIDGARVLIGKLYCFREGNTQPRVMRFVRRAFSGTGISPPEYMSRVTERIDFLKQKVCAWASRIRRYERRVDRYTQNRIFQSDERWVYRAWERPEQNVTDVCRPDDTITSAFWRSIWSVPVCHAEAGWMQDVERVCEAIPEMEAVLITPLDVARAVRPLPNWKSPGPDGLHNFWIKWLISSHTRLASQFQSSLESGSLPQFLTTGVTHLLHKSGSPAEPKNYRPITCLSTIYKLLTSILRAKINMHIENNSIMSASQNGCRNGSRGTKELLLIDMAISQQVRRSRKDLSTCWIDYKKAYDSVPHTWLMRVLELYKIDATLRTFLGSCMGQWRTVLRYPGCRRIQGNDEPVWIKRGIFQGDSLSPLWFCLALNPLSTLLEDSGLGYRLRRGGQVISHLLYMDDLKLFAPNKLRLMELLKVTETFSSAIRMEFGVDKCAVMHVKRGEIMESEGIQLSDSIHLRSLSSSETYKYLGMSEALGINVADMKQSLKERFFGRLKKVLISLLSGGNKVRAFNGWVMPVLMYSFGILKWTQTELDALDRRVRTLLTANRMHHPRSSVMRLYIPRKCGGRGFLNAKTLHNREVCSLREYFLKADVGMHRDVVAVDKGLTPLSMANENWRKPVVLTTDDRKKVWQSKELHGRFYRALHEPGVDFLASVSWLRFGDLFGETEGFVCAIMDEVILTNNYRRHIMRDGTVDVCRACHRPGESIRHIVSGCSRLANGEYLHRHNQVARIIHQQLALKYKLVDSEVPYYRYVPDPVLENDHVTLYWDRSIITDRTIVASKPDIVVIDRLARRAMIVDVTIPHDENLVKAEKEKQIKYLDLAHEVVDMWNVSSAIIVPIVVTANGLMAESLDQHLLRLSLGGWIKGQIQKAVLLDTARIVRRFLSLQP

SEQ ID NO: 29984 - protein, 927 aa, Lymantria dispar
MVVFTDTRYNEEVRNALEHAIQEYRFKPHNIRPRLPRLPMHRKNRRLVNILDSLLGSYLSTSDNISDTHSILYCAAVAACRMAGLKFLKTESAIRQKEAIPVWQRRIECRICEARLLIGKLSCFRTGNTRPRVMRYVRRAFFGTDIKPEEYKALVTERIDYLKQKVYAWANRIRRYKKRVNRYSMNRMFESDQKSVYRNWERPCQLVDDERLPDAGATNTFWRSIWSVPVVYSEGDWMGDVKRACENIPQMENIIIDQEDVACAVRSLSNWKSPGSDGLHNFWLKWLHSAHACLASHFQSALVTGMLPEFMTTGITHLLHKTGSTTEPSNYRPITCLPSVYKLLTFILRNKIAKHIHLNSVMSISQNGCRNGGRGTKELLLIDMAISQQVRRNRKDLSTCWIDYRKAFDSVPHTWLLRVLELYKVDSTLCTFLRACMGQWKTIFRYPTCRLNRGSTEPIYIRREIFQGDSLSPLWFCLATNPLSTLLEHSGLGCRLRRGGQTISHLLYMDDLKLFTPNNTQLVELLKITKTFNNSISMEFGVDKCAIRHVKQGEVVEVDRDQLFDTLQFRPLHRTETYKYLGMSQALNINEADMKQALRERFLGRLKKVLNSLLSGGNKVRAYNAWVMPLLMHSFGILKWTQTELDTLNRKVRTLLTSHRMHHPRSSIMRLYIPRRCGRRSFLNAKALHNREVCNLRDYFLKKTSGVHLDMMKVDSGLTPLGLAKENWRRPVVLSTTDRENVWQSKELHRRFYGALHAPEVDLSASVTWLRFGNLFGETEGFICAITDEVIKTNNYRKYILRDGTADICRACHRPGESLRHIVSGCSRLANGEYLHRHNQVARIIHQQLTLRYKLVSVEMPYYRYVPKPVLENSRVTLYWDRSIITDRTIVANKPDIVVIDRLERRAMIVDITVPHDGNLLKAEKDK

SEQ ID NO: 29985 - protein, 927 aa, Lymantria dispar
MVVFTDTRYNEEVRNALEHAIQEYRFKPHNIRPRLPRLPMHRKNRRLVNILDSLLGSYLSTSDNISDTHSILYCAAVAACRMAGLKFLKTESAIRQKEAIPVWQRRIECRICEARLLIGKLSCFRTGNTRPRVMRYVRRAFFGTDIKPEEYKALVTERIDYLKQKVYAWANRIRRYKKRVNRYSMNRMFESDQKSVYRNWERPCQLVDDERLPDAGATNTFWRSIWSVPVVYSEGDWMGDVKRACENIPQMENIIIDQEDVACAVRSLSNWKSPGSDGLHNFWLKWLHSAHACLASHFQSALVTGMLPEFMTTGITHLLHKTGSTTEPSNYRPITCLPSVYKLLTFILRNKIAKHIHLNSVMSISQNGCRNGGRGTKELLLIDMAISQQVRRNRKDLSTCWIDYRKAFDSVPHTWLLRVLELYKVDSTLCTFLRAYMGQWKTIFRYPTCRLNRGSTEPIYIRREIFQGDSLSPLWFCLATNPLSTLLEHSGLGCRLRRGGQTISHLLYMDDLKLFTPNNTQLVELLKITKTFNNSISMEFGVDKCAIRHVKQGEVVEVDRDQLFDTLQFRPLHRTETYKYLGMSQALNINEADMKQALRERFLGRLKKVLNSLLSGGNKVRAYNAWVMPLLMHSFGILKWTQTELDTLNRKVRTLLTSHRMHHPRSSIMRLYIPRRCGRRSFLNAKALHNREVCNLRDYFLKKTSGVHLDMMKVDSGLTPLGLAKENWRRPVVLSTTDRENVWQSKELHRRFYGALHAPEVDLSASVTWLRFGNLFGETEGFICAITDEVIKTNNYRKYILRDGTADICRACHRPGESLRHIVSGCSRLANGEYLHRHNQVARIIHQQLTLRYKLVSVEMPYYRYVPKPVLENSRVTLYWDRSIITDRTIVANKPDIVVIDRLERRAMIVDITVPHDGNLLKAEKDK

SEQ ID NO: 29986 - protein, 1145 aa, Arctia plantaginis
MLTRARSRALTTSPDSSLRSVLPSPEATTEVPAVAEASSSTSSDEFFSPPTSPTPVRRQGRGRPPTSLGSRGLLTSNRVPATGGDVRRMKWTKSINENVMRAYYRATEVGTNLTAYRVRLVSLFQELEPAVNVSAQRLSDQVRAIQRCHLLDDAVLERIRSDIRNSLIIPSSSHTVDSVANSTPQLASYTDDIDELVESEVISVSTQYNDRIRSALEDAILEYRYLNCNDRPRLFRLPIHKRNLALVGALDSLLPEYLDNSEDLSDTHSILYCAAIAVCRVAGVKIANNVTTTRPKSTVPAWQYRIERRITETRTLIGKLISYRSGNMRPRVMRFVKQAFLGTTISPQQYMSCVTERIDFLKQKIYAWTNRIRRYKKRIDRYNQNRMFQRNEKWVYRKWEEPDPCVGDRHLPDENVTNTFWRNIWSVPVTHIEGDWLQDVRRSCESITPMEPVKIDKDDVSCAVRSLPNWKSPGPDGLHNFWLKWFRSSHARLASQFQAALDSGSLPQFLTTGITHLLYKSGSVMDPKNFRPITCLPTMYKLLTSILRLKITLHINNNSIMSVSQNGCRSGTRGTKDLLIIDMTISQQVRCNRKSLATCWIDYKKAYDSVPHTWLLKVLELYKIDTTLCTFLKSCMGQWRTALRYPGCRQTAIHDVLIKIERGIFQGDSLSPLWFCLALNPLSTLLEGSGLGYRLQKDDQVISHLLYMDDLKLLASNKLQLTKLLKVTENFSNSIKMEFGVDKCAVMYVKKGVIVESEGIELLDSTKLRSLSATETYKYLGISQSLGIPESNMKQTLQERFFGRLKKVLKSLLSGGNKVRACNGWVMPVLMYSFGILRWTQTELDALDRKVRTLLTASRMHHPRSSVMRLYIPRKLGGRGLLNIKTLHNREVCNLREYFLHTDVGVHRNVVAVDTGFTPLALAKENWRRPVVLGVNDRREVWKGKELHGRFYRALNGSDIDLKASTTWLRHGDLFGETEGFVCAIMDEVIMTNNYRKYILKDGTVDICRACHRPGESIRHIISGCSRLANGEYLHRHNQVARIVHQQLALKYHLVNLEVPYYRYVPDPVLENGRATLYWDRSIITDRTIVANKPDIVLIDRLERRAMIVDIAVPHDENLVKVEKEKQLNIWIYLTRLSICGMLIQ

SEQ ID NO: 29987 - protein, 1203 aa, Amphipyra berbera
MLTRARARKQTAHPRSPDSSLSSASQPPESSPPVSAVTPAAAVASSSSDEYYSPPSSPPPVRRRGGARPPACLGPRGQPATNRVPAAGGNVSRMRWTQSINENVMRAYYGATEGGINLTAYRERMLFLFQVLEPAINVSAQRLSDQVRVVQRNRRLDDTVLERLRSEARNSQSVTFPVQAAVQMQPIAVPPRPIHVDGEGDGEAINVSNQCSEELRSALDDAILEFRTTPPEIRPRLPRLPMHGKNRALMCALDSLLSNYFDGSEDLADTHSILYCAAIAACRVAHVKFTENERATRPKPAVPAWQSRIERRIGRARVLIGKLICFREGNNRPRVMRFVRRAFSGTDISPRDYMSRVTERIDFLKQKVYAWANRIRRYKRRVERYTQNRIFQSDQRRVYRAWERPDPSGGDVRLPDDDALSSFWRSIWSVPIAHTEDGWMRDIEQACEPIAEMEPITITPQDVADAARPLPNWKSPGPDGLHNFWLKWLRSSHARLASQFQSSLESGSLPQFLTTGVTHLLYKSGSTAEPKNYRPITCLPTVYKLLTSILRVKITTHIDNNCIMSASQNGCRKGSRGTKELLLIDMAISQQVRRSQKDLSTCWIDYKKAYDSVPHSWLMRVLELYKINTTLRTFLMSCMRHWRTVLRYPGCRRIRGSGEQIRIERGIFQGDSLSPLWFCLALNPLSTLLEGTGLGYQLRRGGQVISHLLYMDDLKLFAPTDLLLMELLKVTENFSNSIRMEFGVDKCAVMHVKRGRIAESEGIQLPNSVQLRSLSPTETYKYLGMSEALGISETDMRQSLRERFFGRLNKLLKSLLSGGNKVRAFNGWVMPVLMYSFGTLKWTQADLDALDRRVRALLTAHRMHHPRSSVMRLYIPRKCGGRGFLNAKTLHNREVYSLREYFLQAEGVMHRDVVAVDKGFTPLALARENWRKPAVLSTNDREVVWQSKELHGRYYRALHGPDVDFSASVSWLRSGNLFGETEGFVCAIMDEVMMTNNYRKYIVKDGTVDICRACHRPGESIRHIVSGCSRLANGEYLHRHNLVARIIHQQLALKYNLVESEVPYYRYVPDPVLENGHATLYWDRSIITDRTIVANKPDIVVIDRSKRRTMIVDITVPHDENLVKAEKDKQIKYLDLAHEVVGMWDVDSAVIVPIVVTANGIIAKSLDIHLMRLSLGGWIKGLIQRAVLLDTARIVRRFLSLEP

SEQ ID NO: 29988 - protein, 1200 aa, Mythimna ferrago
MLTRSRARRLETHPTTSGSSLNSASQPPGPAPAVSPVIPEAAVASSSSDEYFSPPTTPPPARRRGRGRPPASLGPRGPPASDRVPAVGGSVQRMRWTSSINENVMRSYFGATEGGINLTAYRGRMLSLFQVLEPAVNVSVQRLSDQVRVIQRNRMLDDAVLDRLRLESQSSRVSAATPSAAAQRQPSAAPRPDHVGDAADDAAISVSTQCNERLRGALEDAFREYRSIPPELRPRLPRLPMHKRNRALVCALDSQLSICFDSSEDLADTHSILYCAAVAACRVAHVKFPNCNRATRPAVPAWQCRIERRIGEARALIGKLICFREGNTRPRVMRFVRRAFSGTDISPRDYLPCVTERIDFLKQKIYAWANRIRRYKRRVERYTQNRTFHSNERWVYRAWERPDQGVTDTRLPDDDAMFSFWRSIWSAPVSHTEGDWIREVERACDLLPEMGAITISPQDVARAVRPLPNWKSPGPDGLHNFWLKWFQGSHARLASQFQSALESGSLPQFLTTGITHLLHKSGSTAEPKNYRPITCLPTVYKVLTSILKAKINSHIETNSIMSVSQNGCRNGSRGTKELLLIDIAISQQVRRSRKNLSACWIDYKKAYDSVPHTWLMRVLELYKVDATLRTFLMSCMGQWRTVLRYPGCRQIWENSEPIRIERGIFQGDSLSPLWFCLALNPLSTLLEGSGLGYRLKRGGQVISHLLYMDDLKLFAPNNLQLMELLKVTETFSSAIRMDFGVDKCAVIHVKRGEIMESEGIQLSDSIHLRSLSSTETYKYLGMSEALSINTDDVKQSLKERFFGRLNKVLNSLLSGGNKVRAFNGWVMPVLMYSFGILKWTQTELDALDRRVRTLLTANRMHHPRSSVMRLYIPRKCGGRGFLNAKSLHNREVCSLREYFLAVNVGMHRDVVAVDKGLTPLSLANENWRKPLVLDTNDRREVWQGKELHGRFYRALHGPDVDLLASVSWLRFGDLFGETEGFVFAIMDEVMMTNNYRKYIVKDGTVDICRACHRPGESIRHIISGCSRLANGDYLHRHNLVARIIHQQLALKYNLVESEVPYYRYVPDPVLDNGSITLYWDRSIITDRTIVANKPDIVVIDRLERRTMIVDIAVPHDENLVKAEKDKQIKYLDLAREVVDMWEVDRAIIVPIVVTANGLIAKSLEQHLRRLSLGSWIKGLIQKAVLLDTARIVRRFLSQEP

SEQ ID NO: 29989 - protein, 953 aa, Eupsilia transversa
MRFASIGTRLPNLGLDYHAYLCTKRIGRWCVPWTRSLRISSSFAATRPKPAVPAWQCRIERRIDGARVLIGKLYCFREGNTRPRVMRFVRRAFSGTGISPQEYMSRVTERIDFLKQKVCAWANRIRRYKRRVDRYTQNRMFQSDERWVYRAWERPEQNVADVCRPDDAATSAFWRSIWSVPVCHAEAGWMHGVERVCEAIPEMEAVIITPLYVARAVRPLPNWKSPGPDGLHNFWLKWLISSHTRLASQFQSSLESGSLPQFLTTGVTHLLHKSGSPAEPKNYRPITCLSTVYKLLTSILRAKINSHIDSHSIMSASQNGCRNGSRGTKELLLIDMAISQQVRRSRKDLSTCWIDYKKAYDSVPHTWLMRVLELYKIDATLRTFLMSCMGQWRTVLRYPGCRQIQGNDEPVWIKRGIFQGDSLSPLWFCLALNPLSTLLEESGLGHRLRRGGQVISHLLYMDDLKLFAHNKLRLMELLKVTETFSSAIRMEFGVDKCAVMHVKRGEIMESEGTQLSDSIHLRSLSSTESYKYLGMSEALGINVADMKQALKERFFGRLKKVLISLLSGGNKVRAFNGWVMPVLMYSFGILKWTQTELDALDRRVRTLLTANRMHHPRSSVMRLYIPRKCGGRGFLNAKTLHNREVCSLREYFLKTEEGMHRDVVAVDKGLTPLSMAKENWRKPVVLTTDDRKEVWQSKELHGRFYRVLHEPGVDFLASVSWLRFGDLFGETEGFVCAIMDEVILTNNYRRHIMKDGTVDVCRACHRPGESIRHIISGCSRLANGEYLHTHNQVARIIHQQLALKYKLADSEVPYYKYVPDPVLENDHVTLYWDRSIITDRTIVANKPDIVVIDRLARRAMIVDVTIPHDENLVKAEKEKQIKYLDLAHEVVDMWNVSSAIIVPIVVTANGLMAESLDQHLLRLSLGGWIKGLIQKAVLLDTARIVRRFLSLQP

SEQ ID NO: 29990 - protein, 868 aa, Amphipyra tragopoginis
MRFVRRAFSGTDVSPREYMSRVTERIDFLKQKVYAWANRIRRYRRRVDRYTQNRLFQSDERWVYRTWERPDQRVSDTRLPDNDVMNTFWRNIWSVPVAHTEGDWMQEVQRACEPIQEMGDIIISPQDVASAVRPMSNWKSPGPDGLHNFWLKWLRGSHARLASQFQSSLESGSLPQFLTTGVTHLLHKSGSTAEPKNYRPITCLPTVYKVLTSILRTKINNHIDNNSIMSASQNGCRNGSRGTKELLLIDMAISQQVRRSRKDLSTCWIDYKKAYDSVPHTWLMRVLELYKVNTTLCAFLTSCMGQWRTVLRYPGCRQIQGIGEPIRIERGIFQGDSLSPLWFCLALNPLSTLLEGSGLGYRLRRGGQVISHLLYMDDLKLFAPNNLRLLELLKVTETFSNSIRMEFGVDKCAVMHVKRGRIMESVGTQLSDSIQLRSLSSTETYKYLGMSEALGVNETDMKQSLKERFFGRLKKVFNSLLSGGNKVRAFNGWVMPVLMYSFGILKWTQTELDALDRRVRSLLTANRMHHPRSSVMRLYIPRKCGGRGFLNAKTLHNREVCSLREYFSQADVGMHRDVVAVDKGFTPLSLAKENWRKPVVLDTNGRREVWRSKELHGRFYRALHGPDVDFLASVAWLRFGDLFGETEGFVCAIMDEVMMTNNYRKYIVKDGTVDICRACHCPGESIRHIVSGCSRLANGEYLHRHNLVARIIHQQLALKYNLVDAEVPYYKYVPDPVLENGHVTLYWDRSIITDRTIVANKPDIVVIDRSERLTMIVDITVPHDENLVKAEKDKEIKYQDLAHEVVAMWDVDSAIIVPIVVTANGLIAKSLDQHLKRLSLGSWIKGLIQKAVLLDTARIVRKFLSLRP

SEQ ID NO: 29991 - protein, 1202 aa, Amphipyra tragopoginis
MLTRSRARARDNQAHLPPPDSSPSSASQQQGLNPASPAAAVASSSSDEYYSPPSSPPPARRRGGTRPPVGLGLRGPLASDRVPAPGGIVPRMKWTQKMNESVMRAYYGATEGGTNLTAYRSRMLSLFQVLEPAVNVSAQRLSDQVRVIQRGHMLDDTVLDRLRSEVQSSPVISPSSKVLEQQQNLAAALPRPNRADEEDDDRAANVSTQCNDELRSALEDAMREYRYTRSDLRPRIPRLPMHRKNRALVCALDSLLSNYFDGSEDLGDTHSILYCAAVAACRVAHVKFTDNERATRPKNAVPAWQCRIERRISEARALIGKLVCFREGNTRPRVMRFVRRAFSGTDVSPREYMSRVTERIDFLKQKVYAWANRIRRYRRRVDRYTQNRLFQSDERWVYRTWERPDQRVGDTRLPDNDVMNTFWRNIWSVPVAHTEGDWMQEVQRACEPIQEMGDIIISPQDVASAVRPMSNWKSPGPDGLHNFWLKWLRSSHARLASQFQSSLESGSLPQFLTTGVTHLLHKSGSTAEPKNYRPITCLPTVYKVLASILRTKINNHIDNNSIMSASQNGCRNGSRGTKELLLIDMAISQQVRRSRKDLSTCWIDYNKAYDSVPHTWLMRVLELYKVNTTLCAFLTSCMGQWRTVLRYPGCRQIQGIGEPIRIERGIFQGDSLSPLWFCLALNPLSTLLEGSGLGYRLRRGGQVISHLLYMDDLKLFAPNNLRLLELLKVTETFSNSIRMEFGVDKCAVMHVKRGRIMESVGTQLSDSIQLRSLSSTETYKYLGMSEALGVNETDMKQSLKERFFGRLKKVFNSLLSGGNKVRAFNGWVMPVLMYSFGILKWTQTELDALDRRVRSLLTANRMHHPRSSVMRLYIPRKCGGRGFLNAKTLHNREVCSLREYFSQADVGMHRDVVAVDKGLTPLSLAKENWRKPVVLDTNGRREVWRSKELHGRFYRALHGPDVDFLASVAWLRFGDLFGETEGFVCAIMDEVMMTNNYRKYIVKDGTVDICRACHCPGESIRHIVSGCSRLANGEYLHRHNLVARIIHQQLALKYNLVDAEVPYYKYVPDPVLENGHVTLYWDRSIITDRTIVANKPDIVVIDRSERLTMIVDITVPHDENLVKAERDKEIKYQDLAHEVVAMWDVDSAIIVPIVVTANGLIAKSLDQHLKRLSLGSWIRGLIQKAVLLDTARIVRKFLSLRP

SEQ ID NO: 29992 - protein, 868 aa, Amphipyra tragopoginis
MRFVRRAFSGTDVSPREYMSRVTERIDFLKQKVYAWANRIRRYRRRVDRYTQNRLFQSDERWVYRTWERPDQRVSDTRLPDNDVMNTFWRNIWSVPVAHTEGDWMQEVQRACEPIQEMGDIIISPQDVASAVRPMSNWKSPGPDGLHNFWLKWLRSSHARLASQFQSSLESGSLPQFLTTGVTHLLHKSGSTAEPKNYRPITCLPTVYKVLTSILRTKINNHIDNNSIMSASQNGCRNGSRGTKELLLIDMAISQQVRRSRKDLSTCWIDYKKAYDSVPHTWLMRVLELYKVNTTLCAFLTSCMGQWRTVLRYPGCRQIQGIGEPIRIERGIFQGDSLSPLWFCLALNPLSTLLEGSGLGYRLRRGGQVISHLLYMDDLKLFAPNNLRLLELLKVTETFSNSIRMEFGVDKCAVMHVKRGRIMESVGTQLSDSIQLRSLSSTETYKYLGMSEALGVNETDMKQSLKERFFGRLKKVFNSLLSGGNKVRAFNGWVMPVLMYSFGILKWTQTELDALDRRVRSLLTANRMHHPRSSVMRLYIPRKCGGRGFLNAKTLHNREVCSLREYFSQADVGMHRDVVAVDKGFTPLSLAKENWRKPVVLDTNGRREVWRSKELHGRFYRALHGPDVDFLASVAWLRFGDLFGETEGFVCAIMDEVMMTNNYRKYIVKDGTVDICRACHCPGESIRHIVSGCSRLANGEYLHRHNLVARIIHQQLALKYNLVDAEVPYYKYVPDPVLENGHVTLYWDRSIITDRTIVANKPDIVVIDRSERLTMIVDITVPHDENLVKAEKDKEIKYQDLAHEVVAMWDVDSAIIVPIVVTANGLIAKSLDQHLMRLSLGSWIKGLIQKAVLLDTARIVRKFLSLRP

SEQ ID NO: 29993 - protein, 1201 aa, Amphipyra tragopoginis
MLTRARTREARPPPPDSPLSSASQPPESSPTVSAVTPAAAVASSSSDEYFSPPTSPTPVRRQGRRRPPNSLGPRGPPAPSRVLATGGCVQRMKWTQSINENVMRAYYGSTEGGTNLTAYRVRMLTLFQELEPAINVSAQRLSDQVRVIQRNHRLDDAALDRLRLEVQSSRVTPVPSQTAVHHININVVPPRSDCVDGDVDDRAVTVSSQYNDRLRSALEDAIREYRANPELRPRLPRLPMHNKNRALVCALDSLLSSYFESSEDLVDTHSILYCAAVAACRVANVKFNNSERATRPKPAIPAWQCRIERRIDGARALIGKLICFREGNTRPRVMRFVRRAFSGTGISPREYMSQVTERIDFLKQKVCAWASRIRRYKRRVERYAQNRMFQCDQRWVYRAWERPDQGVSDGRLPDDDAMSSFWRSIWSVPVTHTEGDWTRDIERACEPIEEMGEILISPQDVASAARPLPNWKSPGPDGLHNFWIKWLRSSHARLASQFQSSLESGSLPQFLTTGVTHLLHKSGSTAEPKNYRPITCLPTVYKLLTSILRTKINTHVENNSIMFPSQNGCRNGSRGTKELLLIDMAISQQVRRSRKNLSTCWIDYKKAYDSVPHTWLMRVLELYKINTTLRTFLTSCMRQWRTVLRYPGCRPILGSGEPISIERGIFQGDSLSPLWFCLALNPLSTLLEGSGLGYPLRRGGQVVSHLLYMDDLKLFAPTKLQLVELLKVTETFSNSIRMEFGVDKCAVMHVRRGGIMESEGLQLSDSIHLRSLSANDTYKYLGMSEGLGISEADMKQSLRERFFGRLKKVLKSLLSGGNRVRAFNGWVMPVLMYSFGILKWTQTELDALDRRVRTLLTANRMHHPRSSVMRLYIPRKCGGRGLLNAKTLHNREVCSLREYFLHADAGMHRHVVAVDKGLTPLNLAKENWRKPVVLSTNDRREVWQSKELHGRFYRALHGPDVDFLASVSWLRFGDLFGETEGFVCAIMDEVIMTNNYRKYIVKDGTVDICRACHCPGESLRHIISGCSRLANGEYLHRHNQVARIIHQQLALKYNLVESEVPYYKYVPDPVLENGHITLYWDRSIITDRTIVANKPDIVVIDRSERRTMIVDVTIPHDENLVKAEKDKQIKYLDLAHEVVNMWDVDSATIVPIVVTANGLMAKSLDQHLKRLSLGGWIKGLIQKAVLLDTARIVRRFLSLEP

SEQ ID NO: 29994 - protein, 1200 aa, Mythimna impura
MLTRAAARRARHPPPGSPLSSASPPPDLESPVSPAAAVASSSSDEYFSPPTSPTPVRRQRRGRPPKSLGSRGQPAPSRVPAAGGCVQRMRWTQSMNENVMRAYYGSTEGGTNLTAYRDRMLSLFQDLEPTVNVSAQRLSDQVRVIQRNHRLDDATLDRLRSEVLSNQIVSTSIQTQTAATPTTNAISPRSNPNNDDADDRVVTVSSQCNDELRSALEDALREYRTTPTELRPRLPRLPMHKKNRALVCTLDSLLKNNFESSENLVDTHSILYCGAVAACRLANINFPNIDGTIRPKPAVPAWQYRIERRIDGARVLIGKLHCFREGNTRPRVMRFVRRAFLGTGISPQEYMSRVTERIDFLKQKVCAWASRIRRYKRRVDRYSQNRMFQSDERWVYRAWERPEQNVIDGCRPDDFATITFWRNIWSVPVSHTEGDWMRDVERVCEAIPEMEKVVITPADVAKAVRPLPNWKSPGPDGLQNFWLKWFSNSHAPLASQFQSTLESGSLPEYLTTGVTHLLHKTGNPVEPKNYRPITCLSTVYKLLTSILRAKINRHIENNLIMSASQNGCRNGSRGTKELLLIDMAISQQARRSRKDLSTCWIDYKKAYDSVPHTWLMRVLELYKVDMTLRTFLESCMRQWKTVLRYPGCRPIQGNDEPIRIKRGIFQGDSLSPLWFCLALNPLSTLLEESGLGYRLRRGGQAISHLLYMDDLKLFAPSNLQLMELLKVTETFSSAIRMEFGVDKCAAMHVKRGEIMESEGIQLPDSIHLRSLSSTETYRYLGMSEALGINNADMKQSLKERFFGRLKKVLNSLLSGGNKVRAFNGWVMPVLMYSFGILKWTQTELDALDRRVRTLLTANRMHHPRSSVMRLYISRKCGGRGFLNAKTLHNREVCSLREYFLKTDVGMHRDVVAVDKGLTPLSMAKEDWRNPVILTTDDRKEVWKSKELHGRFYRALHESDIVFAASVAWLRFSNLFGETEGFICAIMDEVILTNNYRRYIMKDGTVDVCRACHRPGESIRHIISGCSRLANGEYLHRHNQVARIIHQQLALKYNLVDSEVPYYKYVPDPVLENDHVTLYWDRSIITDRTIVANKPDIVVIDRLARRAVIVDVTIPHDENLVKAEKEKQIKYLDLAHEVVDMWNVDSAVIVPMVVTANGLIAKSFDDHLSKLSLRGWMKGLIQKAVLLDTARIVRRFLSLEP

SEQ ID NO: 29995 - protein, 1192 aa, Limenitis camilla
MLTRARAKNVRSPTSPGSSDNSTSQVPEHTEEVVAVVSSSSDEYFSPPTSPSPVRRPGRGRPPRSLGPRGQPASRQVPAIDGYVQRMKWTQCINENVMRAYYGSTEGGTNLTAYRDRMLSLFQKLEPSINVSAQRLSDQVRIILRNHRLNDTVLERIRSEVHDSRVIPSSIQATLPGPSPPSPNQRDEEEDDTTITAGKKYDELLRSALEDAIREYRYTSDEIRPRLPRLPMHKKNRALVCTLDSLLPMYFESSEDLKDTHSILFCAAVAVCRVAHVKLVNTETTRPKPDVAAWQSRIERRIDETRVLIGKLYSFREGNTRPRVMRFVRRAFSGTEICPPEYMARVTERIDTLKQKIYAWANRIRRYRRRVDRYSQNRMFQKDQKWVYRTWERPDQNVDDIHRPDDDDTNKFWRSIWSVSVDHTEGDWMREIRQTREPLQAMEHISITCKDVADAVRSVPNWKSPGPDGLHNFWLKWLRSSHACLASQFQSALESGSLPQFLTTGITHLLHKSGSTTEPKNYRPITCLPTVYKLLTSILRDKIDSHITKNAIMSISQNGCRNRSRGTKELLLIDMTISQQVRRSRKDLSTCWIDYKKAYDSVPHGWLMRVLELYKVDATLCAFLGSCMRQWRTVLRYPGCRPIQGNNEPIRIKRGIFQGDSLSPLWFCLALNPLSTLLENSGLGYRLRRGGQVISHLLYMDYLKLFVPTKLQLIELLKITKTFSNSIRMEFGVDKCAVMHVKRGKIEESEGIQLSDSVNLRSLSADETYKYLGMSEALGIIEIDMKQSVRERFLARLRKVLKSLLSGGNKVRAYNGWVMPILMYSFGILKWTQKELDDLDRKVRALLTTYRMHHPRSSVMRLYIPRKCGGRGFLNAKTLHNREVCNLREYFLQTDVGMHRDVVAMDKGLTPLSLAKENWRKPIVLSTDNRKEVWKSKELHGRFYRALHGDVVDFKASVSWLRFGNLFGETEGFVCAIMDEVIMTRNYRRYIVRDGTVDICRACHSSGESLRHIISGCPRLANGEYLHRHNQVAKIIHQQLALRYGLVESEVPYYRYAPDPVLENGHVTLYWDRTIITDRTIIANKPDIVVIDRSERCTMIVDVTIPHDGNLVKAEKDKQMKYLDLAHEIVDMWDVDSAVVVPIVVTANGLIAKSLDQHLKRLALDGWVKGLMQKAVLLDTARIVRKFLSLEP

SEQ ID NO: 29996 - protein, 962 aa, Mamestra brassicae
MHKKNRALVCALDSLLQNTFESSESLVDTHSILFCGAVAACRIANVKFPSYDEAIRPKPAAPAWQCRIERRIDEARALIGKLYCFREGNTRPRVMRFVRRAFLGTGISPRDFTSRVTERIDFLKQKVCAWANRIRRYKRRVDRYSQNRMFQSDERWVYRAWERPEQSVMDVCRPDDNTTSTFWRGIWSVPVCHTEGGWLRDVEHVCEAIPEMDTITITPLDVAKAVRPLPNWKSPGPDGLHNFWLKWYSSSHVLLASQFQSSLESGSLPQFLTTGVTHLLHKTGSPAEPKNYRPITCLSTVYKLLTSILRAKINEHIERNSIMSASQNGCRKGSRGTKELLLIDMAISQQVRRSRKDLSTCWIDYKKAYDSVPHTWLMKVLELYKIDATLRTFLESCMRQWKTVLRYPGCRPIQGNDEPVWIKRGIFQGDSLSPLWFCLALNPLSTLLEDSGLGYRLRRGGQAISHLLYMDDLKLFAPNNLRLMELLKVTETFSSSIRMEFGVDKCAVMHVKKGEIMESEGIQLSDSIQVRSLSSTETYKYLGMSEALGINGADMKQSLRERFFGRLKKVLNSLLSGGNKVRAFNGWVMPVLMYSYGILKWTQTELDALDRRVRTLLTANRMHHPRSSVMRLYIPRKCGGRGFLNAKTLHNREVCNLRDFFLKTDVGMHRDVVAVDKGLTPLSMAKENWRKPVILTTDDRKEVWKGKELHGRFYRALHEPDVDFPASVSWLRFGDLFGETEGFVCAIMDEVILTNNYRRYIMKDGTVDVCRACHRPGESIRHIISGCSRLANGEYLHRHNQVARIIHQQLALKYQLVDSEVPYYKYVPDPVLENDHVTLYWDRSIITDRTIVANKPDIVVIDRLARRTMIIDVTITHDVNLVKAEKEKQIKYLDLAHEVVDMWNVDSAVIVPIVVTANGLLSKSFDDHLSKLSLRGWVKGLIQKAVLLDTARIVRRFLSLEP

SEQ ID NO: 29997 - protein, 1194 aa, Autographa gamma
MLTRSRARKPAHPPSPDPSPSSASQLPDHVPAPAPAVASSSSDEYYSPPTSPTPVRRQGRRRPPCSLAPSGQPASNRAPAPGGDVRRMKWTLSINENVMRAYYGATEGGTNLTAYRARMLSLFQALEPGVSVSAQRLSDQVRVIQRNHRLDDSTLDRLRSEIQHSPATSTSPPVAAPVSGAPLTAPSDGEEEDGAITVSTQCNELIRSTLEDAIRVYRRSPPDQRPRLPRLPMHNRNKAIMGALDSLLPVYFESSEDLRDTHSILYCAALTACRVANVAMCHSNIATRPKPAVPAWQCRIEQRVDEARTLIAKLKAFKQGNSRPRVMRFVRRAYAGTDISPSEFIARVTERIDLFKQRVCAWANRIRRYKRRAERFHLNRMFQKDQRWVHRLWERPVSAMDGGCLPDGDATNSFWRSIWSVPVTHSEGGLMREVEQVCEPIQEMGAITISPQDVANAVRPMANWKTPGPDGLQNFWLKWLRSSHSCLASQFQSAVESASLPQFLTTGSTHLLHKTGSATDPKNYRPITCLPTVYKLLTSILRAKINEHIVNFSIMSASQNGCRSGSRGTKELLLIDTAICQQVRRSKKDLSTCWIDYKKAYDSVPHTWLMRVLELYKINTTLRAFLMSCMGQWSTVLHYPGCRDIQQGGEPIRIERGIFQGDSLSPLWFCLALNPLSTLLENSGLGYSLRRGGQVISHLLYMDDLKLFATSGFQLMELLKITESFSNSISMEFGVDKCAVMHVKRGGIVESQGIQLSDSINLRSLSATDTYKYLGMSEALGINVADVKQSLQARFFGRLNKVLKSVLSGGNRVRAFNGWVMPVLMYSFGVLKWTQTELDALDRRVRTLLTANRMHHPRSSVMRLYIPRKCGGRGFLNAKTLHNREVCNLREYFLQVDVGMHRDVVVVDKGFTPLSLGKENWHKPVVLSVKDREDVWQSKELHGRYYRTLHGPDVDFLASVAWLRFGDLFGETEGFVCAIMDEVIMTNNYRKYIIKDGTVDICRACHCPGESLRHIISGCSRLANGEYLHRHNQVARIIHQQLALRYKLVESEVPYYRYVPDPVLENGRVTLYWDRSIITDRTIVANKPDIVVIDRSERRAIIVDVTIPHDENLVKAEKEKQLKYLDLAHEVVDMWEVDSAMIVPIVVTANGIIAKSLDQHLKRLSLGTWVKGLIQKAVLLDTARIVRRFLSLES

SEQ ID NO: 29998 - protein, 1145 aa, Arctia plantaginis
MLTRARSRALTTSPDSSLRSVLPSPEATTEVPAVAEASSSTSSDEFFSPPTSPTPVRRQGRGRPPTSLGSRGLLTSNRVPATGGDVRRMKWTKSINENVMRAYYRATEVGTNLTAYRVRLVSLFQELEPAVNVSAQRLSDQVRAIQRCHLLDDAVLERIRSDIRNSLIIPSSSHTVDSVANSTPQLASYTDDIDELVESEVISVSTQYNDRIRSALEDAILEYRYLNCNDRPRLFRLPIHKRNLALVGALDSLLPEYLDNSEDLSDTHSILYCAAIAACRVAGVKIANNVTTTRPKSTVPAWQYRIERRITETRTLIGKLISYRSGNMRPRVMRFVKQAFLGTTISPQQYMSCVTERIDFLKQKIYAWANRIRRYKKRIDRYNQNRMFQRNEKWVYRKWEEPDPCVGDRHLPDENVTNTFWRNIWSVPVTHIEGDWLQDVRRSCESITPMEPVKIDKDDVSCAVRSLPNWKSPGPDGLHNFWLKWFRSSHARLASQFQAALDSGSLPQFLTTGITHLLYKSGSVMDPKNFRPITCLPTMYKLLTSILRLKITLHINNNSIMSVSQNGCRSGIRGTKDLLIIDMTISQQVRCNRKSLATCWIDYKKAYDSVPHTWLLKVLELYKIDTTLCTFLKSCMGQWRTALRYPGCRQTAIHDVLIKIERGIFQGDSLSPLWFCLALNPLSTLLEGSGLGYRLQKDDQVISHLLYMDDLKLLASNKLQLTKLLKVTENFSNSIKMEFGVDKCAVMYVKKGVIVESEGIELLDSTKLRSLSATETYKYLGISQSLGIPESNMKQTLQERFFGRLKKVLKSLLSGGNKVRACNGWVMPVLMYSFGILRWTQTELDALDRKVRTLLTASRMHHPRSSVMRLYIPRKLGGRGLLNIKTLHNREVCNLREYFLHTDVGVHRNVVAVDTGFTPLALAKENWRRPVVLGVNDRREVWKGKELHGRFYRALNGSDIDLKASTTWLRHGDLFGETEGFVCAIMDEVIMTNNYRKYILKDGTVDICRACHRPGESIRHIISGCSRLANGEYLHRHNQVARIVHQQLALKYHLVNLEVPYYRYVPDPVLENGRATLYWDRSIITDRTIVANKPDIVLIDRLERRAMIVDIAVPHDENLVKVEKKNKLNIWIYLTRLSICGMLIQ

SEQ ID NO: 29999 - protein, 1011 aa, Amphipyra berbera
MQPLAVPPRPIHVDGEGDGEAINVSNQCSEELRSALDDAILEFRTTPPEIRPRLPRLPMHGKNRALMCALDSLLSNYFDGSEDLADTHSILYCAVIAACRVAHVKFTENERATRPKPAVPAWQSRIERRIGGARVLIGKLICFREGNNRPRVMRFVRRAFSGTDISPRDYMSRVTERIDFLKLKVYAWANRIRRYKRRVERYTQNRIFQSDQRRVYRAWERPDPGGGDVRLPDDDALSSFWRSIWSVPIAHTEDGWMRDVERACEPIAEMEPIIISPQDVADAARPLPNWKSPGPDGLHNFWLKWLRSSHARLASQFQSSLESGSLPQFLTTGVTHLLYKSGSTAEPKNYRPITCLPTVYKLLTSILRVKITTHIDNNSIMSASQNGCRNGSCGTKELLLIDMAISQQVRRSRKDLSTCWIDYKKAYGSVPHSWLMRVLELYKINTTLRTFLMSCMRHWRTVLRYPGCRRIGGSGEQIRIERGIFQGDSLSPLWFCLALNPLSTLLEGSGLGYWLRRGGQVISHLLYMDDLKLFAPTDLQLMELLKVTENFSNSIRMEFGVDKCAVLHVKRGWIAESEGIQLPNSVQLRSLSPTETYKYLGMSEALGISETDMRQSLRERFFGRLNKLLKSLLSGGNKVRAFNGWVMPVLMYSFGILKWTQADLDALDRRVRALLTAHRMHHPRSSVMRLYIPRKCGGRGFLNAKTLHNREVYSLREYFLQAEGVMHRDVVAVDKGLTPLALARENWRKPAVLSTNDREEVWQSKELHGRYYRALHGPDVDFLASVSWLRFGNLFGETEGFVCAIMDEVMMTNNYRKYIVKDGTVDICRACHRPGESIRHIVSGCSRLANGEYLHRHNLVARIIHQQLALKYNLVESEVPYYRYVPDPVLENGHVTLYWDRSIITDRTIVANKPDIVVIDRSERRTMIVDITVPHDENLVKAEKDKQIKYLDLAHEVVGMWDVDSAVIVPIVVTANGIIAKSLDKHLMSLIQRAVLLDTARIVRRFLSLEP

SEQ ID NO: 30000 - protein, 1131 aa, Mythimna ferrago
MLTRTAARRARHPPPDSSLSSASPPPDPGSSVSPVAAAASSSSDEYFSPPTSPTPVRRPGRGRPPNGLGPRGQPAPSRVPAAGGCVQRMKWTQSINENVMRAYYGATEGGTNLTAYRVRMLSLFQELEPSVNVTTQRLSDQVRVIQRNHRLDDAALDRLRSEVLSNRIISTPTQTQTAAPRATDAIMPRSNHGDDEADDRVVTVSSQCNDRLRSALEDALREYRSTPIARRPRLPRLPMHKKNRALVCALDSLLENVFESSVNLVDTHSILYCGAIAACRLANVKLLSCDEATRPKPAVPAWQYRIERRIDGARALIGKLYCFREGNTRPRVMRFVRRAFSGTGISPREYSSHVTERIDFLKQKVCAWASRIRRYKRRVDRYSQNRMFQSDERWVYRAWERPEQNVTDVLRPDDAATNAFWRSIWSVPVCHTEGGWMRDVERVCEAIPEMEKVIISSTDVARAVRPLPNWKSPGPDGLQNFWLKWYSSSHALLASQFQSSLESGSLPQFLTTGVTHLLHKTGSTAEPKNYRPITCLSTVYKLLTSILRTKINKHIENNSIMSASQNGCRNGSRGTKELLLIDMAISQQVRRSRKDLSTCWIDYKKAYDSVPHTWLMRVMELYKIDVTLRTFLESCMGGWNTVLRYPGCRTIRGDDEPIWIKRGIFQGDSLSPLWFCLALNPLSTLLEDSGLGYRLRRGGQVLSHLLYMDDLKLIAPNKLRLMELLKVTENFSSAIRMEFGVDKCAVMHVKRGEIMESEGVQLSDSIHLRSLSSTETYKYLGMSEALGINVTDMKQSLKERFFGRLKKVLNSLLSGGNKVRAFNGWVMPVLMYSFGILKWTQTELDALDRRVRTLLTANRMHHPRSSVMRLYIPRKCGGRGFLNAKTLHNREVCSLREYFLKTDVGMHRDVVAVDKGLTPLSMAKENWRKPVVLTTDDRKEVWKGKELHGRFFRALHEPDVDFSASVAWLRFSNLFGETEGFVCAIMDEVILTNNYRRHIMKDGTIDVCRACHRPGESIRHIISGCSRLANGEYLHRHNQVARILHQQLALKYNLVDSEVPYYRYVPDPVLENDHVTLYWDRSIITDRTIVANKPDIVVIDRLARRAMIVDVTIPHDENLVKAEKEKQNKIS

SEQ ID NO: 30001 - protein, 1202 aa, Amphipyra tragopoginis
MLTRSRAKATRPPSSASSLSSASQPPEPAPTVSDATPAAAVASSSSDEYFSPPTSPPPPRRRGRGRPPASIGPRGPPASDRVPAPGGSVQRMRWTQAMNENCMRAYFGATEGGTNLTAYRGRMLSLFQALEPAVNVSAQRLSDQVRVIQRDHRLDGAALDRLRSEMQSSHVAPLQSQTAAQSQVPSVVAPRSIPADEESDDRVTNVSTQSNEQLRSALELAIREYRSTLPDLRPRLPRLPMNKKNKALMCALDSLLSSYFDGSEDLADTHSILYCAAVAACRVAHVKVDNNDRATRPKPAVPAWQCRVERRIGGARALIGKLICFREGNTRPRVMRFVRRAFSGTDTSPRDYMSCVTERIDFLKQKVYAWANRIRRYKRRVERYTQNRMFQRDQRWVYRAWERADQGVGDAHLPDDDATNSFWRSIWSVPVSHTEGDWMRDVERVCEPILDMGAISISPQDVASAVRPLPNWKSPGPDGLHNFWLKWLRSSHAHLASQFQSSLETGTLPQFLTTGVTHLLHKSGSTAEPKNYRPITCLPTVYKLLTSILRCKINSHIENNSIMSASQNGCRNGSRGTKELLLIDMAISQQVRRSRKDLSTCWIDYKKAYDSVPHTWLMRVLELYKVNTTLCAFLTSCMGQWRTVLHYPGCRQIQGIGEPIRIERGIFQGDSLSPLWFCLALNPLSTLLEGSGLGYRLRRGAQVISHLLYMDDLKLFAPNNLQLLDLLKVTETFSNSIRMEFGVDKCAVMHVKRGRIMESVGTQLSDSIQLRSLSSTETYKYLGMSEALGINEADMKQSLRERFYGRLKKVLKSLLSGGNKVRAFNGWVMPVLMYSFGILKWTQTELDALDRRVRTLLTAYRMHHPRSSVMRLYIPRKCGGRGFLNAKTLHNREVCSLREYFSQADVGMHRDVVAVDKGLTPLSLAKENWRKPAVLDTNGRKDVWRSKELHGRFYRALHGPDVDFLASVAWLRFGDLFGETEGFVCAIMDEVMMTNNYRKYVVKDGTVDICRACHCPGESIRHIVSGCSRLANGEYLHRHNLVARIIHQQLALKYNLVDAEVPYYKYVPDPVLENGHVTLYWDRSIITDRTIVANKPDIVVIDRSERRAMIVDITVPHDENLVKAENDKKIKYLDLAHEVVDMWDIDSAVIVPIVVTANGLIAKSLDQHLMRLSLGGWIKGLIQKAVLLDTARIVRKFLSLEP

SEQ ID NO: 30002 - protein, 1198 aa, Amphipyra tragopoginis
MLTRARSKAARPPPPDSPLSSASQPPELGPPVTPAAAAASSSSDEYFSPPTSPRPVRRQGRHRPPTSLGPRGPPAPSRVLATGGCVQRMKWTQSINENVMRAYYGSTEGGTNLTAYRVRMLTLFQELEPAINVSAQRLSDQVRVIQRNHRLDDAALDRLRLEVQNSRVTPFPSQTAVHEVNINIVPPRSDYVDGDMDDRAVTVSSQYNDQLRSALEDAIREYRANPELRPRLPRLPMHNKNRALVCALDSLLSSYIESSEDLGDTHSILYCAAVAACRVANVKFNNSERATRPKPAVPAWQCRIERRIDGARALIGKLICFREGNTRPRVMRFVRRAFSGTGISPREYMSQVTERIDFLKQKVCAWASRIRRYKRRVERYTQNRMFQCDQRWVYRAWERPDQGVSDGRLPDDDAMNSFWRSIWSVPVIHAEGDWMRDIERACEPIEEMGEILISPQDVASAARPLPNWKSPGPDGLHNFWIKWLRSSHARLATQFQSSLESGSLPQFFTTGVTHLLHKSGSTAEPKNYRPITCLPTVYKLLTSILRSKINTHIENNSVMSSAQNGCRNGSRGTKELLLIDMAISQQVRRSRKNLSTCWIDYKKAYDSVPHTWLMRVLELYKINATLRTFLMSCMGQWRTVLRYPGCRPIRESGEPIRIERGIFQGDSLSPLWFCLALNPLSTLLEGSGLGYPLRRGGQVVSHLLYMDDLKLFAPTKLQLVELLKVTETFSNSIRMEFGVDKCAVMHVRRGGIMESEGLQLSDSIHLRPLSANDTYKYLGMSEGLGISEADMKQSLRERFFGRLKKVLKSLLSGGNKVRAFNGWVMPVLMYSFGILKWTQTELDALDRRVRSLLTANRMHHPRSSVMRLYIPRKCGGRGLLNAKTLHNREVCSLREYFLHADAGMHRDVVAVDKGLTPLNLAKENWRKPVVLSTNDRREIWQSKELHGRFYRALHGPDVDFQASVSWLRFGDLFGETECFVCAIMDEVIMTNNYRKYIVKDGTVDICRACHCPGESLRHIISGCSRLANGEYLHRHNQVARIIHQQLALKYNLVESEVPYYKYVPDPVLENGHITLYWDRSIITDRTIVANKPDIVVIDRSERRTMIVDVTIPHDENLVKAEKDKQIKYLDLAHEVVNMWDVDSATIVPIVVTANGLMAKSLDQHLKRLSLGGWIKGLMQKAVLLDTARIVRRFLSLEP

SEQ ID NO: 30003 - protein, 1202 aa, Amphipyra tragopoginis
MLTRSRARARDNQAHLPPPDSSPSSASQQQGLNPASPAAAVASSSSDEYYSPPSSPPPARRRGGTRPPVGLGLRGPLASDRVPAPGGIVPRMKWTQKINESVMRAYYGATEGGTNLTAYRGRMLSLFQVLEPAVNVSAQRLSDQVRVIQRGHMLDDTVLDRLRSEVQSSPVISPSSQVLEQQQNLAAALSRPNRADEEDDDRAANVSTQCNDELRSALEDAMREYRYTQSDLRPRIPRLLMHRKNRALVCALDSLLSNYFDGSEDLGDTHSILYCAAVAACRVAHVKFTDNERATRPKNAVPAWQCRIERRIAEARALIGKLVCFREGNTRPRVMRFVRRAFSGTDVSPREYMSRVTERIDFLKQKVYAWASRIRRYRRRVDRYTQNRLFQSDERWVYRTWERPDQRVSDTHLPDNDVMNTFWRNIWSVPVAHTEGDWMQEVQRACEPIQEMGDIIISPQDVASAVRPMSNWKSPGPDGLHNFWLKWLRSSHARLASQFQSSLESGSLPQFLTTGVTHLLHKSGSTAEPKNYRPITCLPTVYKVLTSILRAKINNHIDNNSIMSASQNGCRNGSRGTKELLLIDMAISQQVRRSRKDLSTCWIDYKKAYDSVPHAWLMRVLELYKVNTTLCAFLTSCMGQWRTVLRYPGCRQIQGIGEPIRIERGIFQGDSLSPLWFCLALNPLSTLLEGSGLGYRLRRGGQVISHLLYMDDLKLFAPNNLQLLELLKVTETFSNSIRMEFGVDKCAVMHVKRGRIMESVGTQLSDSMHLRSLSSTETYKYLGMSEALGINEADMKQSLRERFYGRLKKVLNSLLSGGNKVRAFNGWVMPVLMYSFGILKWTQTELDALDRRVRSLLTANRVHHPRSSVMRLYIPRKCGGRGFLNAKTLHNREVCSLREYFSQADVGMHRDVVAVDKGFTPLSLAKENWRKPVVLDTNGRMEVWRSKELHGRFYRALHGPDVDFLASVAWLRFGDLFGETEGFVCAIMDEVMMTNNYRKYIVRDGTVDICRACHCPGESIRHIVSGCSRLANGEYLHRHNLVARIIHQQLALKYNLVDAEVPYYRYVPDPVLENGHVTLYWDRSIITDRTIVANKPDIVVIHRSERLTMIVDITVPHDENLVKAEKDKEIKYQDLAHEVVAMWDVDSAIIVPIVVTANGLIAKSLDQHLKRLSLGSWIKGLIQKAVLLDTARIVRKFLSLRP

SEQ ID NO: 30004 - protein, 1205 aa, Amphipyra tragopoginis
MITRSQVRLQRTRPPSSASSLSSASQPPESSPTVSAVTPAAAVASSSSDEYFSPPTSPPPTRRRGGRRPPDRLGLRGPLASDRVPAPGGSVSRMRWTQTINENAMRAYFGATEGGTNLTAYRSRMLSLFQVLEPTVNVSAQRLSDQVRAIQRGHMLDDTVLDRLRSEIQCSPVISSSSQAPGLISRNISVASPRCQHADEEDDDRATTVSIQCNEQLRRALEDAMREYRSTRPELRPRLPRLPMHKKNRALMCALDSLLSNYLDGSEDLGDTHSILYCAAVAACRVAHVKFINNERATRPKNAVPAWQCRIERRIAEARALIGKLICFGEGNTRPRVMRFVRRAFSGTDVSPREYISRVTERIDFLKQKVYAWANRIRRYRRRVDRYNQNRMFRSDERWVYRTWERPDQSVGAAHLPDDDATNSFWRNIWSVPVTHTEGDWMRDVERMCEPILDMGAILISPQDVAGAVRPLPNWKSPGPDGLHNFWLKWLRSSHARLASQFQSSLETGTLPQFLTTGVTHLLHKSGSTAEPKNYRPITCLPTVYKVLTSILRTKINNHIDNNSIMSASQNGCRNGSRGTKELLLIDMAISQQVRRSRKDLSTCWIDYKKAFDSVPHTWLMRVLELYKVNTTLRTFLTSCMGQWRTVLHYPGCRQIQGIGEPIRIERGIFQGDSLSPLWFCLALNPLSTLLEGSGLGYRLRRGGQVISHLLYMDDLKFFAPNNLQLLELLKVTETFSNSIRMEFGVDKCAVMHVKRGRIMESVGTQLSDSIHLRSLSSTETYKYLGMSEALGINETDMKQSLRERFYGRLKKVLNSLLSGGNKVRAFNGWVMPVLMYSFGILKWTQTELDALDRRVRTLLTANRMHHPRSSVMRLYIPRKCGGRGFLNAKTLHNREVCSLREYFSQTEVGMHRDVVAVDKGLTPLSLAKENWRKPVVLDTNGRKDVWRSKELHGRFYRALHGPDVDFLASVAWLRFGDLFGETEGFVCAIMDEVMMTNNYRKYVVKDGTVDICRACHCPGESIRHIVSGCSRLANGEYLHRHNLVARIIHQQLALKYNLVDAEVPYYKYVPDPVLENGHVTLYWDRSIITDRTIVANKPDIVVIDRSERLTMIVDITVPHDENLVKAEKDKEIKYQDLAHEVVAMWDVDSAVIVPIVVTANGLIAKSLDQHLKRLSLGGWIKGLIQKAVLLDTARIVRRFLSLRP

SEQ ID NO: 30005 - protein, 1194 aa, Autographa pulchrina
MLTRSRKRKPARPPSPDSSPSSASQLPDHVQAPAPAVASSSSDEYYSPPTSPTPVRRQGRRRPPSSLAPAGQPASNRAPAPGGDVRRMKWTQGINENVMRAYYGATEGGTNLTAYRARMLSLFQVLEPGVSVSAQRLSDQVRVIQRNHRLDDSTLDRLRSEIQSSPATNTLPPAAAPVSGTTHTTPSDGEEDDGAMTVSTQCSELIRSTLEDAIRDYRTSPPDQRPRLPRLPMHNRNKAIMGALDSLLPIYFESSEDLRDTHSILYCAALTACRVANVAICYSNIAARPKPAVPAWQCRIEQRVAEARTLIAKLIAFKQGNSRPRVMRFVRRAFAGTDISSSEYTARVTERIDLFKQKVCAWASRIRRYKRRVERFYLNRMFQKDQRWVYRAWERPASGVDGGCLPDGDATNSFWRSIWSVPVSHSEGGWMREVEQVCEPMQEMGAITISPQDVANAVRPMANWKTPGPDGLQNFWLKWLRSSHGCLASQFQSAVESASLPQFLTTGSTHLLHKTGSATDPKNYRPITCLPTVYKLLTSILRAKINEHVVSFSIMSASQNGCRSGSRGTKELLLIDTAICQQVRRSKKDLSTCWIDYKKAYDSVPHTWLMRVLELYKINATLRAFLVSCMGQWSTVLHYPGCRDIQQGGEPIRIERGIFQGDSLSPLWFCLALNPLSTLLENSRLGYSLRRGSQVISHLLYMDDLKLFANSGLQLMKLLKITESFSNSIRMEFGVDKCAVMHVKRGGIVESQGIQLSDSINLRSLSATETYKYLGMSEALGINGGDVKQSLQARFFGRLNKVLKSVLSGGNKVRAFNGWVMPVLMYSFGVLKWTQTELDALDRRVRTLLTANRMHHPRSSVMRLYIPRKCGGRGFLNAKTLHNREVCNLREYFLQVDVGMHRDVVVVDKGLTPLSLGKENWHKPVVLSVKDREDVWQSKELHGRYYRTLHGSDVDFLASVAWLRFGDLFGETEGFVCAIMDEVIMTNNYRKYIIKDGTVDICRACHCPGESLRHIISGCSRLANGEYLHRHNQVARIIHQELALRYKLVESEMPYYRYVPDPVLENGLVTLYWDRSIITDRTIVANKPDIVVIDRSERRAIIVDVTIPHDENLVKAEKEKQLKYLDLAHEVVDMWEVDSAIIVPIVVTANGIIAKSLDQHLKRLSLGAWVKGLIQKTVLLDTARIVWRFLSLEP

SEQ ID NO: 30006 - protein, 1200 aa, Mythimna impura
MLTRAAARRARHPPPGSPLSSASPAPDLESPVSPAAAVASSSSDEYFSPPTSPTPVRRQRRGRPPKSLGSRGQPAPSRVPAAGGCVQRMRWTQSMNENVMRAYYGSTEGGTNLTAYRDRMLSLFQDLEPTVNVSAQRLSDQVRVIQRNHRLDDATLDRLRSEVLSNQIVSTSIQTQTAATPTTNAISPRSNPNNDDADDRVVTVRSQCNDELRSALEDALREYRTTPTELRPRLPRLPMHKKNRALVCTLDSLLKNNFESSENLVDTHSILYCGAVAACRLANINFPNIDGTIRPKPAVPAWQYRIERRIEGARVLIGKLHCFREGNTRPRVMRFVRRAFLGTGISPQEYMSRVTERIDFLKQKVCAWASRIRRYKRRVDRYSQNRMFQSDERWVYRAWERPEQNVIDGRRPDDFATITFWRNIWSVPVSHTEGDWMRDVERVCEAIQEMEKVVITPADVAKAVRPLPNWKSPGPDGLQNFWLKWFSNSHAPLASQFQSTLESGSLPEYLTTGVTHLLHKTGNPVEPKNYRPITCLSTVYKLLTSILRAKINRHIENNLIMSASQNGCRNGSRGTKELLLIDMAISQQARRSRKDLSTCWIDYKKAYDSVPHTWLMRVLELYKVDMTLRTFLESCMRQWKTVLRYPGCRPIQGNDEPIRIKRGIFQGDSLSPLWFCLALNPLSTLLEESGLGYRLRRGGQAISHLLYMDDLKLFAPSNLQLMELLKVTETFSSAIRMEFGVDKCAAMHVKRGEIMESEGIQLPDSIHLRSLSSTETYRYLGMSEALGINNADMKQSLKERFFGRLKKVLNSLLSGGNKVRAFNGWVMPVLMYSFGILKWTQTELDALDRRVRTLLTANRMHHPRSSVMRLYISRKCGGRGFLNAKTLHNREVCSLREYFLKTDVGMHRDVVAVDKGLTPLSMAKEDWRKPVILTTDDRKEIWKGKELHGRFYRALHEPDVDFLASVAWLRFSDLFGETEGFICAIMDEVILTNNYRRYIMKDGTVDVCRACHRPGESIRHIISGCSRLANGEYLHRHNQVARIIHQQLALKYNLVDSEVPYYKYVPDPVLENDHVTLYWDRSIITDRTIVANKPDIVVIDRLARRAVIVDVTIPHDENLVKAEKEKQIKYLDLAHEVVDMWNVDSAVIVPMVVTANGFIAKSFDDHLSKLSLRGWIKGLIQKAVLLDTARIVRRFLSLEP

SEQ ID NO: 30007 - protein, 1048 aa, Laspeyria flexula
MLDDATLERLRSEVRSSPVVPSSTQLVTGVADNLPQSHPTSAVEDVDCGAIDVSTQCNDRLRSALECALSEYRCKLSADRPRLPRLPTHKKNIALVCALDSLLSEFLDSSEDIGVTHSILYCAAVAACRVAGVKFPTDTATGPRSGVPAWQCRIERRIADARALIGKLICFRTGNTRPRVMRFLKRAFLGTDVRPQDYSSRVTERIDYLKQKVCAWANRIRRYRRRVDRYYQNCTFKKDERWVYRRWECSDLDVAHSGRPDDDVTSLFWRNIWSAPVSHTESDWTRVVERSCESIRDMQPISITTEDVASAARSLPNWKSAGPDGLHNFWLKWLHSSHARLASGFQSCLESGSIPLFLTTGVTHLLYKSGSFADLNNYRPITCLPTVYKLLTSILRTKLVKHVNDNNIMSISQNGCRNGARGTKELLIIDMAVNQQVRRNRKDLSTCWIDYKKAYDSVPHTWLLRVLELYKIDGTLCTFLKTCMGQWRTALRYPGCPQSLGNGNPIRIERGIFQGDGLSPLWFCLALYPLSTLLEDSGLGYQLRRGGQVISHLLYMDDLKLFAPGTSQLTALLKVTETFSNSIKMEFGVDKCAVMHGKRDGILESEGIQLSDSTQLRSLSAAETYKYLGMSQALGIMDSGVKQVLGERFLSRLKKVLKSLLSGGNKVRAFNSWVMPVLTYSFGILRWTQTELDALDRKVRTQLTAFRMHHPRSSVMRLYIPRKCGGRGLLCAKTLHNREVYNLREYFLKTDVEMHRDVVAVDNGLTPLGLAKENWRKPAILSLDDRKEVWKGKELHGRFYRALHGPDVDSLSSVSWLRFGDLFGETEGFVCAIMDEVIMTNNYRRHILKDGTVDICRACHRPGESLRHIVSGCSRLAKGEYLHRHNQVARIVHQQLALKYGLVDSEVPFYMYVPDPVLENGHATMYWDRSIITDRTIVANKPDIVVIDRLERLAVIIDVTVPHDENLVKAEKDKQVKYLDLAHEIVDMWDVDSAIIVPIVVSVNGLIAKSLHRHLKRLALGGWVVGQMQKAVLLDTARIVRRFLSLEP

SEQ ID NO: 30008 - protein, 1198 aa, Laspeyria flexula
MLTRARRREALIPPPDSSLSVASQPPDPVSTTTPAAEASSSSSSDEYYSPPTSPPPVRRRGRGRPPTSLGPRGPPAVNRAPATGGNVRRMKWTRSINENVMRAYFVATEGGTNLTMYRDRMLPVFQVLEPSINVSAQRLSDQVRVIQRAHMLDDATLERLRSEVRSSPVVPSSTQLVTGVADNLPQSHPTLAVEDVDCGATDVSTQCNDRLRSALECALSEYRCKLSADRPRLPRLPTHKKNIALVCALDSLLSEFLDSSEDIGDTHSILYCAAVAACRVAGVKFPTDTATRPRSGVPAWQRRIERRIADARALIGKLICFRTGNTRPRVMRFVKRAFLGTDVRPQDYSSRVTERIDYLKQKVCAWANRIRRYRRRVDRYYQNCTFQKDERWVYRRWECSDLDVAHSGRPDDDVTSLFWRNIWSAPVSHTESDWTRVVERSCESIRDMEPISITTEDVASAARSLPNWKSAGPDGLHNFWLKWLHSSHARLASGFQSCLESGSIPLFLTTGVTHLLYKSGSVADPKNYRPITCLPTVYKLLTSILRTKLVKHVNDNNIMSISQNGCRNGARGTKELLIIDMAVNQQVRRNRKDLSTCWIDYKKAYDSVPHTWLLRVLELYKIDATLCTFLKTYMGQWRTALRYPGCPQSLGNGNPIRIERGIFQGDSLSPLWFCLALNPLSTLLEDSGLGYRLRRGGQVISHLLYMDDLKLFAPGTSQLTALLKVTETFSNSIKMEFGVDKCAVMHVKQGGILESEGIQLSDSTQLRSLSAAETYKYLGMSQALGIMDSGVKQVLGERFLSRLKKVLKSLLSGGNKVRAFNSWVMPVLTYSFGILRWTQTELDALDRKDRTQLTAFRMHHPRSSVMRLYIPRKCGGRGLLCAKTLHNREVYNLREYFLKTDVEMHRDVVAVDNGLTPLGLAKENWRKPAILSLDDRKEVWKGKELHGRFYQALHGPDVDSLSSVSWLRFGDLFGETEGFVCAIMDEVIMTNNYRRYILKDGTVDICRACHRPGESLRHIVSGCSRLANGEYLRRHNQVARIVHQQLALKYSLVDSEVPYYMYVPDPVLKNGHATMYWDRSVITDRIIVANKPDIVVIDRLERLAVIIDVTVSHDENLVKAEKDKQVKYLDLAHEIVDMWDVDSAIIVPIVVSVNGLIAKSLHRHLKKLALGGWVVGQMQKAVLLDTARIVRRFLSLEP

SEQ ID NO: 30009 - protein, 1209 aa, Xestia xanthographa
MITRSRAKQHQEAHPPSPGSLLSSASQPPGRATPVSIVSPVAAAASSSSDEFFSPPSTPSPSPRRGRRRGRGRPPAGLGPRGQQAPSRVPAAGGNVSRIRWTQSMNENVMRAYYGATEAGINLTAYRGRMLSLFQVLEPGVSASAQRLSDQVRVIQRNHMLDDTVLDRLRSESRSNLVTPASPLIAVQVQNVSSAPPRSDRDGEEDDSEVISVSTQCNAQLRSALESAFREYRSTPPELRPRLPRLPMHNKNKALMCALDSQLSNCFDSSKDLTDTHSILYCGAVAACRVAHVKFPNNDRATRPKLAVPAWQCRIERRIGEARALIGKLICFREGNTRPRVMRFVRRAFSGTDISFRDYLARVTERIDSLKQKICAWASRIRRYKRRVERCTQNRTFQSDERWVYRAWERPDQGVTDTRLPDDSAMYSFWRNIWSVPVSHTEGDWTREVEQACDPIPEMGAIIISPQDVARAVRPLPNWKSPGPDGLHNFWIKWFQRSHARLASQFQSALESGSLPQFLTTGITHLLHKSGSAAEPKNYRPITCLPTVYKVLTSILRAKINQHIDSNSIMSASQNGCRNGSRGTKELLLIDMAISQQVRRSRKNLSTCWIDYKKAYDSVPHTWLMRVLELYKIDATLRTFLMSCLGHWRTVLRYPGCRQIQGNSEPIRIERGIFQGDSLSPLWFCLALNPLSTLLERSGLGYLLRRDGQVISHLLYMDDLKLFAPNNFQLMKLLKVTETFSSAIRMEFGVDKCAVMHVKRGEIMESEGTQLSDSIHLRSLSSTETYKYLGMSEALGINTADMKQSLRERFFGHLNKVLGSLLSGGNKVRAFNGWVMPVLMYSFGILKWTQTELDALDRRVRTLLTANRMHHPRSSVMRLYISRKYGGRGFLSAKTLHNREVYSLREYFLEAEGEMHRDVVSVDKGLTPLSLANGNWRKPKVLDTNDRKVEWQGKELHGRFYRALHGPDVDFLASVSWLRFGDLFGETEGFICAIMDEVMMTNNYRKYIVKDGTVDICRACHRPGESIRHIISGCSSLANGEYLHRHNLVARIIHQQLALKYNLVESEVPYYKYAPDPVLDNGHITLYWDRPITTDRTVVANRPDIVVIDRLERRTMIVDITIPHDENLVKAEKDKQFKYLDLAREVVDMWDVGTAVIVPIVVSANGLIAKSLDQHLRRLSLGSWIKGLIQKAVLLDTARIVRRFLSQEP

SEQ ID NO: 30010 - protein, 1192 aa, Limenitis camilla
MLTRARAKNVRSPTSPGSSDNSTSQVPEHTEEVVAVVSSSSDEYFSPPTSLSPVRRPGRGRPPRSLGPRGQPASRQVPAIDGYVQRMKWTQCINENVMRAYYGSTEGGTNLTAYRDRMLSLFQKLEPSINVSAQRLSDQVRIILRNHRLNDTVLERIRSEVHDSRVIPSSIQATLPGPSPPSPNQRDEEEDDTTITAGKKYDELLRSALEDAIREYRYTSDEIRPRLPRLPMHKKNRALVCTLDSLLPMYFESSEDLKDTHSILFCAAVAVCRVAHVKLVNTETTRPKPDVAAWQSRIERRIDETRVLIGKLYSFREGNTRPRVMRFVRRAFSGTEICPPEYMARVTERIDTLKQKIYAWANRIRRYRRRVDRYSQNRMFQKDQKWVYRTWERPDQNVDDIHRPDDDDTNKFWRSIWSVSVDHTEGDWMREIRQTREPLQAMEHISITCKDVADAVRSVPNWKSPGPDGLHNFWLKWLRSSHACLASQFQSALESGSLPQFLTTGITHLLHKSGSTTEPKNYRPITCLPTVYKLLTSILRDKIDSHITKNAIMSVSQNGCRNRSRGTKELLLIDMTISQQVRRSRKDLSTCWIDYKKAYDSVPHGWLMRVLELYKVDATLCAFLGSCMRQWRTVLRYPGCRPIQGNNEPIRIKRGIFQGDSLSPLWFCLALNPLSTLLENSGLGYRLRRGGQVISHLLYMDDLKLFVPTKLQLIELLKITKTFSNSIRMEFGVDKCAVMHVKRGKIEESEGIQLSDSVNLRSLSADETYKYLGMSEALGIIEIDMKQSVRERFLARLRKVLKSLLSGGNKVRAYNGWVMPILMYSFGILKWTQKELDDLDRKVRALLTTYRMHHPRSSVMRLYIPRKCGGRGFLNAKTLHNREVCNLRDYFLQTDVGMHRDVVAMDKGLTPLSLAKENWRKPIVLSTDNRKEVWKSKELHGRFYRALHGDKVDFKASVSWLRFGNLFGETEGFVCAIMDEVIMTRNYRRYIVRDGTVDICRACHSSGESLRHIISGCPRLANGEYLHRHNQVAKIIHQQLALRYGLVESEVPYYRYAPDPVLENGRVTLYWDRTIITDRTIIANKPDIVVIDRSERCTMIVDVTIPHDENLVKAEKDKQMKYLDLAHEIVDMWDVDSAVVVPIVVTANGLIAKSLDQHLKRLALDGWVKGLMQKAVLLDTARIVRKFLSLEP

SEQ ID NO: 30011 - protein, 850 aa, Cosmia trapezina
MSRVTERIDFLKQKVCAWASRIRRYERRVDRYTQNRIFQSDERWVYRAWERPEQNVTDMCRPDDTITSAFWRSIWSVPVCHAEAGWMQDVERVCEAIPEMEAVLITPLDVARAVRPLPNWKSPGPDGLHNFWIKWLISSHTRLASQFQSSLESGSLPQFLTTGVTHLLHKSGSPAEPKNYRPITCLSTIYKLLTSILRAKINMHIENNSIMSASQNGCRNGSRGTKELLLIDMAISQQVRRSRKDLSTCWIDYKKAYDSVPHTWLMRVLELYKIDATLRTFLGSCMGQWRTVLRYPGCRRIQGNDEPVWIKRGIFQGDSLSPLWFCLALNPLSTLLEDSGLGYRLRRGGQVISHLLYMDDLKLFAPNKLRLMELLKVTETFSSAIRMEFGVDKCAVMHVKRGEIMESEGIQLSDSIHLRSLSSSETYKYLGMSEALGINVADMKQSLKERFFGRLKKVLISLLSGGNKVRAFNGWVMPVLMYSFGILKWTQTELDALDRRVRTLLTANRMRLPRSSVMRLYIPRKCGGRGFLNAKTLHNREVCSLREYFLKADVGMHRDVVAVDKGLTPLSMANENWRKPVVLTTDDRKKVWQSKELHGRFYRALHEPGVDFLASVSWLRFGDLFGETEGFVCAIMDEVILTNNYRRHIMRDGTVDVCRACHRPGESIRHIVSGCSRLANGEYLHRHNQVARIIHQQLALKYKLVDSEVPYYRYVPDPVLENDHVTLYWDRSIITDRTIVANKPDIVVIDRLARRAMIVDVTIPHDENLVKAEKEKQIKYLDLAHEVVDMWNVSSAIIMPIVVTANGLMAESLDQHLLRLSLGGWIKGQIQKAVLLDTARIVRRFLSLQP

SEQ ID NO: 30012 - protein, 1104 aa, Abrostola tripartita
MKWSQQINENVMRAYYGSTEGGTNLTAYRDRMLALFQDLEPAVNVSAQRLSDQVRVILRNHRLDDATLDRLRSEVHSSPVTCRPVHVVVPPIGPPPCDMEADDRATTVSTQYNDILRSTLEDTIREYRVSPPGLRPRLPRLPMHNKNKAMISALDSLLSSYFEGSEDLCDTHSILYCAAATACRVANVKCFDSSTATRPKPAVPAWQCRIESRITEARTLIGKLTAFREGNIRPRVMRFVRRAFAGVDINPREYATRATERIDFYKQKVYAWASRIRRYKRRVDRFSQNRIFNQDQRWVYRNWERSAQGVSDGHLPDDDVTNAFWRSIWSVPVNHTEGSWMLDVEQSCESIPEMGTITISPQDVASAVRPMSNWKSPGPDGLHNFWIKWLRSSHGCLASQFQSAIEVGSLPQFLTTGSTHLLHKTGSTTDPKNFRPITCLPTIYKLLTSILRAKITKHIDDNNIMSASQNGCKNGSRGTKELLLIDMTICQQVRRSKKDLSTCWIDYKKAYDSVPHTWLMRVLELYKIDTTLRTFLLSCMRQWRTVLHYPGCRDIQQDGEPIRIERGIFQGDSLSPLWFCLALNPLSTLLENSGLGYSLRRRSQVISHLLYMDYLKLFAPSRFQLIKLLKITEAFSNSIRMEFGVDKCAVMHVKRGGIIESQGIQLSDSINLRSLSATETYKYLGMSEALGINVVDMKQSLKERFFGRLNKVLKSLLSGGNKVRAFNGWVMPTLMYSFGILKWTQTELDALDRRVRTLLTSNRMHHPRSSVMRLYIPRKCGGRGFLNAKTLHNREVCSLREYFLRAEVGMHREVVAVDKGLTPLFLAKENWCKPVVLSVNDRRDVWQSKELHGRFYKALHGPNVDLLSSVSWLRFGDLFGETEGFVCAIMDEVIMTNNYRKYILKDGTVDICRACHRPGESLRHIMSGCSRLANGEYLHRHNQVARIIHQQLALKYKLVDSEMPYYRYVPDPVLENDHITLYWDRSIITDRTIVANKPDIVVIDRLERRAMIVDITIPHDENLVKAERDKQIKYLDLAHEVVDMWEVDSAIIVPIVVSANGLMAKSLDQHLKRLTLGGWVKGLMQKAVLLDTARIVRRFLSLEP

SEQ ID NO: 30013 - protein, 1201 aa, Mesoligia furuncula
MLTRLAARRARLPPPDSSLSSAPPPPESSPIVSAVTPAVAVASSSSDEYFSPPTSPTPVRRQGRGRPPNSLGLRGHPAPSRVPATGGCVQRMRWTQSMNENVMRAYYRSTEGGINLTAYRDRMLSLFQELEPTVNVSAQRLSDQVRVIQRNHRLDDIALDRLRSEVLSNHIFSTSVQTAAQASTVDAIPPRSNHVEEEDDRVDTVSSQCNVRLRSALEDALCEYRFTPTELRPRLPRLPMHKKNRALVCALDSQLKNFFESSEDLVDTHSILYCAAVAACRLANVKFPSCDGATRPKPAVPAWQRRIERRIDGARVLIGKLYCFREGNTRPRVMRFVRRAFSGTGISPREYISRVTERIDFLKQKVCAWASRIRRYKRRVDRYTQNRMFQSDERWVYRAWERPEQNVTDVYRPDDATTSAFWCSIWSVPVCHTEAGWMRDVERVCESVPEMETVLITPSDVAKAVRPLPNWKSPGPDGLHNFWLKWLISSHTCLASQFQSSLESGSLPQFLTTGVTHLLHKSGSPAEPKNYRPITCLPTVYKLLTSILRAKINTHIESNSIMSASQNGCRNGSRGTKELLLIDMAISQQVRRSRKDLSTCWIDYKKAYDSVPHTWLMKVLELYKIDATLRTFLESCMRQWKTVLRYPGCRQIQGNDEPVWIKRGIFQGDSLSPLWFCLALNPLSTLLEDSGLGYRLRRDGQVISHLLYMDDLKLFAPNKLRLMELLKVTETFSSAIRMEFGVDKCAVMHVKRGEIMESEGIQLSDSISLRSLSSSESYKYLGMSEALGINDADMKQSLKERFFCRLKKVLISLLSGGNKVRAFNGWVMPVLMYSFGILKWTQTELDALDRRVRTLLTANRMHHPRSSVMRLYIPRKCGGRGFLNAKTLHNREVRSLREYFLKAEVGMHRDVVAVDKGLTPLSMAKENWRKPVVLSTDDRKEVWQSKELHGRFYRALHEPGVDFIASVSWLRFGDLFGETEGFVCAIMDEVILTNNYRRHIMKDGTVDVCRACHRPGESIRHIISGCSRLANGEYLHRHNQVARIIHQQLALKYKLVDSEVPYYKYVPDPVLENDHVTLYWDRSIITDRTIVANKPDIVVIDRLARRTMIVDVTIPHDGNLVKAEKEKQIKYLDLAHEVVDMWNVSSAVIVPIVVSANGLMAESLDQHLSRLSLGGWIKGLIQKAVLLDTARIVRRFLSLEP

SEQ ID NO: 30014 - protein, 1098 aa, Xestia c-nigrum
MLTRAAARRARLPPPDPSLSSASPPPEPSPIVSAVTPAVAVASSSSDEYFSPPTTPPPARRRGGRRPPDGLGPRGPPASDRVPAPGGSVQRMRWTQSNNENVMRAYYGATEGGNNLTAYRVRMLSLFQVLEPAVNVSAQRLSDQVRVIQRNRMLDDTVLDRLRTEMHSSHVIATPPSQAVVPPQSTTITNRDDDVSSDMITNVGTQYSEDMRSALEGAIREYRFMTPELRPRLPRLPMHNKNRMLVAVLDSQLSNYFDNCEDLTDVHSILYCAAVAACRVARVKFSDDRATRPKPAVPAWQYRIEQRIGGARALIGKLICFREGNTRPRVMRFVRRAFSGTDINPRDYMSRVTERIDFLKQKVYAWASRIRRYKRRVDRYTQNRTFQRDERWVYRAWERPDQSVADTRLPDDDAMCSFWRSIWSVPVSHAEGEWTRVIERACDPVPEMGAITISPQDVACAVRPLPNWKSPGPDGLHNFWIKWFTRSHARLATLFQSALESGSLPEFLTTGITHLLHKSGSTAEPKNYRPITCLPTVYKVLTSILRTKICKHVDDNSVMSASQNGCRNGSRGTKELLLIDMAISQQVRRSRKDLSTCWIDYKKAYDSVPHTWLMRVLELYKVDATLRTFLMSCMRQWRTVLRYPGCRQIQRNSEPIRIERGIFQGDSLSPLWFCLALNPLSTLLEDSGLGYQLRKDGRVISHLLYMDDLKLFAPNDLQLMELLKVTETFSSAIRMEFGVDKCAVMHVKRGEIVESVGTQLSDSINLRSLSATETYKYLGMSEALGINVADMKQSLKERFFGRLKKVFNSLLSGGNKVRAFNGWVMPVLMYSFGILKWTQTELNALDTKVRKLLTAFRMHHPRSSVMRLYIPRKCGGRGFLNAKTLHNREICSLRDYFLEADVGMHRDVVTMDKGLTPLSLAKENWRKPIILTTDDRRKEWQGKELHGRFYRALHGPDVDFLASVSWLRSGDLFGETEGFVCAIMDEVMMTNNYRRFIVKDGTVDICRACHRPGESIRHIISGCSRLANGEYLHRHNLVARIIHQQLALKYNLVESEVPYYRYVPDPVLVNGSITLYWDQSIVTDRTVIANRPDIVVMD

SEQ ID NO: 30015 - protein, 1199 aa, Griposia aprilina
MMLTRSAKRRAHPPPPDSSLSSASPPPVSSPTVSAVTTPAAVVASSSSDEYFSPPTTPPPVRRRGGHRPPDGLGPRGPPASDRVPAPGGSVQRMRWTRSINENVMRSYYGATEGGNNLTAYRVRMLSLFQVLEPAVNVSAQRLSDQVRVIQRNHMLDDTVLDRLRNEMQSSHVIAPPSQTVVVLPQSNISQADEESDDRATNVSTQCNDELRSALEDAIREYRFISPELRPRLPRLPMHNKNRVLVAALDAQLSNYFDDCVDLTDTHSILYCAAVAACRVAHIKFANDSRPTRPKPAVPAWQCRIERRIGGARALIGKLICFREGNTRPRVMRFVRRAFAGTNISPQDYMSCVTERIDFLKQKVYAWANRIRRYKRRVERYTQNRTFQRDERWVYRGWERPDQGVADTCLPDDDAMCSFWRNIWSVPVSHTEGDWGREVERACDPIPEMGAISICPQDVTRAVRPLPNWKSPGPDGLQNFWIKWFGRSHARLAAQYQVAIESGSLPQFLTTGVTHLLHKSGSTAEPKNYRPITCLPTVYKVLTSILRAKINKHIDTNSIMSPSQNGCRNGSRGTKELLLIDMAISQQVRRSRKDLSTCWIDYKKAYDSVPHTWLVRVLELYKVDATLRTFLKSCMGQWRTILHYPGCRNIQRDNEPIRIERGIFQGDSLSPLWFCLALNPLSTLLEDSGLGYRLRRGGQVISHLLYMDDLKLFAPNNLQLMELLKVTETFSSAIRMEFGVDKCAVMHVKRGEIVESVGTQLSYSINLRALSASDTYKYLGMSEALGINGTDMKQSLKERFFGRLKKVFNSLLSGGNKVRAFNGWVMPVLMYSFGILKWTQTKLDALDRKVRTVLTANRMHHPRSSVMRLYIPRKCGGRGFLNAKTLHNSEICSLREYFLEADVGMHTDVVKVDKGLTPLSLAKENWRKPVVLDTNDRMEVWQSKELHGRFFRALHEPDVDQLASVAWLRFGDLFGETEGFVCAIMDEVILTNNYRRHIMKDGTVDVCRACHRPGESIRHIISGCSRLANEEYLHRHNLVARIIHQQLALKYSLVESEVPYYRYVPDPVLENGHITLYWDRFIITDRTIVANKPDIVVVDRLERRAMIVDITVPHDGNLVKAEKDKQIKYLDLAREVVDMWDVDSAIIVPIVVTANDLIAKSLDHHLRRLSLGSWIKGLIQKAVLLDTARIVRRFLSLEP

SEQ ID NO: 30016 - protein, 1109 aa, Amphipyra berbera
MKWTQSINENVMRAYYGSTEGGTNLTAYRVRMLTLFQELEPAINVSAQRLSDQVRVIQRNHRLDDAALDRLRLEVQNSRAIPVPSQTAVHQLINVAPPRSDRVDGDEDDGAVTVSSQYNDRLRSALEDAIRECRANPESRPRLPRLPMHNKNRALVCALDSLLASYFESSEDLGDTHSILYCAAVAACRVANVKFNNSERATRPKLAVPAWQCRIERRIDETRALIGKLICFREGNTRPRVMRFVRRAFSGTGISPREYTSRATERIDFLKQKVCAWASRIRRYKRRVERYTQNRMFQCDQRWVYRAWERPDQSVSGGRLPDDDAMSSFWRSIWSVPVIHTEGDWMRDIERTCESIEEMGEIVISPQDVAGAVRPLPNWKSPGPDGLHNFWIKWLRSSHARLASQFQSSLESGSLPQFLTTGVTHLLHKSGSTAEPKNYRPITCLPTVYKLLTSILRSKINTHIGNNSVLSSSQNGCRNGSRGTKELLLIDTAISQQVRRSQKSLSTCWIDYKKAYDSVPHTWLMRVLELYKINTTLRTFLRSCMGQWRTVLRYPGCQPIRRSGEPIRIERGIFQGDSLSPLWFCLALNPLSTLLEGSGLGYPLRRGGQVVSHLLYMDDLKLFAPTKLQLVDLLKVTETFSNSIRMEFGVDKCAVMHVRRGRIMESEGLQLSDSIHLSPLSANDTYKYLGMSEGLGISEADMKQSLRERFFGRLKKVLKSLLSGGNKVRAFNGWVMPVLMYSFGILKWTQTELDALDRRVRTLLTANRMHHPRSSVMRLYIPRKCGGRGLLNAKTLHNREVCSLREFFLHADAGMHRDVVAVDKGLTPLSLARENWRKPVVLSTNDRREIWQSKELHGRFYRALHGPDVDFLASVSWLRFGDLFGETEGFVCAIMDEVIMTNNYRKYIVKDGTVDICRACHCPGESLRHIISGCSRLANGEYLHRHNQVARIIHQQLALKYNLVESEVPYYRYVPDPVLENGRITLYWDRSIITDRTIVANKPDIVVIDRSERRTMIVDVTIPHDGNLVKAEKDKQIKYLDLAHEVVNMWDVESATIVPIVVTANGLMAKSLDKHLMRLSLGGWIKGLIQKAVLLDTARIVRRFLSLEP

SEQ ID NO: 30017 - protein, 996 aa, Eilema sororculum
MILYVFLHVEIKYIYLNSCLDVKFIHNNNFISRLPVHKRNIALVCALDSLLPNYLDNCEHLGDTHSILYCAAYAACRVAGVKFPECNTAIRPKSGKPRWQCRIERRIAETRALIGKLICFRSGNTRPRVMRFVNRVFSGTGVSPFDYTSRVTERIDFLKQKVYAWANRIKRYKKRCDRYTLNRTFQRDERWVYRNWERADSVGDEHFPDVAATNTFWRNLWSVPVAHTEGDWVRKVKRSCEAIETMEPVIISEDDIACVVRSLPNWKAAGLDGLHNFWLKWLRSSHARLAFQFQSALESGSLPSFMTTGITHLLFKSGCAMNPKNYRPITCLPTVYKLLTSVLRVKIACHITRNSILSCSQNGCRSGARGTKELLIIDTAVNQQVRRNRRDMATCWIDYKKAYDSVPHTWLLRVLELYKVDTTLYTFLEACMGQWSTALRYPGCRHIPDDGELIKIERGIFQGDSLSPLWFCLALNPLSTILEDSGLGYCLRRGSQVISHLLYMDDLKLFAPNNRQLMELLKVTETFSTSIRVEFGVDKCAVMHVKKGEIVESEGIELSDSTKLRSLSVNDTYKYLGISQALGVNESDMKQSLRERFFCRLKKVLKSLLSGGNKVRAYNDWVIPVLTYSFGILRWTQTELEALDRRVRTLLTAYRMHHPRSSVMRLYIPRKFGGRGFLNIKTLHNREICNLREYFLKVNVDVHRDVVAVDRGLTPLALAKENWRKPAILSINDRKEVWKSKELHGRFHRALYGPDVDLKASVSWLRFGDLFGETEGFVCAITDEVVMTNNYRRYILKDGTVDICRACHRPGESLRHIISGCSRLANGEYLHRHNQVARIVHQQLALKYKLVDSEVPYYRYVPDPVLDDGRVTLHWDRSVITDRTIVANKPDIVVIDRLERRAIIIDVTFPHDENLVKAEKDKQIKYLDLAHEVVDMWNVDSAIIVPIVVSVHGLIAKSLDQHLKRLAIDSWVKGLMQKAVLLDTARIVRRFFSLEP

SEQ ID NO: 30018 - protein, 868 aa, Eupsilia transversa
MRFVRRAFSGTGISPQEYMSRVTERIDFLKQKVCAWASRIRRYKRRVDRYTQNRMFQSDERWVYRAWERPEQNVTDVCRPDDAATSAFWRSIWSVPVCHAEAGWMHGVERVCETIPEMEAVIITPLDVARAVRPLPNWKSPGPDGLHNFWLKWLISSHTRLASQFQSSLESGSLPQFLTTGVTHLLHKSGNPAEPKNYRPITCLSTVYKLLTSILRAKINSHIDSHSIMSASQNGCRNGSRGTKELLLIDMAISQQVRRSRKDLSTCWIDYKKAYDSVPHTWLMRVLELYKIDATLRTFLMSCMGQWRTVLRFPGCRQIQGNDEPVWIKRGIFQGDSLSPLWFCLALNPLSTLLEDSGLGYRLRRGGQVISHLLYMDDLKLFAHNKLRLMELLKVTETFSSAIGMEFGVDKCAVMHVKRGEIMESEGTQLSDSIHLRSLSSTESYKYLGMSEALGINVADMKQTLKERFFGRLKKVLISLLSGGNKVRAFNGWVMPVLMYSFGILKWTQTELDALDRRVRTLLTANRMHHPRSSVMRLYIPRKCGGRGFLNAKTLHNREVCSLREYFLKTEVGMHRDVVAVDKGLTPLSMAKENWRKPVVLTTDDRKEVWQSKELHGRFYRVLHEPGVDFLASVSWLRFGDLFGETEGFVCAIMDEVILTNNYRRHIMKDGTVDVCRACHRPGESIRHIISGCSRLANGEYLHRHNQVARIIHQQLALKYKLVDSEVPYYKYVPDPVLENDHVTLYWDRSIITDRTIVANKPDIVVIDRLARRAMIVDVTIPHDENLVKAEKEKQIKYLDLAQEVVDMWNVSSAIIVPIVVTANGLMAESLDQHLLRLSLGGWIKGLIQKAVLLDTARIVRRFLSLQP

SEQ ID NO: 30019 - protein, 1200 aa, Amphipyra tragopoginis
MLTRSKARARDAHPPPPDSSPSSASQQQGLDPASPAAAVASSSSDEYYSPPSSPPPARRRGGTRPPGGLGLRGPLASDRVPAPGGIVPRMKWTQKMNESVMRAYYGATEGGTNLTAYRSRMLSLFQVLEPAVNVSAQRLSDQVRVIQRGHMLDDTVLDRLRSEVQSSPVISPSSQVLEQQQNLAAALPRPNRADEEDDDRVANVSTQCNDELRSALEDAMREYRYTRSDLRPRIPRLPMHRKNRALVCALDSLLSNYFDGSEDLGDTHSILYCAAVAACRVAHVKFTDNERATRPKNSVPAWQCRIERRISEARALIGKLVCFREGNTRPRVMRFVRRAFSGTDVSPREYMSRVTERIDFLKQKVYAWANRIRRYRRRVDRYTQNRLFQSDERWVYRTWERPDQRVSDTRLPDNDVMNTFWRNIWSVPVAHTEGDWMQEVQRACEPIQEMGDIIISPQDVASAVRPMSNWKSPGPDGLHNFWLKWLRSSHARLASQFQSSLESGSLPQFLTTGVTHLLHKSGSTAEPKNYRPITCLPTVYKVLTSILRTKINNHIDNNSIMSASQNGCRNGSRGTKELLLIDMAISQQVRRSRKDLSTCWIDYKKAYDSVPHTWLMRVLELYKVNTTLCAFLTSCMGQWRTVLRYPGCRQIQGIGEPIRIERGIFQGDSLSPLWFCLALNPLSTLLEGSGLGYRLRRGGQVISHLLYMDDLKLFAPNNLRLLELLKVTETFSNSIRMEFGVDKCAVMHVKRGRIMESVGTQLSDSIQLRSLSSTETYKYLGMSEALGVNETDMKQSLKERFFGRLKKVFNSLLSGGNKVRAFNGWVMPVLMYSFGILKWTQTELDALDRRVRSLLTANRMHHPRSSVMRLYIPRKCGGRGFLNAKTLHNREVCSLREYFSQADVGMHRDVVAVDKGFTPLSLAKENWRKPVVLDTNGRREVWRSKELHGRFYRALHGPDVDFLASVAWLRFGDLFGETEGFVCAIMDEVMMTNNYRKYIVKDGTVDICRACHCPGESIRHIVSGCSRLANGEYLHRHNLVARIIHQQLALKYNLVDAEVPYYRYVPDPVLENGHVTLYWDRSIITDRTIVANKPDIVVIDRSERLTMIVDITVPHDENLVKAEKDKEIKYQDLAHEVVAMWDVDSAIIVPIVVTANGLIAKSLDQHLKRLSLGSWIKGLIQKAVLLDTARIVRRFLSLRP

SEQ ID NO: 30020 - protein, 1198 aa, Amphipyra tragopoginis
MLTRARSKAARPPPPDSPLSSASQPPELGPPVTPAAAAASSSSDEYFSPPTSPRPVRRQGRHRPPTSLGPRGPPAPSRVLATGGCVQRMKWTQSINENVMRAYYGSTEGGTNLTAYRVRMLTLFQELEPAINVSAQRLSDQVRVIQRNHRLDDAALDRLRLEVQNSRVTPFPSQTAVHEVNINIVPPRSDYVDGDMDDRAVTVSSQYNDQLRSALEDAIREYRANPELRPRLPRLPMHNKNRALVCALDSLLSSYFESSEDLGDTHSILYCAAVAACRVANVKFNNSERATRPKPAVPAWQCRIERRIDGARALIGKLICFREGNTRPRVMRFVRRAFSGTGISPREYMSQVTERIDFLKQKVCAWASRIRRYKRRVERYTQNRMFQCDQRWVYRAWERPDQGVSDGRLPDDDAMNSFWRSIWSVPVIHTEGDWMRDIERACEPIEEMGEILISPQDVASAARPLPNWKSPGPDGLHNFWIKWLRSSHARLATQFQSSLESGSLPQFFTTGVTHLLHKSGSTAEPKNYRPITCLPTVYKLLTSILRSKINTHIENNSVMSSAQNGCRNGSRGTKELLLIDMAISQQVRRSRKNLSTCWIDYKKAYDSVPHTWLMRVLELYKINATLRTFLMSCMGQWRTVLRYPGCRPIRESGEPIRIERGIFQGDSLSPLWFCLALNPLSTLLEGSGLGYPLRRGGQVVSHLLYMDDLKLFAPTKLQLVELLKVTETFSNSIRMEFGVDKCAVMHVRRGGIMESEGLQLSDSIHLRPLSANDTYKYLGMSEGLGISEADMKQSLRERFFGRLKKVLKSLLSGGNKVRAFNGWVMPVLMYSFGILKWTQTELDALDRRVRSLLTANRMHHPRSSVMRLYIPRKCGGRGLLNAKTLHNRELCSLREYFLHADAGMHRDVVAVDKGLTPLNLAKENWRKPVVLSTNDRREIWQSKELHGRFYRALHGPDVDFQASVSWLRFGDLFGETEGFVCAIMDEVIMTNNYRKYIVRDGTVDICRACHCPGESLRHIISGCSRLANGEYLHRHNQVAKIIHQQLALKYNLVESEVPYYKYVPDPVLENGHITLYWDRSIITDRTIVANKPDIVVIDRSERRTMIVDVTIPHDENLVKAEKDKQIKYLDLAHEVVNMWDVDSATIVPIVVTANGLMAKSLDQHLKRLSLGGWIKGLIQKAVLLDTARIVRRFLSLEP

SEQ ID NO: 30021 - protein, 1202 aa, Amphipyra tragopoginis
MLTRSRARARDNQAHLPPPDSSPSSASQQQGLNPASPAAAVASSSSDEYYSPPSSPPPARRRGGTRPPVGLGLRGPLASDGVPAPGGIVPRMKWTQKMNESVMRAYYGATEGGTNLTAYRGRMLSLFQELEPAVNVSAQRLSDQVRVIQRGHMLDDTVLDRLRSEVQSSPVISPSSQVLEQQQNLAAALPRPNRADEEDDDRAANVSTQCNDELRSALEDAMREYRYTRSDLRPRIPRLPMHRKNRALVCALDSLLSNYFDGSEDLGDTHSILYCAAVAACRVAHVKFTDNERATRPKNAVPAWQCRIERRISEARALIGKLVCFREGNTRPRVMRFVRRAFSGTDVSPREYMSRVTERIDFLKQKVYAWANRIRRYRRRVDRYTQNRLFQSDERWVYRTWERPDQRVSDTRLPDNDVMNTFWRNIWSVPVAHTEGDWMQEVQRACEPIQEMGDIIISPQDVASAVRPMSNWKSPGPDGLHNFWLKWLRSSHARLASQFQSSLESGSLPQFLTTGVTHLLHKSGSTAEPKNYRPITCLPTVYKVLTSILRTKINNHIDNNSIMSASQNGCRNGSRGTKELLLIDMAISQQVRRSRKDLSTCWIDYKKAYDSVPHTWLMRVLELYKVNTTLCAFLTSCMGQWRTVLRYPGCRQIQGIGEPIRIERGIFQGDSLSPLWFCLALNPLSTLLEGSGLGYRLRRGGQVISHLLYMDDLKLFAPNNLQLMELLKVTETFSNSIRMEFGVDKCAVMHVKRGRIMESVGTQLSDSIQLRSLSSTETYKYLGMSEALGVNETDMKQSLKERFFGRLKKVFNSLLSGGNRVRAFNGWVMPVLMYSFGILKWTQTELDALDRRVRSLLTANRMHHPRSSVMRLYIPRKCGGRGFLNAKTLHNREVCSLREYFSQADVGMHRDVVAVDKGFTPLSLAKENWRKPVVLDTNGRREVWRSKELHGRFYRALHGPDVDFLASVAWLRFGDLFGETEGFVCAIMDEVMMTNNYRKYVVKDGTVDICRACHCPGESIRHIVSGCSRLANGEYLHRHNLVARIIHQQLALKYNLVDAEVPYYKYVPDPVLENGHVTLYWDRSIITDRTIVANKPDIVVIDRSERLTMIVDITVPHDENLVKAEKDKEIKYQDLAHEVVAMWDVDSAIIVPIVVTANGLIAKSLDQHLKRLSLGSWIKGLIQKAVLLDTARIVRKFLSLRP

SEQ ID NO: 30022 - protein, 1194 aa, Autographa pulchrina
MLTRSRTRRPARPPPPDSSPSSASQLPDHVQAPAPAVASSSSDEYYSPPTSPTPVRRQGRRRPPSSLVPSGQPASNRAPAPGGDVRRMKWTQGINENVMRAYYGATEGGTNLTAYRARMLSLFQVLEPGVSVSAQRLSDQVRVIQRNHRLDDSTLDRLRSEIQSSPATNTLPPAAAPVSGAPHTAPSDGEEDDGAMTVSTQCSELIRSTLEDAIRDYRTSPPDQRPRLPRLPMHNRNKAIMGALDSLLPIYFESSEDLRDTHSILYCAALTACRVANVAICYSNIAARPKPAVPAWQCRIEQRVAEARTLIAKLIAFKQGNSRPRVMRFVRRAFAGTDISSSEYTARVTERIDLFKQKVCAWASRIRRYKRRVERFYLNRMFQKDQRWVYRAWERPASGVDGGCLPDGDATNSFWRSIWSVPVSHSEGGWMREVEQVCEPIQEMGAITISPQDVANAVRPMANWKTPGPDGLQNFWLKWLRSSHGCLASQFQSAVESASLPQFLTTGSTHLLHKTGSAMDPKNYRPITCLPTVYKLLTSILRAKINEHVVSFSIMSASQNGCRSGSRGTKELLLIDTAICQQVRRSKKDLSTCWIDYKKAYDSVPHTWLMRVLELYKINATLRAFLVSCMGQWSTVLHYPGCRDIQQGGEPIRIERGIFQGDSLSPLWFCLALNPLSTLLENSRLGYSLRRGSQVISHLLYMDDLKLFANSGLQLMKLLKITESFSNSIRMEFGVDKCAVMHVKRGGVVESQGIQLSDSINLRSLSATETYKYLGMSEALGINGADVKQSLQARFFGRLNKVLKSVLSGGNKVRAFNGWVMPVLMYSFGILKWTQTELDALDRRVRTLLTANRMHHPRSSVMRLYIPRKCGGRGFLNAKTLHNREVCNLREYFLQVDVGMHRDVVVVDKGLTPLSLGKENWHKPVVLSVKDREVVWQSKELHGRYYRTLHGSDVDFLASVAWLRFGDLFGETEGFVCAIMDEVIMTNNYRKYIIKDGTVDICRACHCPGESLRHIISGCSRLANGEYLHRHNQVARIIHQQLALRYKLVESEVPYYRYVPDPVLENGRVTLYWDRSIITDRTIVANKPDIVVIDRSERRAIIVDITIPHDENLVKAEKEKQLKYLDLAHEVVDMWEVDSAIIVPIVVTANGIIAKSLDQHLKRLSLGAWVKGLMQKAVLLDTARIVRRFLSLEP

SEQ ID NO: 30023 - protein, 1001 aa, Mythimna impura
MFHYNYLKGLCELASAPRTPPKGPGPQGPEINKIYKNNNNNNKNRALVCTLDSLLKNNFESSENLVDTHSILYCGAVAACRLANINFPNIDGTIRPKPAVPAWQYRIERRIDGARVLIGKLHCFREGNTRPRVMRFVRRAFLGTGISPQEYMSRVTERIDFLKQKVCAWASRIRRYKRRVDRYSQNRMFQSDERWVYRAWERPEQNVIDGRRPDDFATITFWRNIWSVPVSHTEGDWMRDVERVCEAIPEMEKVVITPADVAKAVRPLPNWKSPGPDGLQNFWLKWFSNSHAPLASQFQSTLESGSLPEYLTTGVTHLLHKTGNPVEPKNYRPITCLSTVYKLLTSILRAKINRHIENNLIMSASQNGCRNGSRGTKELLLIDMAMSQQARRSRKDLSTCWIDYKKAYDSVPHTWLMRVLELYKVDMTLRTFLESCMRQWKTVLRYPGCRPIQGNDEPIRIKRGIFQGDSLSPLWFCLALNPLSTLLEESGLGYRLRRGGQAISHLLYMDDLKLFAPSNLQLMELLKVTETFSSAIRMEFGVDKCAAMHVKRGEIMESEGIQLPDSIHLRSLSSTETYRYLGMSEALGINNADMKQSLKERFFGRLKKVLNSLLSGGNKVRAFNGWVMPVLMYSFGILKWTQTELDALDRRVRTLLTANRMHHPRSSVMRLYISRKCGGRGFLNAKTLHNREVCSLREYFLKTDVGMHRDVVAVDKGLTPLSMAKEDWRKPVILTTDDRKEIWKGKELHGRFYRALHEPDVDFLASVAWLRFSDLFGETEGFICAIMDEVILTNNYRRYIMKDGTVDVCRACHRPGESIRHIISGCSRLANGEYLHRHNQVARIIHQQLALKYNLVDSEVPYYKYVPDPVLENDHVTLYWDRSIITDRTIVANKLDIVVIDRLARRAVIVDVTIPHDENLVKAEKEKQIKYLDLAHEVVDMWNVDSAVIVPMVVTANGLIAKSFDDHLSKLSLRGWIKGLIQKAVLLDTARIVRRFLSLEP

SEQ ID NO: 30024 - protein, 1202 aa, Mythimna impura
MLTRAAARRARHPPPGSPLSSASPPPDLGSPVSPAAAVASSSSDEYFSPPTSPTPVRRQRRGRPPKSLGSRGQPTPSRVPAAGGCVQRMRWTQSMNENVMRAYYGSTEGGTNLTAYRDRMLSLFQDLEPTVNVSAQRLSDQVRVIQRNHRLDDATLDRLRSEVLSNQIVSTSIQTQTAATPTTNAISPRSNPNNDDDDADDRVVTVSSQCNDELRSALEDALREYRTTPTELRPRLPRLPMHKKNRALVCTLDSLLKNNFESSENLVDTHSILYCGAVAACRLANINFPNIDGTIRPKPAVPAWQYRIERRIDGARVLIGKLHCFREGNTRPRVMRFVRRAFLGTGISPQEYMSRVTERIDFLKQKVCAWASRIRRYKRRVDRYSQNRMFQSDERWVYRAWERPKQNVIDGRRPDDFATITFWRNIWSVPVSHTEGDWMRDVERVCEAIPEMEKVVITPVDVAKAVRPLPNWKSPGPDGLQNFWLKWFSNSHAPLASQFQSTLESGSLPEYLTTGVTHLLHKTGNPVEPKNYRPITCLSTVYKLLTSILRAKINRHIENNLIMSASQNGCRNGSRGTKELLLIDMAISQQARRSRKDLSTCWIDYKKAYDSVPHTWLMRVLELYKVDMTLRTFLESCMRQWKTVLRYPGCRPIQGNDEPIRIKRGIFQGDSLSPLWFCLALNPLSTLLEESGLGYRLRRGGQAISHLLYMDDLKLFAPSNLQLMELLKVTETFSSAIRMEFGVDKCAAMHVKRGEIMESEGIQLPDSIHLRSLSSTETYRYLGISEALGINNADMKQWLKERFFGRLKKVLNSLLSGGNKVRAFNGWVMPVLMYSFGILKWTQTELDALDRRVRTLLTANRMHHPRSSVMRLYISRKCGGRGFLNAKTLHNREMCSLREYFLKTDVGMHRDVVAVDKGLTPLSMAKEDWRKPVILTTDDRKEIWKGKELHGRFYRALHEPDVDFLASVAWLRFSDLFGETEGFICAIMDEVILTNNYRRYIMKDGTVDVCRACHRPGESIRHIISGCSRLANGEYLHRHNQVARIIHQQLALKYNLVDSEVPYYKYVPDPVLENDHVTLYWDRSIITDRTIVANKPDIVVIDRLARRAVIVDVTIPHDENLVKAEKEKQIKYLDLAHEVVDMWNVDSAVIVPMVVTANGLIAKSFDDHLSKLSLRGWIKGLIQKAVLLDTARIVRRFLSLEP

SEQ ID NO: 30025 - protein, 1209 aa, Xestia xanthographa
MITRSRAKQHQEAHPPSPGSSLSSASQPPGRATPVSIVSPVAAVASSSSDEFFSPPSTPSPSPRRGRRRGRGRPPAGLGPRGQQAPSRVPAAGGNVSRIRWTQSMNENVMRAYYGATEGGINLTAYRGRMLSLFQVLEPGVSASAQRLSDQVRVIQRNHMLDDTVLDRLRSESRSNLVTPASPLIAVQVQNVSSAPPRSDRDGEEDDSEVISVSTQCNAQLRSALESAFREYRSTPPELRLRLPRLPMHNKNKALMCALDSQLSNCFDSSKDLTDTHSILYCGAVAACRVAHVKFPNNDGATRPKLAVPAWQCRIERRIGEARALIGKLICFREGNTRPRVMRFVRRAFSGTDISFRDYLARVTERIDSLKQKICAWASRIRRYKRRVERYTQNRTFQSDERWVYRAWERPDQGVTDTRLPDDSAMYSFWRNIWSVPVSHTEGDWTREVEQACDPIPEMGAIIISPQDVARAVRPLPNWKSPGPDGLHNFWIKWFQGSHARLASQFQSALESGSLPQFLTTGITHLLHKSGSAAEPKNYRPITCLPTVYKVLTSILRAKINQHIDSNSIMSASQNGCRNGSRGTKELLLIDMAISQQVRRSRKNLSTCWIDYKKAYDSVPHTWLMRVLELYKIDATLRTFLMSCMGHWRTVLRYPGCRQIQGNSEPIRIERGIFQGDSLSPLWFCLALNPLSTLLERSGLGYLLRRDGQVISHLLYMDDLKLFAPHNFQLMKLLKVTETFSSAIRMEFGVDKCAVMHVKRGEIMESEGTQLSDSIHLRSLSSTETYKYLGMSEALSINTANMKQSLRERFFGRLNKVLGSLLSGGNKVRAFNGWVMPVLMYSFGILKWTQTELDALDRRVRTLLTANRMHHPRSSVMRLYISRKCGGRGFLSAKTLYNREVYSLREYFLEAEGEMHRDVVSVDKGLTPLSLANGNWRKPKVLDTNDRKVEWQGKELHGRFYRALHGPDVDFLASVSWLRFGDLFGETEGFICAIMDEVMMTNNYRKYIVKDGTVDICRACHRPGESIRHIISGCSSLANGEYLHRHNLVARIIHQQLALKYNLVESEVPYYKYAPDPVLDNGHITLYWDRPITTDRTVVANRPDIVVIDRLERRTMIVDITIPHDENLMKAEKDKQFKYLDLAREVVDMWDVGTAVIVPIVVSANGLIAKSLDQHLRRLSLGSWIKGLIQKAVLLDTARIVRRFLSQEP

SEQ ID NO: 30026 - protein, 1209 aa, Xestia xanthographa
MITRSRAKQHQEAHPPSPGSSLSSASQPPGRATPVSIVSPVAAVASSSSDEFFSPPSTPSPSPRRGRRRGRGRPPAGLGPRGQQAPSRVPAAGGNVSRIRWTQSMNENVMRAYYGATEGGINLTAYRGRMLSLFQGLEPGVSASAQRLSDQVRVIQRNHMLDDTVLDRLRSESRSNLVTPASPLIAVQVQNVSSAPPRSDRDGEEDDSEVISVSTQCNAQLRSALESAFREYRSKPPELRPRLPRLPMHNKNKALMCALDSQLSNCFDSSKDLTDTHSILYCGAVAACRVAHVKFPNNDGATRPKLAVPAWQCRIERRIGEARALIGKLICFREGNTRPRVMRFVRRAFSGTDISFRDYLARVTERIDSLKQKICAWASRIRRYKRRVERCTHYRTFQSDKRWVYRAWERPDQGVTDTRLPDDSAMYSFWRNIWSVPVSHTEGDWTREVEQACDPIPEMGAIIISPQDVARAVRPLPNWKSPGPDGLHNFWIKWFQRSHARLASQFQSALESGSLPQFLTTGITHLLHKSGSAAEPKNYRPITCLPTVYKVLTSILRAKINEHIDSNSIMSASQNGCRNGSRGTKELLLIDMAISQQVRRSRKNLSTCWIDYKKAYDSVPHTWLMRVLELYKIDATLRTFLMSYMGHWRTVLRYPGCRQIQGNSEPIRIERGIFQGDSLSPLWFCLALNPLSTLLERSGLGYLLRRDGQVISHLLYMDDLKLFAPNNFQLMKLLKVTETFSSAIRMEFGVDKCAVMHVKRGEIMESEGTQLSDSIHLRSLSSTETYKYLGMSEALGINTADMKQSLRERFFGRLNKVLGSLLSGGNKVRAFNGWVMPVLMYSFGILKWTQTELDALDRRVRTLLTANRMHHPRSSVMRLYISRKCGGRGFLSAKTLHNREVYSLREYFLEAEGEMNRDVVSVDKGLTPLSLANGNWRKPKVLDTNDRKVEWQGKELHGRFYRALHGPDVDFLASVSWLRFGDLFGETEGFICAIMDEVIMTNNYRKYIVKDGTVDICRACHRPGESFRHIISGCSSLANGEYLHRHNLVARIIHQQLALKYNLVESEVPYYKYAPDPVLDNGHITLYWDRPITTDRTVVANRPDIVVIDRLERRTMIVDITIPHDENLVKAEKDKQFKYLDLAREVVDMWDVGTAVIVPIVASANGLIAKSLDQHLRRLSLGSWIKGLIQKAVLLDTARIVRRFLSQEP

SEQ ID NO: 30027 - protein, 1079 aa, Mamestra brassicae
MLSLFQDLEPTVNVSAQRLSDQVRVIQRNHRLDDAALDRLRSEVLNNLIISTPTQTAVQAPVNGRITPRPNNVSDEVDDRVVTVSSQCNDRLRSALEDALREYRSTPTELRPRLPRLPMHKKNRALVCALDSLLQNIFESSESLVDTHSILYCGAVAACRIANVKFPGCDEAIRPKPAAPAWQRRIERRIDETRALIGKLYCFTEGNTRPRVMRFVRRAFSGTEISPRDFTSRVTERIDFLKQKVCAWASRIRRYKRRVDRYSQNRMFQSDVRWVYRAWERPEQSVTDVCRPDDVATSIFWRSIWSVPICHAEGGWMRDVERVCEAIPQMEKITITTLDVAKAVRPLPNWKSPGPDGLHNFWLKWYSSSHALLASQFQSSLDSGSLPQFLTTGVTHLLHKTGSPTEPKNYRPITCLSTVYKLLTSILRAKINEHIESNSIMSASQNGCRKGSRGTKELLLIDMAISQQVRRSRKDLSTCWIDYKKAYDSVPHTWLMKVLELYKIDATLRTFLESCMRQWKTVLRYPGCRPIQGSDEPVWIKRGIFQGDSLSPLWFCLALNPLSTLLEDSGLGYRLRRGGQAISHLLYMDDLKLFAPNNLRLMELLKVTETFSSAIRMEFGVDKCAVMHVKKGEIMESEGIHLSDSIQVRSLSSTETYKYLGMLEALGINGTDMKQSLRERFFGRLKKVLNSLLSGGNKVRAFNGWVMPVLMYTFGILKWTQTELDALDRRVRTLLTANRMHHPRSSVMRLYILRKCGGRGFLNAKSLHNREMCSLREYFLKADVGMHRDVVAVDKGLTPLSMAKENWRTPVILTTDDRKEVWKGKELHGRFYRALHGSDVDFSASVAWLRFGDLFGETEGFVCAIMDEVILTNNYRRHIMKDGTVDMCRACHRPGESIRHIISGCSRLANGEYLHRHNQVARIIHQQLALKYNLVDSSVYYKYVPDPVLENDHVTLYWDRSIITDRTIVANKPDIVVIDRLARRTMIIDVTIPHDENLVKAEKEKQIKYLDLAHEVVDMWNVESAVIVPIVVTANGLMAKSFDDHLSKLALRSWVKGLIQKAVLLDTARIVRRFLSLEP

SEQ ID NO: 30028 - protein, 1201 aa, Mesoligia furuncula
MLTRLAARRARLPPPDSSLSSAPPPPESSPIVSAVTPAVAVASSSSDEYFSPPTSPTPVRRQGRGRPPNSLGLRGHPAPSRVPATGGCVQRMRWTQSMNENVMRAYYRSTEGGINLTAYRDRMLSLFQELEPTVNVSAQRLSDQVRVIQRNHRLDDIALDRLRSEVLSNHIFSTSAQTAAQASTVDAIPPRSNHVEEEDDRVDTVSSQCNVRLRSALEDALCEYRFTPTELRPRLPRLPMHKKNRALVCALDSQLKNFFESSEDLVDTHSILYCAAVAACRLANVKFPSCDGATRPKPAVPAWQRRIERRIDGARVLIGKLYCFREGNTRPRVMRFVRRAFSGTGISPREYISRVTERIDFLKQKVCAWASRIRRYKRRVDRYTQNRMFQSDERWVYRAWERPEQNVTDVYRPDDATTSAFWCSIWSVPVCHTEAGWMRDVERVCESVPEMETVLITPSDVAKAVRPLPNWKSPGPDGLHNFWLKWLISSHTCLASQFQSSLESGSLPQFLTTGVTHLLHKSGSPAEPKNYRPITCLSTVYKLLTSILRAKINTHIESNSIMSASQNGCRNGSRGTKELLLIDMAISQQVRRSRKDLSTCWIDYKKAYDSVPHTWLMKVLELYKIDATLRTFLESCMRQWKTVLRYPGCRQIQGNDEPVWIKRGIFQGDSLSPLWFCLALNPLSTLLEDSGLGYRLRREGQVISHLLYMDDLKLFAPNKLRLMELLKVTETFSSAIRMEFGVDKCAVMHVKRGVILESEGIQLSDSISLRSLSSSESYKYLGMSEALGINDADMKQSLKERFFCRLKKVLISLLSGGNKVRAFNGWVMPVLMYSFGILKWTQTELDALDRRVRTLLTANRMHHPRSSVMRLYIPRKCGGRGFLNAKTLHNREVCSLREYFLKAEVGMHRDVVAVDKGLTPLSMAKENWRKPVVLSTDDRKEVWQSKELHGRFYRALHEPGVDFIASVSWLRFGDLFGETEGFVCAIMDEVILTNNYRRHIMKDGTVDVCRACHRPGESIRHIISGCSRLANGEYLHRHNQVARIIHQQLALKYKLVDSEVPYYKYVPDPVLENDHVTLYWDRSIITDRTIVANKPDIVVIDRLARRTMIVDVTIPHDGNLVKAEKEKQIKYLDLAHEVVDMWNVSSAVIVPIVVSANGLMAESLDQHLSRLSLGGWIKGLIQKAVLLDTARIVRRFLSLEP

SEQ ID NO: 30029 - protein, 1185 aa, Hypermnestra helios
MLTRQQARDRARITPPGSSLNSASPPPETSTTSSVDAPAEAAASSSSDEFLSPPTSPPPVRRQWKRRPPNGMGSRSQQAPSRVPAAGGDVQRMRWTQSMNENVMRAYYGATEGGTRLTVYRARMLALFQVLEPAFDVSAQRLSDQVRVIQRNHRLDDAALDRLRNEALSSRIIPNSSQDTVQTIENNVAPPPFNSDDVVESDTAVVVSTQNNEKLRSALEDAIREYRAAQPEHRPRLPRLPMHNKNRALVCALDAVLDKYFESSADLIDTHAILYCAAVAACRVANVKFPKNDNVTRPRQAVPAWQCRIERRIDEARVLIGKLYSFREGNTRPRVMLRITECIDSLKQKICAWANRIRQFKRRVERYVQNRMFQSDQRWVYRMWERPDRSVDDMRRPDDAATNEFWRNIWSVPVVHAEADWICDVEQACEAIPNMEATTITPADVASAVRLIPNWKSPGPDGLHNFWLKWLQSSHACLASQFQACLESGSLPQFLTTGITHLLHKSGCTAEPKNYRPITCLPTVYKLLTSVLRAKICKHIDDNKIMSASQNGCRRGSRGTKELLLIDMAISQQVRRSRKDLSTCWIDYKKAYDSVPHTWLMRVLELYKVDATLRTFLLSCMRQWRTVLRYPGCREMLGNDEPIRIERGIFQGDSLSPLWFCLALNPLSTLLEGSGLGYRLQRGGWVISHLLYMDDLKLFAPNKLRLLELLKVTETFSNSIRMEFGVDKCAVMHIKHGEIIESEGLQLSDSINIRSLSAGDTYKYLGMAEGLGIDVAGVKQSLQDRFFGRLNKVLKSFLSGGNRVRAFNGWVMPILMYSFGILKWTQTELDALDRKVRSLLTANRMHHPRSSVMRLYIPRKCGGRGFLNAKTLHNREVCSLREFFFKTDEPMHRVVVAVDKGLTPLSLAKENWRKLKVLSTNDRKEVWQSKELHGRFFRALHGPDVDFLASVSWLRFGDLFGETEGFVCAIMDEVIMTNNYRRFIVKDGTVDICRACHRPGESLRHIISGCSRLANGEYLHRHNQVARIIHQQLALKYNLVDSEVPYYKYVPDPVLENGHITLYWDRSIITDRTIVANKPDIVVIDRTARLTIIVDVTIPHDENLVKAEKDKQTKYLDLAHELVDMWDVDSAVIVPIVVTANGLIAKSLDHHLRRLSLGGWVKGLIQKAVLLDTARIVRRFLSLEP

SEQ ID NO: 30030 - protein, 1197 aa, Mythimna ferrago
MLTRSRARRPETHPTTSGSSLNSASQPPGPAPAVSPVIPEAAVASSSSDEYFSPPTTPPPARRRGRGRPPASLGPRGPPASGRVPAVGGSVQRMRWTSSINENVMRSYFGATEGGINLTAYRGRMLSLFQVLEPAVNVSVQRLSDQVRVIQRNRMLDDAVLDRLRLESQSSRATPSAAAQRQPSAAPRPDHVGDADDDAAISVSTQCNERLRGALEDAFREYRSIPPELRPRLPRLPMHKRNKALVCALDSQLSICFDSSEDLADTHSILYCAAVAACRVAHVKFPNCNRATRPAVPAWQCRIERRIGEARALIGKLICFREGNTRPRVMRFVRRAFSGTDISPRDYLPCVTERIDFLKQKIYAWANRIRRYKRRVERYTQNRTFQSNERWVYRAWERPDQGVTDTRLPDDDAMCSFWRSIWSAPVSHTEGDWIREVERACDLLPEMGAITISPQDVARAVRPLPNWKSPGPDGLHNFWLKWFQRSHARLASQFQSALESGSLPQFLTTGITHLLHKSGSTAEPENYRPITCLPTVCKVLTSILRAKINSHIETNSIMSVSQNGCRNGSRGTKELLLIDIAISQQVRRSRKNLSACWIDYKKAYDSVPHTWLMRVLELYKVDATLRTFLMSCMGQWRTVLHYPGCRQIWENSEPIRIERGIFQGDSLSPLWFCLALNPLSTLLEGSGLGYRLKRGDQVISHLLYMDDLKLFAPNNLQLMELLKVTETFSSAIRMDFGVDKCAVIHVKRGEIMESEGIQLSDSIHLRSLSSTETYKYLGMSEALGINTDDVKQSLKERFFGRLNKVLNSLLSGGNKVRAFNGWVMPVLMYSFGILKWTQTELDALDRRVRTLLTANRMHHPRSSVMRLYIPRKCGGRGFLNAKSLHNREVCSLREYFLAVDVGMHRDVVAVDKSLTPLSLANENWRKPLVLDTNDRREVWQGKELHGRFYRALHGPDVDLLASVSWLRFGDLFGETEGFVFAIMDEVMMTNNYRKYIVKDGTVDICRACHRPGESIRHIISGCSRLANGDYLHRHNLVAKIIHQQLALKYNLVESEVPYYRYVPDPVLDNGSITLYWDRSIITDRTIVANKPDIVVIDRLERRTMIVDIAVPHDENLVKAEKDKQIKYLDLAREVVDMWEVDRAIIVPIVVTANGLIAKSLEQHLRRLSLGSWIKGLIQKAVLLDTARIVRRFLSQEP

SEQ ID NO: 30031 - protein, 1079 aa, Amphipyra tragopoginis
MLSLFQALEPAVNVSAQRLSDQVRVIQRGHMLDDTVLDRLRSEVQSSPVISPSSQVLEQQQNLAAALRPNRADEEDDDRAANVSTQCNDELRSALEDAMREYRYTRSDLRPRIPRLPMHRKNRALVCVLDSLLSNYFDGSEDLGDTHSILYCAAVAACRVAHVKFTDNERATRPKNAVPAWQCRIERRISEARALIGKLVCFREGNTRPRVMRFVRRAFSGTDVSPREYMSRVTERIDFLKQKVYAWANRIRRYRRRVDRYTQNRLFQSDERWVYRTWERPDQRVSDTRLPDNDVMNTFWHNIWSVPVAHTEGDWMQEVQRACEPIQEMGDIIISPQDVASAVRPMSNWKSPGPDGLHNFWLKWLRSSHARLASQFQSSLESGSLPQFLTTGVTHLLHKSGSTAEPKNYRPITCLPTVYKVLTSILRTKINNHIDNNSIMSASQNGCRNGSRGTKELLLIDMAISQQVRRSRKDLSTCWIDYKKAYDSVPHTWLMRVLELYKVNTTLCAFLTSCMGQWRTVLRYPGCRQIQGIGEPIRIERGIFQGDSLSPLWFCLALNPLSTLLEGSGLGYRLRRGGQVISHLLYMDDLKLFAPNNLRLLELLKVTETFSNSIRMEFGVDKCAVMHVKRGRIMESVGTQLSDSIQLRSLSSTETYKYLGMSEALGVNETDMKQSLKERFFGRLKKVFNSLLSGGNKVRAFNGWVMPVLMYSFGILKWTQTELDALDRRVRSLLTANRMHHPRSSVMRLYIPRKCGGRGFLNAKTLHNREVCSLREYFSQADVGMHRDVVAVDKGFTPLSLAKENWRKPVVLDTNGRREVWRSKELHGRFYRALHGPDVDFLASVAWLRFGDLFGETEGFVCAIMDEVMMTNNYRKYIVKDGTVDICRACHCPGESIRHIVSGCSRLANGEYLHRHNLVARIIHQQLALKYNLVDAEVPYYKYVPDPVLENGHVTLYWDRSIITDRTIVANKPDIVVIDRSERLTMIVDITVPHDENLVKAEKDKEIKYQDLAHEVVAMWDVDSAIIVPIVVTANGLIAKSLDQHLKRLSLGSWIKGLIQKAVLLDTARIVRKFLSLRP

SEQ ID NO: 30032 - protein, 1199 aa, Amphipyra tragopoginis
MLTRARARANARPPPPDSSPSSASQQQGLDPASPAAAVASSSSDEYYSPPSSPPSARRRGGTRPPVCLGLRGPLASDGVPAPGGIVPRMKWTQKMNESVMRAYYGATEGGTNLTAYRGRMLALFQVLEPAVNVSAQRLSDQVRVIQRGHMLDDNVLDRIRSEVQSSPVISPSPQLLDQPQNLAATLPRPNRAVEEDDDRATNVSTQYNEELRSALEDAMREYRFTRPDLRPRVPRLPMHRKNRALVCALDSLLSNYFDGSEDLSDTHSILYCAAVAACRVAHVKFTDNERATRPKNAVPAWQCRIERRIAEARALIGKLVCFREGNTRPRVMRFVRRAFSGTDVSPREYMSRVTERIDFLKQKVCAWASRIRRYRRRVDRYTQNRLFQSDERWVYRTWERPDQRVSDTRLPDNDVMNAFWRNIWSVPVTHTEGDWIREVQRACEPIQEMGDINISPQDVASAVRPMSNWKSPGPDGLHNFWLKWLRSSHARLASQFQSSLESGSLPQFLTTGITHLLHKSGSAAEPNNYRPITCLPTVYKVLTSILRAKINNHIDNNSIMSASQNGCRNGSRGTKELLLIDMTISQQVRRSRKDLSTCWIDYKKAYDSVPHTWLMRVLELYKVNTTLCAFLTSCMGQWRTVLHYPGCRQIQGIGEPIRIERGIFQGDSLSPLWFCLALNPLSTLLEGSGLGYRLRRGGQVISHLLYMDDLKIFAPNNLQLLELLKVTETFSNSIRMEFGVDKCAVMHVKRGRIMESVGTQLSDSIQLRALSSTETYKYLGMSEALGVNETDMKQSLKERFFGRLKKVFNSLLSGGNKVRAFNGWVMPVLMYSFGILKWTQTELDALDRRVRSLLTANRMHHPRSSVMRLYIPRKCGGRGFLNAKTLHNREVCSLREYFSQVDVGMHRDVVAVDKGFTPLSLAKENWRKPVVLDTNGRREVWRSKELHGRFYRALHGPDVDFLASVAWLRFGDLFGETEGFVCAIMDEVMMTSNYRKYIVKDGTVDICRACHCPGESIRHIVSGCSRLANGEYLHRHNLVARIIHQQLALKYNLVDAEVPYYKYVPDPVLENGHITLYWDRSIITDRTIVANKPDIVVIDRSERLTMIVDITVPHDENLVKAEKDKEIKYQDLAHEVVAMWDVDSAIIVPIVVTANGLIAKSLDQHLKRLSLGSWIKGLIQKAVLLDTARIVRKFLSLRP

SEQ ID NO: 30033 - protein, 1200 aa, Mythimna impura
MLTRAAARRARHPPPGSPLSSASPPPDLESPVSPAAAVASSSSDEYFSPPTSPTPVRRQRRGRPPKSLGSRGQPAPSRVPAAGGCVQRMRWTQSMNENVMRAYYGSTEGGTNLTAYRDRMLSLFQDLEPTVNVSAQRLSDQVRVIQRNHRLDDATLDRLRSEVLSNQIVSTSIQTQTAATPTTNAISPRSNPNNDDADDRVVTVSSQCNDELRSALEDALREYRTTPTELRPRLPRLPMHKKNRALVCTLDSLLKNNFESSENLVDTHSILYCGAVAACRLANINFPNIDGTIRPKPAVPAWQYRIERRIDGARVLIGKLHCFREGNTRPRVMRFVRRAFLGTGISPQEYMSRVTERIDFLKQKVCAWASRIRRYKRRVDRYSQNRMFQSDERWVYRAWERPEQNVIDGRRPDDFATITFWRNIWSVPVSHTEGDWMRDVERVCEAIPEMEKVVITPADVAKAVRPLPNWKSPGPDGLQNFWLKWFNNSHAPLASQFQSTLESGSLPEYLTTGVTHLLHKTGNPVEPKNYRPITCLSTVYKLLTSILRAKINRHIENNLIMSASQNGCRNGSRGTKELLLIDMAISQQARRSRKDLSTCWIDYKKAYDSVPHTWLMRVLELYKVDMTLRTFLESCMRQWKTVLRYPGCRPIQGNDEPIRIKRGIFQGDSLSPLWFCLALNPLSTLLEESGLGYRLRRGGQAISHLLYMDDLKLFAPSNLQLMELLKVTETFSSAIRMEFGVDKCAAMHVKRGEIMESEGIQLPDSIHLRSLSSTETYRYLGMSEALGINNADMKQSLKERFFGRLKKVLNSLLSGGNKVRAFNGWVMPVLMYSFGILKWTQTELDALDRRVRTLLTANRMHHPRSSVMRLYISRKFGGRGFLNAKTLHNREVCSLREYFLKTDVGMHRDVVAVDKGLTPLSMAKEDWRKPVILTTDDRKEIWKGKELHGRFYRALHEPDVDFLASVAWLRFSDLFGETEGFICAIMDEVILTNNYRRYIMKDGTVDVCRACHRPGESIRHIISGCSRLANGEYLHRHNQVARIIHQQLALKYNLVDSEVPYYKYVPDPVLENDHVTLYWDRSIITDRTIVANKPDIVVIDRLARRAVIVDVTIPHDENLVKAEKEKQIKYLDLAHEVVDMWNVDSAVIVPMVVTANGLIAKSFDDHLSKLSLRGWIKGLIQKAVLLDTARIVRRFLSLEP

SEQ ID NO: 30034 - protein, 1094 aa, Xestia xanthographa
MITRAAARRARLPTPDSSLSSASPPPDPGSSVSPVAAVASSSSDEYFSPPTSPPPVRRAGRGRPPKGLGLRGQQAPSRVPATGGCVQRMKWTRSMNENVMRAYYGSTEGGTNLTAYRVRMLSLFQDLEPNVNVSAQRLSDQVRVIQRNHRLDDAALDRLRSEVLSNLIILTPTQTAVQVSNINVTLPRSIPAVVEEDDRVATVSSQCNDRLRNALEDALREYRSTPTELRPRLPRLPMHKKNRALVCALDSQLKHIFESSENLVDTQSILFCGAVAACRLANVKFPNCDVATRPKPAVPAWQRRIERRIDGSRVLIGKLYCFREGNTRPRVMRFVRRAFSGTEISPQEYMSRATERIDFLKQKVYAWANRIRRYKRRVDRYSQNRMFQSDERWVYRAWERPEQNMTDVCRPDDATTTSFWRSIWSVPVCHTEADWMRDVERVCEPIPEMEPILITPLDVARAVRPLPNWKSPGPDGLHNFWLKWFSSSHTCLASQFQSSLESGSLPQFLTTGVTHLLHKSGSLAEPKNYRPITCLSTIYKLLTSILRMKINTHIDKNSIMSASQNGCGNGSRGTKELLLIDMAISQQVRRSRKDLSTCWIDYKKAYDSVPHTWLMRVLELYKVDTTLRTFLESCMGQWKTVLRYPGCRQIQGSDEPVWIKRGIFQGDSLSPLWFCLALNPLSTLLENSGLGCRLRKDGQVISHLLYMDDLKLFAPNKLRLMELLKVTETFSSAIRMEFGVDKCAVMYVKRGEIMESEGLQLSDSIHLKSLSSSETYKYLGMSEALGINVTDMKQSLRERFFGRLRKVLNSLLSGGNKVRAFNGWVMPVLMYSFGILKWTQTELDALDRRVRTLLTESRMHHPRSSVMRLYIPRKCGGRGFLNAKTLHNREVCSLREYFLKAEVGMHRDVVAVDKGLTPLSMAKENWHRPEVLTTDDRKEVWQGKELHGRFYRALHGPDVDFLASVSWLRFGDLFGETEGFVCAIMDEVMLTNNYRKYIMKDGTVDVCRACHLPGESIRHIISGCSRLANGEYLHRHNQVARIIHQQLALKYKLVESEVPYYSMCPTQFSKMTMSRCTGIGPSLLTGLLSPISLT

SEQ ID NO: 30035 - protein, 1198 aa, Mamestra brassicae
MITRAAARRAHPPPPGSSLSSASPTPDIGSQVSPVVAVASSSSDEYFSPPTSPTPVRRQGRGRLPRSLGSRGQPALSRVPAAGGCVQRMRWTQSMNENVMRAYYGSTEGGTNLTAYRVRMLSLFQDLEPTVNVSAQRLSDQVRVIQHNCRLDDAALERLRSEVLSNLIISTPTQTVVQVPASGAITPRPNNGSDEVDDRVVTVSSQCNDRLRSALEDALREYRLTPTELRPRLPRLPMHKKNRALVCALDSLLQNIFESSESLVDTHSILFCGAVAACRIANVKFPSCDEAIRPKPAAPAWQCRIERRIDEARALIGKLYCFREGNTRPRVMRFVRRAFSGTGISSREYTFRVTERIDFLKQKVCAWANRIRRYKRRVDRYSQNRMFQSDERWVYRAWERPEQSVTDVYRPDDVATSTFWRSIWSVPICHAEGGWMRDVERVCEAIPQMEKNTITTLDIAKAVRPLPNWKSPGPDGLHNFWLKWYSSSHALLASQFQSSLESGSLPQFLTTGITHLLHKTGSPAEPKNYRPITCLSTVYKLLTSILRAKINEHIESNSIMSASQNGCRKGSGGTKELLLIDMAISQQVRRSRKDLSTCWIDYKKAYDSVPHTWLMKVLELYKIDATLRTFLESCMRQWKTVLRYPGCQPIQGSDEPVWIKRGIFQGDSLSPLWFCLALNPLSTLLEDSGLGYRLRRGGQAISHLLYMDDLKLFAPNNLRLMELLKVTETFSSAIRMEFGVDKCAVMHVKKGEIMESEGIQLSDSIQVRSLSSTESYKYLGMSEALGINGTDMKQSLRERFFGRLKKVLNSLLSGGNKVRAFNGWVMPVLMYTFGILKWTQTELDALDRRVRTLLTANRMHHPRSSVMRLYIPRKCGGRGFLNAKTLHNREMCSLREYFLKADVGMHRDVVAVDKGLTPLSMAKENWRKPVILTTDDRKEVWKGKELHGRFYRALYGSDVDFSASVAWLRFGDLFGETEGFVCAIMDEVILTNNYRKHIMKDGTVDVCRACHRPGESIRHIISGCSRLANGEYLHRHNQVARIIHQQLALKYKLVDSEVPYYKYVPDPVLENDHALYWDRSIITDRTIVANKPDIVVIDRLARRTMIIDVTIPHDENLVKAEKEKQIKYLDLAHEVVDMWNVDSAVIVPIVITANGLMAKSFDDHLSKLALRGWIKGLIQKAVLLDTARIVRRFLSLEP

SEQ ID NO: 30036 - protein, 1194 aa, Autographa gamma
MLTRSRARKPARPPSPDPSPSSASQLPDHVPAPAPAVASSSSDEYYSPPTSPTPVRRQGRRRPPCSLAPSGQPASNRAPAPGGDVRRMKWTLSINENVMRAYYGATEGGTNLTAYRARMLSLFQALEPGVSVSAQRLSDQVRVIQRNHRLDDSTLDRLRSEIQHSPATSTSPPVAAPVSGAPLTAPSDGEEEDGAITVSTQCNELIRSTLEDAIRVYRRSPPDQRPRLPRLPMHNRNKAIMGALDSLLPVYFESSEDLRDTHSILYCAALTACRVANVAMCHSNIATRPKPAVPAWQCRIEQRVAEARTLIAKLKAFKQGNSRPRVMRFVRRAYAGTDISPSEFIARVTERIDLFKQRVCAWASRIRRYKRRAERFHLNRMFQKDQRWVHRLWERPVSAMDGGCLPDGDATNSFWRSIWSVPVTHSEGGWMREVEQVCEPIQEMGAITISPQDVANAVRPMANWKTPGPDGLQNFWLKWLRSSHSCLASQFQSAVESASLPQFLTTGSTHLLHKTGSATDPKNYRPITCLPTVYKLLTSILRAKINEHIVNFSIMSASQNGCRSGSRGTKELLLIDTAICQQVRRSKKDLSTCWIDYKKAYDSVPHTWLMRVLELYKINTTLRAFLMSCMGQWSTVLHYPGCRDIQQGGEPIRIERGIFQGDSLSPLWFCLALNPLSTLLENSGLGYSLRRGGQVISHLLYMDDLKLFATSGFQLMELLKITESFSNSISMEFGVDKCAVMHVKRGGIVESQGIQLSDSINLRSLSATDTYKYLGMSEALGINVADVKQSLQARFFGRLNKVLKSVLSGGNRVRAFNGWVMPVLMYSFGVLKWTQTELDALDRRVRTLLTANRMHHPRSSVMRLYIPRKCGGRGFLNAKTLHNREVCNLREYFLQVDVGMHRDVVVVDKGFTPLSLGKENWHKPVVLSVKDREDVWQSKELHGRYYRTLHGPDVDFLASVAWLRFGDLFGETEGFVCAIMDEVIMTNNYRKYIIKDGTVDICRACHCPGESLRHIISGCSRLANGEYLHRHNQVARIIHQQLALRYKLVESEVPYYRYVPDPVLENGRVTLYWDRSIITDRTIVANKPDIVVIDRSERRAIIVDVTIPHDENLVKAEKEKQLKYLDLAHEVVDMWEVDSAMIVPIVVTANGIIAKSLDQHLKRLSLGTWVKGLIQKAVLLDTARIVRRFLSLES

SEQ ID NO: 30037 - protein, 1202 aa, Griposia aprilina
MLTRSARTRARPPPPDSSLSSASPPPVSSPIVSAVTTPVAVVASSSSDEYFSPPTSPTPVRRQGRGRPPRSLGLRGHPAPSRVPAAGGCVQRMKWTQSMNENVMRAYYRSTEGGTNLTAYRDRMLSLFQELEPTINVSAQRLSDQVRVIQRSHRLDDAALDRLRSELNNHIISTPAQTAVQASTIDEIQPRSNHGVEVEDDRVASVSSQCNARLRSALEDAFREYRSTPTELRPRLPRLPMHKKNRALVCALDSQLKNVFESSENLIDTHSILYCAAVAACRLANVRFPNCDGATRPKPAVPAWQCRIKRRIDGARVLIGKLHCFREGNNRPRVMRFVRRAFSGTGISPREYMSHATERIDFLKQKVCAWASRIRRYKRRVDRYTQNRMFQSDERWVYRAWERPEQNVTDECRPDDATTSTFWRSIWSVPVCHVEADWMRDVGRACETVPEMDAVLITPLDVARAVRPLPNWKSPGPDGLHNFWLKWLISSHACLASQYQSSLESGSLPQFLTTGVTHLLHKSGSPTDPKNYRPITCLSTVYKLLTSILRAKINTHIESNSIMSASQNGCRNGSRGTKELLLIDMAISQQVRRSRRDLSTCWIDYKKAYDSVPHTWLMRVLELYKIDTTLRTFLRSCMGQWRTVLRYPGCRQIQANDEPVWIKRGIFQGDSLSPLWFCLALNPLSTLLEDSGLGYRLRKDGQVISHLLYMDDLKLFAPNKLQLMELLKVTETFSSTIRMEFGVDKCAVMHVKRGEVMEPEGIQLSDSIHLRSLSSSESYKYLGMSEALGINVADMKQSLRERFFGRLKKVLISLLSGGNKVRAFNGWVMPVLMYSFGKLKWTQTELDALDRRVRTLLTANRMHHPRSSVMRLYIPRKCGGRGFLNAKTLHNREVCSLREYFLKAEVGMHRDVVAVDKGLTPLSMAKENWRKPVVLTTDDRKEVWQSKELHGRFYRALHEPDVDFLASVSWLRFGDLFGETEGFVYAIMDEVILTNNYRRHIMKDGTVDMCRACHRPGESIRHIVSGCSRLANGEYLHRHNQVARVIHQQLALKYKLVDSEVPYYKYVPDPVLENDHITLYWDRSIITDRTIVANKPDIVVIDRLARRTMIIDITIPHDENLVKAEKEKQIKYLDLAHEVVEMWNVSSAVIVPIVVSANGLMAKSLDQHLSRLSLDGWVKGLIQKAVLLDTARIVRRFLSLEP

SEQ ID NO: 30038 - protein, 1202 aa, Griposia aprilina
MLTRSARTRARPPPPDSSLSSASPPPVSSPIVSAVTTPVAVVASSSSDEYFSPPTSPTPVRRQGRGRPPRSLGLRGHPAPSRVPAAGGCVQRMKWTQSMNENVMRAYYRSTEGGTNLTAYRDRMLSLFQELEPTINVSAQRLSDQVRVIQRSHRLDDAALDRLRSELNNHIISTPAQTAVQASTIDEIQPRSNHGVEVEDDRVASVSSQCNARLRSALEDAFREYRSTPTELRPRLPRLPMHKKNRALVCALDSQLKNVFESSENLIDTHSILYCAAVAACRLANVRFPNCNGATRPKPAVPAWQCRIKRRIDGARVLIGKLHCFREGNNRPRVMRFVRRAFSGTGISPREYMSHATERIDFLKQKVCAWASRIRRYKRRVDRYTQNRMFQSDERWVYRAWERPEQNVTDECRPDDATTSTFWRSIWSVPVCHVEADWMRDVGRACETVPEMDAVLITPLDVARAVRPLPNWKSPGPDGLHNFWLKWLISSHACLASQYQSSLESGSLPQFLTTGVTHLLHKSGSPTDPKNYRPITCLSTIYKLLTSILRAKINTHIESNSIMSASQNGCRNGSRGTKELLLIDMAISQQVRRSRRDLSTCWIDYKKAYDSVPHTWLMRVLELYKIDTTLRTFLRSCMGQWRTVLRYPGCRQIQANDEPVWIKRGIFQGDSLSPLWFCLALNPLSTLLEDSGLGYRLRKDGQVISHLLYMDDLKLFAPNKLQLMELLKVTETFSSTIRMEFGVDKCAVMHVKRGEVMEPEGIQLSDSIHLRSLSSSESYKYLGMSEALGINVADMKQSLRERFFGRLKKVLISLLSGGNKVRAFNGWVMPVLMYSFGILKWTQTELDALDRRVRTLLTANRMHHPRSSVMRLYIPRKCGGRGFLNAKTLHNREVCSLREYFLKAEVGMHRDVVAVDKGFTPLSMAKENWRKPVVLTTDDRKEVWQSKELHGRFYRALHEPGVDFLASVSWLRFGDLFGETEGFVCAIMDEVILTNNYRRHIMKDGTVDMCRACHRPGESIRHIVSGCSRLANGEYLHRHNQVARIIHQQLALKYKLVDSEVPYYKYVPDPVLENDHITLYWDRSIITDRTIVANKPDIVVIDRLARRTMIIDITIPHDENLVKAEKEKQIKYLDLAHEVVEMWNVSSAVIVPIVVSANGLMAKSLDQHLSRLSLDGWVKGLIQKAVLLDTARIVRRFLSLEP

SEQ ID NO: 30039 - protein, 1115 aa, Sesamia nonagrioides
MLTRSAARRARSPPPDSSPSSASPPPVSSPTVNAVMTPAAAVALSSSDEYFSPPTTPPPVRRRGGRRPPDCLGPRGPPASDRAPATGGNVQRMKWTQSINENVMRAYFGATEGGSNLTAYRGRMLSLFQVLEPAVNVSAQRLSDQVRVIQRNHMLDDVVLDRLRLESRNSHVTPASSLVAVQLNSAPSRPNLVDEEDDDEAISVTPQCNEKVRSALEDAFREYRSTPPELRPRLPRLPMHKKNKALVCALDSQLSNYLKDSKDLADTHSILYCGAVAICRVAHVKFPDSDRATRPKPAVPAWQCRIERRIGETRALIGKLISFREGNTRPRVMRFVRRAFSGTDVSTRDYLLRVTERIDFLKQKIYAWANRIRRYRRRVERYSQNRNFQSDERWVYRAWERSDQGVTDTCLPDDDATRSFWRNIWSVPVSHTEGGWTRDVERACDPVPEMGAITICPQDVARAVRPLPNWKSPGPDGLHNFWIKWFSGSHACLASQFQTALESGSLPQFLTTGITHLLHKSGSTAEPKNYRPITCLPTVYKVLTSILKAKINTHIDSNSIMSASQNGCRNGSRGTKELLLIDMAISQQVRRSRKDLSTCWIDYKKAYDSVPHTWLMRVLELYKVDATLRTFLMTCMSQWRTVLRYPGCRNIPRNSEPIRIERGIFQGDSLSPLWFCLALNPLSTLLEDSGLGYRLRRGGQVISHLLYMDDLKLFAHTNSQLKELLKITETFSSAIRMEFGVDKCAVMHVQRGEIVESVGTQLTGSINLRSLSASETYKYLGMSEALGINVTDMKQSLKERFFGRLKKVLNSLLSGGNKVRAFNGWVMPVLMYSFGILKWTQTELDALDQRVRTLLTANRLHHPRSSVMRLYIPRKCGGRGFLNAKTLHNRELCSLREYFLKTDVGMHRDVVAVDKGLTPLSLAKENWRKPVVLETNDRMEVWQSKELHGRFFRALRGPDVDFQASVAWLRYGDLCGETEGFVCAIMDEVMMTNNYRKFIVKDGTVDICRACHRPGESIRHIISGCSRLANGEYLHRHNLVARIIHQQLALKYNLVESEVPYYRYMPDPVLENGHITLYWDRSIITDRTIVANKPDIVMVDRSERRAMIVDITIPA

SEQ ID NO: 30040 - protein, 1200 aa, Arctia plantaginis
MLTRARSRALTTSPDSSLRSVLPSPEATTEVPAVAEASSSTSSDEFFSPPTSPTPVRRQGRCRPPTSLGSRGLLTSNRVPATGGDVRRMKWTKSINENVMRAYYRATEVGTNLTAYRVRLVSLFQELEPAVNVSAQRLSDQVRAIQRCHLLDDAVLERIRSDIRNSLIIPSSSHTVDSVANSTPQLASYTDDIDELVESEVISVSTQYNDRIRSALEDAILEYRYLNCNDRPRLFRLPIHKRNLALVGALDSLLPEYLDNSEDLSDTHSILYCAAIAACRVAGVKIANNVTTTRPKSTVPAWQYRIERRITETRTLIGKLISYRSGNMRPRVMRFVKQAFLGTTISPQQYMSCVTERIDFLKQKIYAWANRIRRYKKRTDRYNQNRMFQRNEKWVYRKWEEPDPCVGDRHLPDENVTNTFWRNIWSVPVTHIEGDWLQDVRRSCESITPMEPVKIDKDDVSCAVRSLPNWKSPGPDRLHNFWLKWFRSSHARLASQFQAALDSGSLPQFLTTGITHLLYKSGSVMDPKNFRPITCLPTMYKLLTSILRLKITLHINNNSIMSVSQNGCRSGTRGTKDLLIIDMTISQQVRCNRKSLATCCIDYKKAYDSVPHTWLLKVLELYKIDTTLCTFLKSCMGQWRTALRYPGCRQTAIHDVLIKIERGIFQGDSLSPLWFCLALNPLSTLLEGSGLGYRLQKDDQVISHLLYMDDLKLLASNKLQLTKLLKVTENFSNSIKMEFGVDKCAVMYVKKGVIVESEGIELLDSTKLRSLSATETYKYLGISQSLGIPESNMKQTLQERFFGRLKKVLKSLLSGGNKVRACSGWVMPVLMYSFGILRWTQTELDALDRKVRTLLTASRMHHPRSSVMRLYIPRKLGGRGLLNIKTLHNREVCNLREYFLHTDVGVHRNVVAVDTGFTPLALAKENWRRPVVLGVNDRREVWKGKELHGRFYRALNGSDIDLKASTTWLRHGDLFGETEGFVCAIMDEVIMTNNYWKYILKDGTVDICRACHRPGESIRHIISGCSRLANGEYLHRHNQVARIVHQQLALKYHLVNLEVPYYRYVPDPVLENGRATLYWDRSIITDRTIVANKPDIVLIDRLERRAMIVDIAVPHDENLVKVEKEKQIKYLDLSHEIVDMWNVDSVIIVPIVVSAHGLIAKSLDQHLKRLTLDGWIKGLMQKAVLLDTARIVRRFLSLES

SEQ ID NO: 30041 - protein, 1125 aa, Mythimna ferrago
MLTRSATRRARHPPTGSLLSSASPPPDPGSPVSPVTAVASSSSDEYFFPPTSPTPVRRPGRGRPPNGLGPRGQPAPSRVPAAGGCVQRMKWTQSINENVMRAYYRATEGGTNLTAYRVRMLSLFQELEPSVNVTTQRLSDQVRVIQRNHRLDDAALDRLRSEVLSNRIISTPIQTQTAAPRATDTIMPRPNYGDDEADDRVVTVSSQCNDQLRSALEDALREYRSTPIALRPRLPRLPMHKKNRALVCALDSLLENVFESSVNLVDTHSILYCGAIAACRLANVKLPSCDGATRPKPAVPAWQCRIERRIDGARALIGKLYCFREGNTRPRVMRYVRRAFSGTGVSPREYLAHVTERIDFLKQKVCAWANRIRRYKRRVDRYSQNRMFQSDERWVYRDWERPEQSVTDVLRPDVAATNEFWRSIWSVPVCHTEGGWMRDIERVCEAIPEMEKVFISPIDVARAVRPLPNWKSPGPDGLQNFWLKWYSSSHALLASQFQSSLESGSLPQFLTTGVTHLLHKTGSTAEPKNYRPITCLSTVYKLLTSILRTKINNHIENNSIMSASQNGCRNGSRGTKELLLIDMAISQQVRRSRKDLSTCWIDYKKAYDSVPHTWLMRVLELYKIDATLRTFLESCMGEWNTVLRYPGCRSIREDDEPIWIKRGIFQGDSLSPLWFCLALNPLSTLLEDSGLGYRLRRGGQVLSHLLYMDDLKLIAPNKLQLMELLKVTETFSSAIRMEFGVDKCAVMHVKRGEIMESEGIQLSDSIHLRSLSSTETYKYLGMSEALGINVTDMKQSLRERFFSRLKKVLNSLLSGGNKVRAFNGWVMPVLMYSFGILKWTQTELDALDRRVRTLLTANRMHHPRSSVMRLYIPRKCGGRGFLNAKTLHNREVCSLREYFQKTDVGMHRDVVAVDKGLTPLSMAKENWRKPVVLTTDDRREVWKNKELHGRFYRALHEPDVDFGASVAWLRFSNLFGETEGFICAIMDEVILTNNYRRYIMKDGTVDVCRACHRPGESIRHIISGCSRLANGEYLHRHNQVARIIHQQLALKYKLMESEVPYYRYVPDPVLENDHVTLYWDRSIITDRTIIANKPDIVVIDRLARRAMIVDVTIPHDENLVKAEKE

SEQ ID NO: 30042 - protein, 1080 aa, Amphipyra tragopoginis
MLSLFQVLEPAVNVSAQRLSDQVRVIQRGHMLDDTVLDRLRSEVQSSPVISPSSQVLEQQQNLAAALPRPNRADEEDDDRAANVSTQCNDELRSALEDAMREYRYTRSDLRPRIPRLPMHRKNRALVCALDSLLSNYFDGSEDLGDTHSILYCAAVAACRVAHVKFTDNERATRPKNAVPAWQCRIERRISEARALIGKLVCFREGNTRPRVMRFVRRAFSGTDVSPREYMSRVTERIDFLKQKVYAWANRIRRYRRRVDRYTQNRLFQSDERWVYRTWERPDQRVGDTRLPDNDVMNTFWRNIWSVPVAHTEGDWMQEVQRACEPIQEMGDIIISPQDVASAVRPMSNWKSPGPDGLHNFWLKWLRSSHARLASQFQSSLESGSLPQFLTTGVTHLLHKSGSTAEPKNYRPITCLPTVYKVLTSILRTKINNHIDNNSIMSASQNGCRNGSRGTKELLLIDMAISQQVRRSRKDLSTCWIDYKKAYDSVPHTWLMRVLELYKVNTTLCAFLTSCMGQWRTVLRYPGCRQIQGIGEPIRIERGIFQGDSLSPLWFCLALNPLSTLLEGSGLGYRLRRGGQVISHLLYMDDLKLFAPNNLRLLELLKVTETFSNSIRMEFGVDKCAVMHVKRGGIMESVGTQLSDSIQLRSLSSTETYKYLGMSEALGVNETDMKQSLKERFFGRLKKVFNSLLSGGNKVRAFNGWVMPVLMYSFGILKWTQTELDALDRRVRSLLTANRMHHPRSSVMRLYIPRKCGGRGFLNAKTLHNREVCSLREYFSQADVGMHRDVVAVDKGFTPLSLAKENWRKPVVLDTNGRREVWRSKELHGRFYRALHGPDVDFLASVAWLRFGDLFGETEGFVCAIMDEVMMTSNYRKYIVKDGTVDICRACHCPGESIRHIVSGCSRLANGEYLHRHNLVARIIHQQLALKYNLVDAEVPYYKYVPDPVLENGHVTLYWDRSIITDRTIVANKPDIVVIDRSERLTMIVDITVPHDENLVKAEKDKEIKYQDLAHEVVAMWDVDSAIIVPIVVTANGLIAKSLDQHLKRLSLGSWIKGLIQKAVLLDTARIVRKFLSLRP

SEQ ID NO: 30043 - protein, 1204 aa, Amphipyra tragopoginis
MITRSRAKTQSTQPPPSASSLSSASQPPEPTSTVSDVTPAAAVASSSSDEYYSPPTSPPPARRRGRGRPSACLGPRGPPASDRVPASGGSVQRMRWTQSMNENCMRAYFGATEGGTNLTAYRGRMLSLFQALEPAVNVSAQRLSDQVRVIQRDHRLDGAALDRLRSEMQSSHVVPLQSQTAVQSQVPSVVAPRSIPADEESDDRVTNVSTQSNEQLRSALELAFREYRSTLPDLRPRLPRLPMNNKNKALMCALDSLLSSYFDGSEDLADTHSILYCAAVAACRVAHVKVDNNDRATRPKPAVPAWQCRIERRIGEARALIGKLICFREGNTRPRVMRFVGRAFSGTDTSPRDYMSRVAERIDFLKQKVYAWANRIRRYKRRVERYTQNRMFQRDQRWVYRAWERPDQGVRDVHLPDDDAMNSFWRSIWSVPVSHAEGDWMRDVERVCEPILDMGAISISPQDVASAVRPLPNWKSPGPDGLHNFWLKWLRSSHARLASQFQSSLETGTLPQFLTTGVTHLLHKSGSTAEPKNYRPITCLPTVYKLLTSILRCKISSHIENNSIKSASQNGCRNGSRGTKELLLIDMAISQQVRRSRKDLSTCWIDYKKAYDSVPHTWLLRVLELYKVNATLCAFLTSCMGQWRTVLRYPGCRQIQGRGEPIRIERGIFQGDSLSPLWFCLALNPLSTLLEGSGLGYRLRRGGQVISHLLYMDDLKLFAPNNLQLMELLKVTETFSNSIRMEFGVDKCAVMHVKRGRIMESVGTELSDSIHLRSLSSTETYKYLGMSEALGINEADMKQSLRERFYGRLKKVLKSLLSGGNKVRAFNGWVMPALMYSFGILKWTQTELDALDRRVRTLLTAYRMHHPRSSVMRLYISRKCGGRGFLNAKTLHNREVCSLREYFSQADVGMHRDVVAVDKGLTPLSLAKENWRMPVVLDTNGRKDVWRSKELHGRFYRALHGPDVDFQASVAWLRFGDLFGETEGFVCAIMDEVMMTNNYRKYVVKDGTVDICRACHCPGESIRHIVSGCSRLANGEYLHRHNLVARIIHQQLALKYNLVDAEVPYYKYVPDPVLENGHVTLYWDRSIITDRTIVANKPDIVVIDRSERRAMIVDVTVPHDENLVKAENDKKIKYLDLAHEVVDMWDIDSAVIVPIVVSANGLIAKSLNQHLMRLSLGSWIKGLIQKAVLLDTARIVRKFLSLGP

SEQ ID NO: 30044 - protein, 1003 aa, Amphipyra tragopoginis
MDDRAVTVSSQYNDQLRSALEDAIREYRANPELRPRLPRLPMHNKNRALVCALDSLLSSYFESSEDLGDTHSILYCAAVAACRVANVKFNNSERATRPKPAVPVWQCRIERRIDEARALIGKLICFREGNTRPRVMRFVRRAFSGTGISPREYMSRVTERIDFLKQKVCAWASRIRRYKRRVERYTQNRMFQCDQRWLYRAWERPEQGVSDERLPDDDAMSSFWRSIWSVPVTHTEGDWMRDIERACEPIEEMGEILISPDDVASAARPLPNWKSPGPDGLHNFWIKWLRSSHARLASQFQSSLESGSLPQFLTTGVTHLLHKSGSTAEPKNYRPITCLPTVYKLLTSILRSKINTHVENNSVMSSSQNGCKNGSRGTKELLLIDMAISQQVRRSRKSLSTCWIDYKKAYDSVPHTWLMRVLELYKINTTLRTFLRSCMGQWRTVLRYPGCQLTRGSDVPIRIERGIFQGDSLSPLWFCLALNPLSTLLEGSGLGYPLRRGGQVVSHLLYMDDLKLFAPSKLQLVELLKVTETFSNSIRMEFGVDKCAVMHVRRGGIMESEGLQLSDSIHLRPLSANDTYKYLGMSEGLGISEADMKQSVRERFFGRLKKVLKSLLSGGNKVRAFNGWVMPVLMYSFGILKWTQTELDALDRRVRSLLTANRMHHPRSSVMRLYIPRKCGGQGLLNAKTLHNREVCSLREYFLHADAGMHRDVVAVDKGLTPLNLAKENWRKPVVLSTNDRREIWQSKELHGRFYRALHGPDVDFQASVSWLRFGDLFGETEGFVCAIMDEVIMTNNYRKYIVKDGTVDICRACHCPGESLRHIISGCSRLANGEYLHRHNQVARIIHQQLALKYNLVESEVPYYKYVPDPVLENGHITLYWDRSIITDRTIAANKPDIVVIDRSERRTMIVDVTIPHHENLVKAEKDKQIKYLDLAHEVVNMWDVDSATIVPIVVTANGLMAKSLDQHLKRLSLGGWIKGLIQKAVLLDTARIVRRFLSLEP

SEQ ID NO: 30045 - protein, 1202 aa, Amphipyra tragopoginis
MLTRSRARARDNQAHLPPPDSSPSSASQQQGLNPASPAAAVASSSSDEYYSPPSSPPPARRRGGTRPPVGLGLRGPLASDRVPAPGGIVPRMKWTQKMNESVMRAYYGATEGGTNLTAYRGRMLSLFQVLEPAVNVSAQRLSDQVRVIQRGHMLDDTVLDRLRSEVQSSSVISPSSQVLEQQQNLAAALPRPNRADEEDDDRAANVSTQCNDELRSALEDAMREYRYTRSDLRPRIPRLPMHRKNRALVCALDSLLSNYFDGSEDLGDTHSILYCAAVAACRVAHVKFTDNERATRPKNAVPAWQCRIERRISEARALIGKLVCFREGNTRPRVMRFVRRAFSGTDVSPREYMSRVTERIDFLKQKVYAWANRIRRYRRRVDRYTQNRLFQSDERWVYRTWERPDQRVSDTRLPDNDVMNTFWRNIWSVPVAHTEGDWMQEVQRACEPIQEMGDIIISPQDVASAVRPMSNWKSPGPDGLHNFWLKWLRSSHARLASQFQSSLESGSLPQFLTTGVTHLLHKSGSTAEPKNYRPITCLPTVYKVLTSILRTKINNHIDNNSIMSASQNGCRNGSRGTKELLLIDMAISQQVRRSRKDLSTCWIDYKKAYDSVPHTWLMRVLELYKVNTTLCAFLTSCMGQWRTVLRYPGCRQIQGIGEPIRIERGIFQGDSLSPLWFCLALNPLSTLLEGSGLGYRLKRGGQVISHLLYMDDLKLFAPNNLRLLELLKVTETFSNSIRMEFGVDKCAVMHVKRGRIMESVGTQLSDSIQLRSLSSTETYKYLGMSEALGVNETDMKQSLKERFFGRLKKVFNSLLSGGNKVRAFNGWVMPVLMYSFGILKWTQTELDALDRRVRSLLTANRMHHPRSSVMRLYIPRKCGGRGFLNAKTLHNREVCSLREYFSQADVGMHRDVVAVDKGFTPLSLAKENWRKPVVLDTNGRREVWRSKELHGRFYRALHGPDVDFLASVAWLRFGDLFGETEGFVCAIMDEVMMTNNYRKYVVKDGTVDICRACHCPGESIRHIVSGCSRLANGEYLHRHNLVARIIHQQLALKYNLVDAEVPYYKYVPDPVLENGHVTLYWDRSIITDRTIVANKPDIVVIDRSERLTMIVDITVPHDENLVKAEKDKEIKYQDLAHEVVAMWDVDSAIIVPIVVTANGLIAKSLDQHLKRLSLGSWIKGLIQRAVLLDTARIVRRFLSLRP

SEQ ID NO: 30046 - protein, 1107 aa, Autographa pulchrina
MKWTQGINENVMRAYYGATEGGTNLTAYRARMLSLFQVLEPGVSVSAQRLSDQVRVIQRNHRLDDSTLDRLRSEIQSSPATNTLPPAAAPVSGTTHTAPSDGEEDDGAMTVSTQCSELIRSTLEDAIRDYRTSPPDQRPRLPRLPMHNRNKAIMGALDSLLPIYFESSEDLRDTHSILYCAALTACRVANVAICYSNIAARPKPAVPAWQCRIEQRVAEARTLIAKLIAFKQGNSRPRVMRFVRRAFAGTDISSSEYTARVTERIDLFKQKVCAWASRIRRYKRRVERFYLNRMFQKDQRWVYRAWERPASGVDGGCLPDGDATNSFWRSIWSVPVSHYEGDWMREVEQACEPIQEMGAITISPQDVANAVRPMANWKTPGPDGLQNFWVKWLRSSHGCLASQFQSAVESASLPQFLTTGSTHLLHKTGSATDPKNYRPITCLPTVYKLLTSILRAKINEHVVSFSIMSASQNGCRSGSRGTKELLLIDTAICQQVRRSKKDLSTCWIDYKKAYDSVPHTWLMRVLELYKINATLRAFLVSCMGQWSTVLHYPGCRDIQQGGEPIRIERGIFQGDSLSPLWFCLALNPLSTLLENSRLGYSLRRGSQVISHLLYMDDLKLFANSGLQLMKLLKITESFSNSIRMEFGVDKCAVMHVKRGGVVESQGIQLSDSINLRSLSATETYKYLGMSEALGINGADVKQSLQARFFGRLNKVLKSVLSGGNKVRAFNGWVMPVLMYSFGVLKWTQTELDALDRRVRTLLTANRMHHPRSSVMRLYIPRKCGGRGFLNAKTLHNREVCNLREYFLQVDVGMHRDVVVVDKGLTPLSLGKENWHKPVVLSVKDREDVWQSKELHGRYYRTLHGPDVDFLASVAWLRFGDLFGETEGFVCAIMDEVIMTNNYRKYIIKDGTVDICRACHCPGESLRHIISGCSRLANGEYLHRHNQVARIIHQQLALRYKLVESEMPYYRYVPDPVLENGRVTLYWDRSIITDRTIVANKPDIVVIDRSERRAIIVDVTIPHDENLVKAEKEKQLKYLDLAHEVVDMWEVDSAIIVPIVVTANGIIAKSLDQHLKRLSLGAWVKGLIQKTVLLDTARIVRRFLSLEP

SEQ ID NO: 30047 - protein, 992 aa, Xestia xanthographa
MNENVMRAYYGATEGGINLTAYRGRMLSLFQVLEPGVSASAQRLSDQVRVIQRNHMLDDTVLDRLRSESRSNLVTPASPLIAVQVQNVSSAPPRSDRDGEEDDSEVISVSTQCNAQLRSALESAFREYRSTPPELRPRLPRLPMHNKNKALMCALDSQLSNCFDSSKDLTDTHSILYCGAVAACRVAHVKFPNNDGATRPKLAVPAWQCRIEWRIGEARALIGKLICFREGNTRPRVMRFVRRAFSGTDISFRDYLARVTERIDSLKQKICAWASRIRRYKRRVERYTQNRTFQSDVRWVYRAWERPDQGVTDTRLPDDSAMYSFWRNIWSVPVSHTEGDWTREVEQACDPIPEMGAIIISPQDVARAVRPLPNWKSPGPDGLHNFWIKWFQRSHARLASQFQSALESGSLPQFLTTGITHLLHKSGSAAEPKNYRPITCLPTVYKVLTSILRAKINQHIDSNSIMSASQNGCRNGSRGTKELLLIDMAISQQVRRSRKNLSTCWIDYKKAYDSVPHTWLMRVLELYKIDATLRTFLMSCMGHWRTVLRYPGCRQIQGNSEPIRIERGIFQGDSLSPLWFCLALNPLSTLLERSGLGCLLRRDGQVISHLLYMDDLKLFAPNNFQLMKLLKVTETFSSAIRMEFGVDKCAVMHVKRGEIMESEGTQLSDSIHLRSLSSTETYKYLGMSEALGINTADMKQSLRERFFGRLNKVLGSLLSGGNKVRAFNGWVMPVLMYSFGILKWTQTELDALDRRVRTLLTANRMHHPRSSVMRLYISRKCGGRGFLSAKTLHNREVYSLREYFLKAEGEMHRDVVSVDKGLTPLSLANGNWRKPKVLDTNDRKVEWQGKELHGRFYRALHGPDVDFLASVSWLRFGDLFGETEGFICAIMDEVMMTNNYRKYIVKDGTVDICRACHRPGESIRHIISGCSSLANGEYLHRHNLVARIIHQQLALKYNLVESEVPYYKYLRCIGIDLSPLTGLLLPIGLTLW

SEQ ID NO: 30048 - protein, 1192 aa, Limenitis camilla
MLTRARAKNVRSPTSPGSSDNSTSQVPEHTEEVVAVVSSSSDEYFSPPTSPSPVRRPGRGRPPRSLGPRGQPASRQVPAIDGYVQRMKWTQCINENVMRAYYGSTEGGTNLTAYRDRMLSLFQKLEPSINVSAQRLSDQVRIILRNHRLNDTVLERIRSEVHDSRVIPSSIQATLPGPSPPSPNQRDEEEDDTTITAGKKYDELLRSALEDAIREYRYTSDEIRPRLPRLPMHKKNRALVCTLDSLLPMYFESSEDLKDTHSILFCAAVAVCRVAHVKLVNTETTRPKPDVAAWQSRIERRIDETRVLIGKLYSFREGNTRPRVMRFVRRAFSGTEICPPEYMARVTERIDTLKQKIYAWANRIRRYRRRVDRYSQNRMFQKDQKWVYRTWERPDQNVDDIHRPDDDDTNKFWRSIWSVSVDHTEGDWMREIRQTREPLQAMEHISITCKDVADAVRSVPNWKSPGPDGLHNFWLKWLRSSHACLASQFQSALESGSLPQFLTTGITHLLHKSGSTTEPKNYRPITCLPTVYKLLTSILRDKIDSHITKNAIMSVSQNGCRNRSRGTKELLLIDMTISQQVRRSRKDLSTCWIDYKKAYDSVPHGWLMRVLELYKVDATLCAFLGSCMRQWRTVLRYPGCRPIQGNNEPIRIKRGIFQGDSLSPLWFCLALNPLSTLLENSGLGYRLRRGGQVISHLLYMDDLKLFVPTKLQLIELLKITKTFSNSIRMEFGVDKCAVMHVKRGKIEESEGIQLSDSVNLRSLSADETYKYLGMSEALGIIEIDMKQSVRERFLARLRKVLKSLLSGGNKVRAYNGWVMPILMYSFGILKWTQKELDDLDRKVRALLTTYRMHHPRSSVMRLYIPRKCGGRGFLNAKTLHNREVCNLREYFLQTDEGMHRDVVAMDKGLTPLSLAKENWRKPIVLSTDNRKEVWKSKELHGRFYRALHGDEVDFKASVSWLRFGNLFGETEGFVCAIMDEVIMTRNYRRYIVRDGTVDICRACHSSGESLRHIISGCPRLANGEYLHRHNQVAKIIHQQLALRYGLVESEVPYYRYAPDPVLENGHVTLHWDRTIITDRTIIANKPDIVVIDRSERCTMIVDVTIPHDGNLVKAEKDKQMKYLDLAHEIVDMWDVDSAVVVPIVVTANGLIAKSLDQHLKRLALDGWVKGLMQKAVLLDTARIVRKFLSLEP

SEQ ID NO: 30049 - protein, 962 aa, Abrostola tripartita
MHNKNKAMISALDSLLSSYFEGSEDLCDTHSILYCAAATACRVANVKCFDSSTATRPKPAVPAWQCRIESRITEARTLIGKLTAFREGNIRPRVMRFVRRAFAGVDINPREYATRATERIDFYKQKVYAWASRIRRYKRRVDRFSQNRIFNQDQRWVYRNWERSAQGVSDGHLPDDDVTNAFWRSIWSVPVNHTEGSWMLDVEQSCESIPEMGTITISPQDVASAVRPMSNWKSPGPDGLHNFWIKWLRSSHGCLASQFQSAIEVGSLPQFLTTGSTHLLHKTGSTTDPKNFRPITCLPTIYKLLTSILRAKITKHIDDNNIMSASQNGCKNGSRGTKELLLIDMTICQQVRRSKKDLSTCWIDYKKAYDSVPHTWLMRVLELYKIDTTLRTFLLSCMRQWRTVLHYPGCRDIQQDGEPIRIERGIFQGDSLSPLWFCLALNPLSTLLENSGLGYSLRRRSQVISHLLYMDDLKLFAPSRFQLIKLLKITEAFSNSIRMEFGVDKCAVMHVKRGGIIESQGIQLSDSINLRSLSATETYKYLGMSEALGINVVDMKQSLKKRFFGRLNKVLKSLLSGGNKVRAFNGWVMQTLMYSFGILKWTQTELDALDRRVRTLLTSNRMHHPRSSVMRLYIPRKCGGRGFLNAKTLHNREVCSLREYFLRAEVGMHREVVAVDKGLTPLFLAKENWCKPVVLSVNDRRDVWQSKELHGRFYKALHGPNVDLLSSVSWLRFGDLFGETEGFVCAIMDEVIMTNNYRKYILKDGTVDICRACHRPGESLRHIMSGCSRLANGEYLHRHNQVARIIHQQLALKYKLVDSEMPYYRYVPDPVLENDHITLYWDRSIITDRTIVANKPDIVVIDRLERRAMIIDITIPHDENLVKAERDKQIKYLDLAHEVVDMWEVDSAIIVPIVVSANGLMAKSLDQHLKRLTLGGWVKGLMQKAVLLDTARIVRRFLSLEP

SEQ ID NO: 30050 - protein, 1194 aa, Autographa gamma
MLTRSRARKPARPPSPDPSPSSASQLPDHVPAPAPAVASSSSDEYYSPPTSPTPVRRQGRRRPPCSLAPSGQPASNRAPAPGGDVRRMKWTLSINENVMRAYYGATEGGTNLTAYRARMLSLFQALEPGVSVSAQRLSDQVRVIQRNHRLDDSTLDRLRSEIQHSPATSTSPPVAAPVSGAPLTAPSDGEEEDGAITVSTQCNELIRSTLEDAIRVYRRSPPDQRPRLPRLPMHNRNKAIMGALDSLLPVYFESSEDLRDTHSILYCAALTACRVANVAMCHSNIATRPKPAVPAWQCRIEQRVAEARTLIAKLKAFKQGNSRPRVMRFVRRAYAGTDISPSEFIARVTERIDLFKQKVCAWANRIRRYKRRAERFHLNRMFQKDQRWVHRLWERPVSAMDGGCLPDGDATNSFWRSIWSVPVTHSEGGWMREVEQVCEPIQEMGAITISPQDVANAVRPMANWKTPGPDGLQNVWLKWLRSSHSSLASQFQSAVESASLPQFLTTGSTHLLHKTGSATDPKNYRPITCLPTVYKLLTSILRAKINEHIVNFSIMSASQNGCRSGSRGTKELLLIDTAICQQVRRSKKDLSTCWIDYKKAYDSVPHTWLMRVLELYKINTTLRAFLMSCMGQWSTVLHYPGCRDIQQGGEPIRIERGIFQGDSLSPLWFCLALNPLSTLLENSGLGYSLRRGGQVISHLLYMDDLKLFATSGFQLMELLKITESFSNSISMEFGVDKCAVMHVKRGGIVESQGIQLSDSINLRSLSATDTYKYLGMSEALGINVADVKQSLQARFFGRLNKVLKSVLSGGNRVRAFNGWVMPVLMYSFGVLKWTQTELDALDRRVRTLLTANRMHHPRSSVMRLYIPRKCGGRGFLNAKTLHNREVCNLREYFLQVDVGMHRDVVVVDKGFTPLSLGKENWHKPVVLSVKDREDVWQSKELHGRYYRTLHGPDVDFLASVAWLRFGDLFGETEGFVCAIMDEVIMTNNYRKYIIKDGTVDICRACHCPGESLRHIISGCSRLANGEYLHRHNQVARIIHQQLALRYKLVESEVPYYRYVPDPVLENGRVTLYWDRSIITDRTIVANKPDIVVIDRSERRAIIVDVTIPHDENLVKAEKEKQLKYLDLAHEVVDMWEVDSAMIVPIVVTANGIIAKSLDQHLKRLSLGTWVKGLIQKAVLLDTARIVRRFLSLES

SEQ ID NO: 30051 - protein, 1204 aa, Mesoligia furuncula
MLTRLAARRARLPPPDSSLSSAPPPPEPSPIESAVTPAVAVASSSSDEYFSPPTSPTPVRRQGRGRPPNSLGLRGHPAPSRVPATGGCVQRMRWTQSMNENVMRAYYGSTEGGINLTAYRDRMLSLFQELEPTVNVSAQRLSDQVRVIQRNHRLDDIALDRLRLEVLSNHIVTTSAQTAAQASTVDAIPPRFNHVEEEDDRVDTVSSQCNVRLRSALEDALREYRSTPTELRPRLPRLPMHKKNRALVCALDSQLKNFFESSEDLVDTHSILYCAAVAACRLANVKFPSCDGATRPKPAVPAWQRRIERRIDGARVLIGKLYCFREGNTRPRVMRFVRRAFSGTGISPREYMSCLTERIDFLKQKVCAWASRIRRYKRRVDRYTQNRMFQSDERWVYRAWERPEQNVTDVCRPDDAATSAFWCSIWSVPVCHTEAGWMQDVERVCESIPQMEKVLITPSDVARAVRPLPNWKSPGPDGLHNFWLKWLISSHTCLASQFQSSLESGSLPQFLTTGVTHLLHKSGSPAEPKNYRPITCLSTVYKLLTSILRAKINTHIESNSIMSASQNGCRNGSRGTKELLLIDMAISQQVRRSRKDLSTCWIDYKKAYDSVPHTWLMRVLELYKIDATLRTFLESCMGQWKTVFRYPGCRQIQGNDEPVWIKRGIFQGDSLSPLWFCLALNPLSTLLEDSGLGYRLRRGGQVISHLLYMDDLKLFAPNKLRLMELLKVTETFSSAIRMQFGVDKCAVMHVKRGEIMESEGIQLSDSISLRSLSSSESYKYLGMSEALGINDADMKQSLKERFFCRLKKVLISLLSGGNKVRAFNGWVMPVLMYSFGILKWTQTELDALDRRVRTLLTANRMHHPRSSVMRLYIPRKCGGRGFLNAKTLHNREVCSLREYFLKAEVGMHRDVVAVDKGLTPLSMAKENWRKPVVLSTDDRKKVWQSKELHGRFYRALHEPGVDFIASVSWLRFGDLFGETEGFVCAIMDEVILTNNYRRHIMKDGTVDVCRACHRPGESIRHIISGCSRLANGEYLHRHNQVARIIHQQLALKYKLVDSEVPYYKYVPDQPDPVLENDHVTLYWDRSIITDRTIVANKPDIVVIDRLARRTMIVDVTIPHDGNLVKAEKEKEIKYQDLAHEVVDMWNVSSAIIVPIVVSANGLMAESLDQHLSRLSLGGWIKGLIQKVVLLDTARIVRRFLSLEP

SEQ ID NO: 30052 - protein, 962 aa, Griposia aprilina
MHKKNRALVCALDSQLKNVFESSENLIDTHSILYCAAVAACRLANVRFPNCDGATRPKPAVPAWQCRIKRRIDGARVLIGKLHCFREGNNRPRVMRFVRRAFSGTGISPREYMSHATERIDFLKQKVCTWASRIRRYKRRVDRYTQNRMFQSDERWVYRAWERPEQNVTDECRPDDATTSTFWRSIWSVPVCHVEADWMRDVGRACETVPEMDAVLITPLDVARAVRPLPNWKSPGPDGLHNFWLKWLISSHACLASQYQSSLESGSLPQFLTTGVTHLLHKSGSPTDPKNYRPITCLSTVYKLLTSILRAKINTHIESNSIMSASQNGCRNGSRGTKELLLIDMAISQQVRRSRRDLSTCWIDYKKAYDSVPHTWLMRVLELYKIDTTLRTFLRSCMGQWRTVLRYPGCRQIQANDEPVWIKRGIFQGDSLSPLWFCLALNPLSTLLEDSGLGYRLRKDGQVISHLLYMDDLKLFAPNKLQLMELLKVTETFSSTIRMEFGVDKCAVMHVKRGEVMEPEGIQLSDSIHLRSLSSSESYKYLGMSEALGINVADMKQSLRERFFGRLKKVLISLLSGGNKVRAFNGWVMPVLMYSFGILKWTQTELDALDRRVRTLLTANRMHHPRSSVMRLYIPQKCGGRGFLNAKTLHNREVCSLREYFLKAEVGMHRDVVAVDKGFTPLSMAKENWRKPVVLTTDDRKEVWQSKELHGRFYRALHEPGVDFLASVSWLRFGDLFEETEGFVCAIMDEVILTNNYRRHIMKDGTVDMCRACHRPGESIRHIVSGCSRLANGEYLHRHNQVARIIHQQLALKYKLVDSEVPYYKYVPDPVLENDHITLYWDRSIITDRTIVVNKPDIVVIDRLARRTMIIDITIPHDENLVKAEKEKQIKYLDLAHEVVEMWNVSSAVIVPIVVSANGLMAKSLDQHLSRLSLDGWVKGLIQKAVLLDTARIVRRFLSLEP

SEQ ID NO: 30053 - protein, 1127 aa, Omphaloscelis lunosa
MLTRLAARRARLPPPDSPLSSASSPPVRSPTVNAVMIPAAAVASSSSDEYFSPPTTPPPARRRGRRRPPDGLGPRGPPASDRVPAPGGSVQRMRWTRSINENVIRSYYGATEGGNNLTAYRVRMLSLFQVLEPAVNVSAQRLSDQVRVIQRNHMLDDTVLDRLRSEMQSSHVIAPPLRSVIIPSQMSSVITSQADERIDDRATNVSTQCNEDLRSALEGAIQEYRFMSPELRPRLPRLPMHNKNKALVAVLDSQLSNYFDDCEDLTETHSILYCAAVAVCRVAHLKFSNDSRATRPKPAAPAWQCRIERRIGGARTLIGKLICFREGNTRPRVMRFVRRAFLGTDISPQNYMTRVTERIDFLKQKVYAWANRIRRYKRRVERYTQNRTFQSDERWVYRAWERPDQGVADTHLPDDDAMCSFWRRIWSVPVSHTEGDWTREVERACDPIPEMGAITICPQDVARAVRPLPNWKSPGPDGLHNFWIKWFVRSHARLAAQYQTALESGSLPQFLTTGVTHLLHKSGSTAEPKNYRPITCLPTVYKVLTSILRANINKHIDTNSIMSASPNGCRNGSRGTKELLLIDMAISQQVRRSRKDLSTCWIDYKKTYDSVPHTWLMRVLELYKVHTTLRTFLMSCMGQWKTVLRYPGCRNIQRNSEPIRIERGIFQGDSLSPLWFCLALNPLSTLLEDSGLGYRLRRGGQVISHLLYMDDLKLFAPNNLQLMELLKVTETFSSAIRMEFGVDKCAVMHVKRGEIMESVGTQLSDSINLRALSASETYKYLGMSEALGINVTDMKQSLKERFFGRLKKVLNSLLSGGNKVRAFNGWVMPVLMYSFGILKWTQTELDALDRRVRTLLTAYRMHHPRSSVMRLYIPRKCGGRGFLNAKTLHNREICSLREYFLGFDVGMHRDVVVVDKGLTPLSLAKENWRKPVVLDTKDRMEIWQSKELHGRYFRALHGPDVDLPASVTWLRFGDLFGETEGFVCAIMDEVMMTNNYRRFIVKDGTVDIFRACHRPGESIRHIISGCSRLANEEYLHRHNLVARIIHQQLALKYSLVESEVPYYRYVPDPVLENGNITLYWDRSIITDRTIAANKPDIVVVDRGERRTMIIDITVPHDENLVKAEKDK

SEQ ID NO: 30054 - protein, 1110 aa, Busseola fusca
MKWTQSMNENVMRAYYGATEGGINLTAYRERMLSLFQELEPTVNVSAQRLSDQVRVIQRNHRLDDIALDRLRSEVLRNQIPPILIQTAAQVSTVDAIPPRSNHVEEEDDRVDTVSSQCNVRLRSALEDAFREYRSTPTDLRPRLPRLPMHKKNRALVCALDSQLKNFFESSEDLIDTHSILYCAAVAACRLANVKFPNCDGATRPKPAVPAWQHRIERRIDGARVLIGKLYCFREGNTRPRVMRFVRQAFSGTGISPREYISRVTERIDFLKQKVCAWASRIRRYKRRVDRYTQNRMFQSDERWVYRAWERPEQSETDVCRPDDATTSAFWRSIWSVPVSHTEGGWIQNVERVCETIPEMDPIVITPLDVARAVRPLPNWKSPGPDGLHNFWLKWLISSHTCLASQFQSSLESGSLPQFLTTGVTHLLYKSGSPAEPKNYRPITCLSTVYKLLTSILRAKINTHIASYSIISTSQNGCRSGSRGTKELLLIDMAISQQVRRSRKDLSTCWIDYKKAYDSVPHTWLMRVLELYKINATLRTFLESCMRQWKTVLRYPGGRQTQGNDEPVWIKRGIFQGDSLSPLWFCLALNPLSTLLEDSGLGYRLRRGGQVISHLLYMDDLKLFAPNKLHLTELLKVTETFSNAIRMEFGVDKCAVMHVKRGEIMEPEGISLSDSIHLRSLSSFESYKYLGMSEALGINDADMKQSLKERFFCRLKKVLNSLLSGGNKVRAFNGWVMPVLMYSFGILKWTQTELDALDRRVRTLLTANRMHHPRSSVMRLYIPRKCGGRGFLNAKTLHNREVCSLREYFLKTEVGMHRDVVAVDKGLTPLSMAKENWHKPTILTTDDRKKVWQSKELHGRFYRALHEPGVDFLASVSWLRFGDLFGETEGFVCAIMDEVILTNNYRRYIMKDGTVDVCRACHHPGESIRHIISGCSRLANGEYLHRHNQVARIIHQQLALKYKLVDFEVPYYRYVPDPVLENDHVTLYWDRSIITDRTIVANKPDIVVIDRLARRTMIVDVTIPHDGNLVKAEKEKQIKYLDLAHEVVDMWNVSSAVIVPIVVSANGLIAKSLDQHLSRLALGGWIKGLIQKAVLLDTARIVRRFLSLEP

SEQ ID NO: 30055 - protein, 937 aa, Ephestia elutella
MLHLRPLLCRATRTGRRRRRRRDHLCDGTVDDVPAQNDCGNTNVSTQNNEQLRSALDDAIHLYRSVPASHRPRLPRLPMHKKNIFLMGALNRLLDSYLESSQDLADTHSILYCAAIAACRVAQVKFPDSNRSPRQVTETPAWQLRIERRITTARTLIAKLICFRSGNNRPRVMRFVTQAFVGTNIQPRDYMLWVTERIDFLKQKIYAWANRIRRFRERVDRYRQNRIFQCDQRKVYREWESPANSVVDRQLPSDQNIIHFWQSIWSVPVDHTEDAWIDVVGGACDSMDTMEPVIISADDVSCAIRSAHNWKTPGPDGLHNFWLKWFHRSHAVLAKQFQNSIEAGSLPAFMTTGITFLLYKNGSTTEAKNYRPITCLPTLYKLLTSILTSKINQHVDNNNIMAIVQNGCRAGSRGTKELLLIDKTICQQVRRNRKNLSVAWIDYKKAYDSVPHSWLRRVLELYKLDTTLCTFLNTCMGQWTTVLCRPGGGVSSCLTDPIRIQRGIFQGDSLSPLWFCLALNPLSTLLKDSGLGIRLRRGGEIISHLLYMDDLKLFAPKKPDLLKMLKITENFSTSIGMEFGVDKCAVMHVERGRVVNSDGLQLSEMMTLRSLSEVETYKYLGMPESLGISDGDIKQSVRERFFGRLKKVLKSVLSGGNKVRAFNGWVMPLLIYTFGILKWTQTELDALDIKVRKLLTTYRMYHPRSSVMRLYIPRKCGGRGFLNAKNLHNREVCNLREYFLSRESGLHRDVVTVDSGFTPLSMANRNWRKPQVLTTQSRIDVWKSKELHGRFYRVLHGPDVDLLASVAWLRFGDLFGETEGFACAIMDEVIKTNNYRKYILKDGTVDICRACHRPGESLRHIVSGCSHLANGEYLHRHNQVARIIHQQLALKYGLVGSEVPYYKYAPAPVLENGHVTLYWDRSIITDRTIVANRPDIV

SEQ ID NO: 30056 - protein, 1200 aa, Arctia plantaginis
MLTRARSRALTTSPDSSLRSVLPSPEATTEVPAVAEASSSTSSDEFFSPPTSPTPVRWQGRGRPPTSLGSRGLLTSNRVPATGGDVRRMKWTKSINENVMRAYYRATEVGTNLTAYRVRLVSLFQELEPAVNVSAQRLSDQVRAIQRCHLLDDAVLERIRSDIRNSLIIPSSSHTVDSVANSTPQFASYTDDIDELVESEVISVSTQYNDRIRSALEDAILEYRYLNCNDRPRLFRLPIHKRNLALVGALDSLLPEYLDNSEDLSDTHSILYCAAIAVCRVAGVKIANNVTTTRPKSTVPAWQYRIERRITETRTLIGKLISYRSGNMRPRVMRFVKQAFLGTTISPQQYMSCVTERIDFLKQKIYAWANRIRRYKKRIDRYNQNRMFQRNEKWVYRKWEEPDPCVGDRHLPDENVTNTFWRNIWSVPVTHIEGDWLQDVRRSCESITPMEPVKIDKDDVSCAVRSLPNWKSPGPDGLHNFWLKWFRSSHARLASQFQAALDSGSLPQFLTTGITHLLYKSGSVMDPKNFRPITCLPTMYKLLTSILRLKITLHINNNSIMSVSQNGCRSGTRGTKDLLIIDMTISQQVRRNRKSLATCWIDYKKAYDSVPHTWLLKVLELYKIDTTLCTFLKSCMGQWRTALRYPGCRQTAIHDVLIKIERGIFQGDSLSPLWFCLALNPLSTLLEGSGLGYRLQKDDQVISHLLYMDDLKLLASNKLQLTKLLKVTENFSNSIKMEFGVDKCAVMYVKKGVIVESEGIELLDSTKLRSLSATETYKYLGISQSLGIPESNMKQTLQERFFGRLKKVLKSLLSGGNKVRACNGWVMPVLMYSFGILRWTQTELDALDRKVRTLLTASRMHHPRSSVMRLYIPRKLGGRGLLNIKTLHNREVCNLREYFLHTDVGVHRNVVAVDTGFTPLALAKENWRRPVVLGVNDRREVWKGKELHGRFYRALNGSDIDLKASTTWLRHGDLFGETEGFVCAIMDEVIMTNNYRKYILKDGTVDICRACHRPGESIRHIISGCSRLANGEYLHRHNQVARIVHQQLALKYHLVNLEVPYYRYVPDPVLENGRATLYWDRSIITDRTIVANKPDIVLIDRLERRAMIVDIAVPHDENLVKVEKEKQIKYLDLSHEIVDMWNVDSVIIVPIVVSAHGLIAKSLDQHLKRLTLDGWIKGLMQKAVLLDTARIVRRFLSLES

SEQ ID NO: 30057 - protein, 1200 aa, Arctia plantaginis
MLTRARSRALTTSPDSSLRSVLPSPEATTEVPAVAEASSSTSSDEFFSPPTSPTPVRRQGRGRPPTSLGSRGLLTSNRVPATGGDVRRMKWTKSINENVMRAYYRATEVGTNLTAYRVRLVSLFQELEPAVNVSAQRLSDQVRAIQRCHLLDDAVLERIRSDIRNSLIIPSSSHTVDSVANSTPQLASYTDDIDELVESEVISVSTQYNDRIRSALEDAILEYRYLNCNDRPRLFRLPIHKRNLALVGALDSLLPEYLDNSEDLSDTHSILYCAAIAACRVAGVKIANNVTTTRPKSTVPAWQYRIERRITETRTLIGKLISYRSGNMRPRVMRFVKQAFLGTTISPQQYMSCVTERIDFLKQKIYAWANRIRRYKKRIDRYNQNRMFQRNEKWVYRKWEEPDPCVGDRHLPDENVTNTFWRNIWSVPVTHIEGDWLQDVRRSCESITPMEPVKIDKDDVSCAVRSLPNWKSPGPDGLHNFWLKWFRSSHARLASQFQAALDSGSLPQFLTTGITHLLYKSGSVMDPKNFRPITCLPTMYKLLTSILRLKITLHINNNSIMSVSQNGCRSGTRGTKDLLIIDMTISQQVRCNRKSLATCWIDYKKAYDSVPHTWLLKVLELYKIDTTLCTFLKSCMGQWRTALRYPGCRQTAIHDVLIKIERGIFQGDSLSPLWFCLALNPLSTLLEGSGLGYRLQKDDQVISHLLYMDDLKLLACNKLQLTKLLKVTENFSNSIKMEFGVDKCAVMYVKKGVIVESEGIELLDSTKLRSLSATETYKYLGISQSLGIPESNMKQTLQERFFGRLKKVLKSLLSGGNKVRACNGWVMPVLMYSFGILRWTQTELDALDRKVRTLLTASRMHHPRSSVMRLYIPRKLGGRGLLNIKTLHNREVCNLREYFLHTDVGVHRNVVAVDTGFTPLALAKENWRRPVVLGVNDRREVWKGKELHGRFYRALNGSDIDLKASTTWLRHGDLFGETEGFVCAIMDEVIMTNNYRKYILKDGTVDICRACHRPGESIRHIISGCSRLANGEYLHRHNQVARIVHQQLALKYHLVNLEVPYYRYVPDPVLENGRATLYWDRSIITDRTIVANKPDIVLIDRLERRAMIVDIAVPHDENLMKVEKEKQIKYLDLSHEIVDMWNVDSVIIVPIVVSAHGLIAKSLDQHLKRLTLDGWIKGLMQKAVLLDTARIVRRFLSLES

SEQ ID NO: 30058 - protein, 868 aa, Amphipyra berbera
MRFVRRAFSGTGISPREYTSRATERIDFLKQKVCAWASRIRRYKRRVERYTQNRMFQCDQRWVYRAWERPDQSVSGGRLPDDDAMSSFWRSIWSVPVIHTEGDWMRDIERTCESIEEMGEIVISPQDVAGAVRPLPNWKSPGPDGLHNFWIKWLRSSHARLASQFQSSLESGSLPQFLTTGVTHLLHKSGSTAEPKNYRPITCLPTVYKLLTSILRSKINTHIGNNSVLSSSQNGCRNGSRGTKELLLIDTAISQQVRRSQKSLSTCWIDYKKAYDSVPHTWLMRVLELYKINTTLRTFLRSCMGQWRTVLRYPGCQPIRGSGEPIRIERGIFQGDSLSPLWFCLALNPLSTLLEGSGLGYPLRRGGQVVSHLLYMDDLKLFAPTKLQLVDLLKVTETFSNSIRMEFGVDKCAVMHVRRGRIMESEGLQLSDSIHLSPLSTNDTYKYLGMSEGLGISEADMKQSLRERFFGRLKKVLKSLLSGGNKVRAFNGWVMPVLMYSFGILKWTQTELDALDRRVRTLLTANRMHHPRSSVMRLYIPRKCGGRGLLNAKTLHNREVCSLREFFLHADAGMHRDVVAVDKGLTPLSLARENWRKPVVLSTNDRREIWQSKELHGRFYRALHGPDVDFLASVSWLRFGDLFGETEGFVCAIMDEVIMTNNYRKYIVKDGTVDICRACHCPGESLRHIISGCSRLANGEYLHRHNQVARIIHQQLALKYNLVKSEVPYYRYVPDPVLENGRITLYWDRSIITDRTIVANKPDIVVIDRSERRTMIVDVTIPHDGNLVKAEKDKQIKYLDLAHEVVNMWDVESATIVPIVVTANGLIAKSLDQHLMRFSLGSWIKGLIQKAVLLDTARIVRKFLSLQP

SEQ ID NO: 30059 - protein, 1199 aa, Mythimna ferrago
MLTRTAARRARHPPPGSSLSSASPPPDPGSPVSPAAAVASSSSDEYFSPPTSPTPVRRPGRGRPPKSMGPRGQAAPSRVPAAGGCVQRMRWTQSMNENVMRAYYGSTEGGTNLTAYRERMLSLFQVLEPTVNVSSQRLSDQVRVIQRNHRLDDAALDRLRSEILSNQIVSTSTQTQTAATPTTNAISPRSDHNNDDADDRVVTVSSQCNERLRSALEDALCEYMSTPTELRPRLPRLPMHKKNRALVCALDSLLKNIFESSENLVDTHSILYCGAVAACRLAKIKFPNIDGTIRPKTAVPAWQCRIERRIDEARVLIGKLHCFREGNTRPRVMRFVRRAFLGTGISPQGYMSRVTERIDFLKQKVCAWASRIRRYKRRVDRYSQNRMFQSDERWVYRAWERPEHSVIDECRPDDLATITFWRNIWSVPVSHTEGGWMRDVERVCEAIPEMEKVTITPEDVAKAVRPLPNWKSPGPDGLQNFWLKWYSSSHAPLASQFQSILESGSLPEYLTTGVTHLLHKTGNPVDPKNYRPITCLSTVYKLLTSILRAKINIHIENQIISPSQNGCRNGSRGTKELLLIDMAISQQTRRSRKDLSTCWIDYKKAYDSVPHTWLMRVLELYKIDITLRTFLESCMRQWKTVLRYPGCRPIQGNDEPIWIKRGIFQGDSLSPLWFCLALNPLSTLLEDSGLGYRLRRGGQVISHLLYMDDLKLFAPSNLQLMELLKVTETFSSAIRMEFGVGKCAGMHVKRGEIMESEGIQLPDSIHLRSLSSTETYRYLGMSEALGINNADMKQSLKERFFGRLKKVLNSLLSGGNKVRAFNGWVMPVLMYSFGILKWTQTELDALDRRVRTLLTANRMHHPRSSVMRLYIPRKCGGRGFLNAKTLHNREVCSLREYFLKTDVGMHRDVVAVDKGLTPLSMAKEDWHKPVIMTTDNRKEIWKGKELHGRFFRALHEPDVDFLASVAWLRFSDLFGETEGFVCAIMDEVILTNNYRRYIMKDGTVDVCRACHRPGESIRHIISGCSRLANGEYLHRHNQVARIIHQQLALKYNLVDLEVPYYKYVPDPVLENDHVTLYWDRSIITDRTIVANKPDIVVIDRLARRAMIVDITIPHDENLVKAEKEKQIKYLDLAHEIVAMWNVDSAVIVPIVVTANGLIAKSFDDHLSKLSLRGWIKGQIQKAVLLDTARIVRKFLSLEP

SEQ ID NO: 30060 - protein, 1004 aa, Mythimna ferrago
MRWTQSINENVMRSYFGATEEGTNLTAYRGRMLSLFQVLEPAVNVSAQRLSDQVRVIQRNRMLDDAVLDRLRLESRNGRVSPMSPPDAVQRQPSVSPRPDHVGEDDDDGAISVSTQCNARLRSALEDAFREYRSIPPELRPRLPRLPMHGKNRALVCALDSQLSNCFDSSEDLTDTHSILYCAAAAACRVAHVKIPNNDRATRPAKPAWQCRIERRIGEARALIGKLICFREGNTRPRVMRFVRRAFSGTDISPRDYLPRITERIDFLKQKVYAWANRIRRYKRRVERYTQNHTFQSKERWVYRAWERPDQSVIDTRLPDDDAMYSFWRSIWSVPVNHTESDWTREIERVCELVPEMGAINISPQDVARVVRPLPNWKSPGPDGLHNFWLKWFQSSHARLAFQFQSALESGSLPQFLTTGITHLLHKSGSTAEPKNYRPITCLPTVYKVLTSILRAKINNHIETNSIMSASQNGCRNGSRGTKELLLIDVAISQQVRRSRRDLSTCWIDYKKAYDSVPHTWLMRVLELYKVDATLRAFLMSCMGQWRTVLHYPGCRRVSENSEPLRIERGIFQGDSLSPLWFCLALNPLSTLLEGSGLGYRLRREGQVISHLLYMDDLKLFASNNLQLMELLKVTETFSSAIRMEFGLDKCAVMHVKRGEIMESVGTQRSDSIHLRSLCSTETYKYLGMSEALGINAADVKQSLRERFFGRLNKVLNSLLSGGNKVRAFNGWVMPVLMYSFGILKWTQTELDALDRRVRTLLTANRMHHPRSSVMRLYIPRKCGGRGFLNAKTLHNREVCSLREYFLETDVGMHRDVVAVDKGLTPLSLANENWRKPIVMDTNERKEVWKGKELHGRFYRALHGPDVDLLASVSWLRFGDLFGETEGFVFAIMDEVMMTNNYRKYIVKDGTVDICRACHWPGESIRHIISGCSHLANGDYLHRHNLVARIIHQQLALKYNLVESEVPYYRYVPDPVLENGSVTLYWDRSIITDRTITGYYFLYF

SEQ ID NO: 30061 - protein, 1017 aa, Mythimna ferrago
MRWTSSINENVMRSYFGATEGGINLTAYRGRMLSLFQVLEPAVNVSVQRLSDQVRVIQRNRMLDDAVLDRLRLESQSSRVSAATPSAAAQRQPSAAPRPDHVGDADDDAAISVSTQCNERLRGALEDAFREYRSIPPELRPRLPRLPMHKRNRALVCALDSQLSICFDSSEDLADTHSILYCAAVAACRVAHVKFPNCNRATRPAVPAWQCRIERRIGEARALIGKLICFRESNTRPRVMRFVRRAFSGTDISPRDYLPCVTERIDFLKQKIYAWANRIRRYKRRVERYTQNRTFQSNERWVYRAWERPDQGVTDTRLPDDDAMCSFWRSIWSAPVSHTEGDWIREVERACDLLPEMGAITISPQDVARAVRPLPNWKSPGPDGLHNFWLKWFQGSHARLASQFQSALESGSLPQFLTTGITHLLHKSGSTAEPKNYRPIRCLPTVYKVLTSILRAKINSHIETNSIMSVSQNGCRNGSRGTKELLLIDIAISQQVRRSRKNLSACWIDYKKAYDSVPHTWLMRVLELYKVDATLRTFLMSCMGKWRTVLHYPGCRQIWENSEPIRIERGIFQGDSLSPLWFCLALNPLSTLLEGSGLGYRLKRGGQVISHLLYMDDLKLFAPNNLQLMELLKVTETFSSAIRMDFGVDECAVIHVKRGEIMESEGIQLSDSIHLRSLSSTETYKYLGMSEALGINTDDVKQSLKERFFGRLNKVLNSLLSGGNKVRSFNGWVMPVLMYSFGILKWTQTELDALDRRVRTLLTANRMHHPRSSVMRLYIPRKCWGRGFLNAKSLHNREVCSLREYFLAVDVGMHRDVVAVDKGLTPLSLANENWRKPLVLDTNDRREVWQGKELHGRFYRALHGPDVDLLASVSWLRFGDLFGETEGFVFAIMDEVMMTNNYRKYIVKDGTVDICRACHRLGESIRHIISGCSRLANGDYLHRHNLVARIIHQQLALKYNLVESEVSYYRYVPDPVLDNGSITLYWDRSIITDRTIVANKPDIVVIDRLERRTMMLI

SEQ ID NO: 30062 - protein, 1107 aa, Eilema sororculum
MECESLNGRSASFSNRHIIPRRKPYYSIIIIINNVIMFAATGGGANLTAYRDRMLILFQDLEPTVNVSAQRLSDQVRAIQRCHLLDSSVLERLRSDLQNNDITPSPPQAVMQVVPQETQPVQTDCELDNVATSVSTQYIEQIRNALECAVRDYRSMNYQIRPRLPRLPVHKRNIALVCALDSLLPNYLDNCEHLGDTHSILYCAAYAACRVAGVKFPECNTAIRPKSGKPRWQCRIERRIAETRALIGKLICFRSGNTRPRVMRFVNRVFSGTGDSPFDYTSRITERIDFLKQKVYAWANRIKRYKKRCDRYSLNRTFQRDERWVYRNWERADSVGDEHFPDVAATNTFWRSNWSVPVAHTEGDWVRKVKRSCEAIETMEPVIISEDDIACVVRSLPNWKAAGPDGLHNFWLKWLRSSHARLAFQFQSALESGSLPSFMTTGITHLLFKSGCAMNPKNYRPITCLPTVYKLLTSVLRVKIASHITRNSILSCSQNGCRSGARGTKELLIIDTAVNQQVRRNRRDMATCWIDYKKAYDSVPHTWLLRVLELYKVDTTLCTFLEACMGQWSTALRYPGCRHIPDDGELIKIERGIFQGDSLSPLWFCLALNPLSTILEDSGLGYCLRRGSQVISHLLYMDDLKLFAPNNRQLMELLKVTETFSTSIRMEFGVDKCAVMHVKKGEIVESEGIELSDSTKLRSLSVNDTYKYLGISQALGVNESDMKQSLRERFFCRLKKVLKSLLSGGNKVRAYNDWVIPVLTYSFGILRWTQTELEALDRRVRTLLTAYRMHHPRSSVMRLYIPRKFGGRGFLNITTLHNREICNLREYFLKVNVDVHRDVVAVGRGLTPLALAKENWRKPAILSINDRKEVWKSKELHGRFHRALYGPDVDLKASVSWLRIGDLFGETEGFVCAITDEVVMTNNYRRYILKDGTVDICRACHRPGESLRHIISGCSRLANGEYLHRHNQVARIVHQQLALKYKLVDSEVPYYRYVPDPVLDDGRVTLYWDRSVITDRTIVANKPDIVVIDRLERRAIIIDVTIPHDENLVKAEKDKQIKYLDLAHEVVDMWNVDSAIIVPIVVSVHGLIAKSLDQHLKRLALEVGSRA

SEQ ID NO: 30063 - protein, 1203 aa, Eupsilia transversa
MLTRSAVRRARLPPPDSPLSSASPPPVPSPIVSAVSTPAAVVASSSSDEYFSPPTSPTPVRRQGRGRPPKSLGLRGQPAPSRVPAAGGCVQRMRWTQSMNENVMRAYYGSTEGGINLTAYRVRMLSLFQELEPTVNVSAQRLSDQVRVIQRNHRLDDAELDRLRSEVLSNHIIPSPAQTAELATPSNVIPPRSNRGLEQEDDRVATVSSQCNDRLRNALEDAFREYRYTPTELRPRLPRLPMHKKNRALVCALDSQLKNFFESSEDLIDTHSILYCAAVAACRLANVKFPNCDAATRPKPAVPAWQCRIERRIDGARVLIGKLYCFREGNTRPRVMRFVRRAFSGTGISPQEYMSRVTERIDFLKQKVCAWASRIRRYKRRVDRYTQNRMFQSDERWVYRAWERPEQNVADVCRPDDAATSAFWRSIWSVPVCHAEAGWMHGVERVCEAIPEMEAVIITPLDVARAVRPLPNWKSPGPDGLHNFWLKWLISSHTRLASQFQSSLESGSLPQFLTTGVTHLLHKSGSPAEPKNYRPITCLSTVYKLLTSILRAKINSHIDSHSIMSASQNGCRNGSRGTKELLLIDMAISQQVRRSRKDLSTCWIDYKKAYDSVPHTWLMRVLELYKIDATLRTFLMSCMGQWRTVLRYPGCRQIQGNDEPVWIKRGIFQGDSLSPLWFCLALNPLSTLLEESGLGYRLRRGGQVISHLLYMDDLKLFAHNKLRLMELLKVTETFSSAIRMEFGVDKCAVMHVKRGEIMESEGTQLSDSIHLRSLSSTESYKYLGMSEALGINVADMKQALKERFFGRLKKVLISLLSGGNKVRAFNGWVMPVLMYSFGILKWTQTELDALDRRVRTLLTANRMHHPRSSVMRLYIPRKCGGRGFLNAKTLHNREVCSLREYFLKTEEGMHRDVVAVDKGLTPLSMAKENWRKPVVLTTDDRKEVWQSKELHGRFYRVLHEPGVDFLASVSWLRFGDLFGETEGFVCAIMDEVILTNNYRRHIMKDGTVDVCRACHRPGESIRHIISGCSRLANGEYLHRHNQVARIIHQQLALKYKLADSEVPYYKYVPDPVLENDHVTLYWDRSIITDRTIVANKPDIVVIDRLARRAMIVDVTIPHDENLVKAEKEKQIKYLDLAHEVVDMWNVSSAIIVPIVVTANGLMAESLDQHLLRLSLGGWIKGLIQKAVLLDTARIVRRFLSLQP

SEQ ID NO: 30064 - protein, 1202 aa, Amphipyra tragopoginis
MLTRSRARARDNQAHLPPPDSSPSSASQQQGLNPASPAAAVASSSSDEYYSPPSSPPPARRRGGTRPPVGLGLRGPLASDRVPAPGGIVPRMKWTQKMNESVMRAYYGATEGGTNLTAYRSRMLSLFQVLEPAVNVSAQRLSDQVRVIQRGHMLDDTVLDRLRSEVQSSPVISPSSQVLEQQQNLAAALPRPNRADEEDDDRAANVSTQCNDELRSALEDAMREYRYTRSDLRPRIPRLPMHRKNRALVCALDSLLSNYFDGSEDLGDTHSILYCAAVAACRVAHVKFTDNERATRPKNAVPAWQCRIERRISEARALIGKLVCFREGNTRPRVMRFVRRAFSGTDVSPREYMSRVTERIDFLKQKVYAWANRIRRYRRRVDRYTQNRLFQSDERWVYRTWERPDQRVGDTRLPDNDVMNTFWRNIWSVPVAHIEGDWMQEVQRACEPIQEMGDIIISPQDVASAVRPMSNWKSPGPDGLHNFWLKWLRSSHARLASQFQSSLESGSLPQFLTTGVTHLLHKSGSTAEPKNYRPITCLPTVYKVLTSILRTKINNHIDNNSIMSASQNGCRNGSRGTKELLLIDMAISQQVRRSRKDLSTCWIDYKKAYDSVPHTWLMRVLELFKVNTTLCAFLTSCMGQWRTVLRYPGCRQIQGIGEPIRIERGIFQGDSLSPLWFCLALNPLSTLLEGSGLGYRLRRGGQVISHLLYMDDLKLFAPNNLRLLELLKVTETFSNSIRMEFGVDKCAVMHVKRGRIMESVGTQLSDSIQLRSLSSTETYKYLGMSEALGVNETDMKQSLKERFFGRLKKVFNSLLSGGNKVRAFNGWVMPVLMYSFGILKWTQTELDALDRRVRSLLTANRMHHPRSSVMRLYIPRKCGGRGFLNAKTLHNREVCSLREYFSQADVGMHRDVVAVDKGFTPLSLAKENWRKPVVLDTNGRREVWRSKELHGRFYRALHGPDVDFLASVAWLRFGDLFGETEGFVCAIMDEVMMTNNYRKYIVRDGTVDICRACHCPGESIRHIVSGCSRLANGEYLHRHNLVARIIHQQLALKYNLVDAEVPYYKYVPDPVLENGHVTLYWDRSIITDRTIVANKPDIVVIDRSERLTMIVDITVPHDENLVKAEKDKEIKYQDLAHEVVAMWDVDSAIIVPIVVTANGLIAKSLDQHLKRLSLGSWIKGLIQKAVLLDTARIVRKFLSLRP

SEQ ID NO: 30065 - protein, 1050 aa, Amphipyra tragopoginis
MLDDTVFDRIRSEVQNSPVISPSPQVLEQSQNLAATLPRPNRADEEDDDRATNVSTQCNEELRSALEDAMREYRFIRPDLRPRIPRLPMHRKNRALVCALDSLLSNYFDGSEDLSDTHSILYCAAVAACRVAHIKFTDNERATRPKNAVPAWQCRIERRIAEARALIGKLVCFREGNSRPRVMRFVRRAFSGTDVSPREYMSRVTERIDFLKQKVYAWASRIRRYRRRVDRYTQNRLFQSDERWVYRTWERPDQRVGDTRLPDDDVMNAFWRNIWSVPVTHTEGDWMQEVQRACEPIQEMGDIIISPQDVASAVRPMSNWKSPGPDGLHNFWLKWLRSSHARLASQFQSSLESGSLPQFLTTGVTHLLHKSGSTAEPKNYRPITCLPTVYKVLTSILRAKINNHIENNSIMSASQNGCRNGSRGTKELLLIDMAISQQVRRSRKDLSTCWIDYKKAYDSVPHTWLMRVLELYKVNTTLCAFLTSCMGQWRTVLHYPGCRQIQGMGEPIRIERGIFQGDSLSPLWFCLALNPLSTLLEGSGLGYRLRRGGQVISHLLYMDDLKLFAPNNLRLLELLKVTETFSNSIRMEFGVDKCAVMHVKRGRIMESVGTQLSDSVHLRSLSSTETYKYLGMSEALGINETDMKQSLRERFYGRLKKVLNSLLSGGNKVRAFNGWVMPVLMYSFGILKWTQTELDALDRRVRSLLTANRMHHPRSSVMRLYIPRKCGGRGFLNAKTLHNREVCSLREYFSQADVGMHRDVVAVDKGLTPLSLAKENWRKPVVLDTNGRREVWRSKELHGRFYRALHGPDVDFLASVAWLRFGDLFGETEGFVCAIMDEVMMTNNYRKYIVKDGTVDICRACHCPGESIRHIVSGCSRLANGEYLHRHNLVARIIHQQLALKYNLVDAEVPYYKYVPDPVLENGHVTLYWDRSIITDRTIVANKPDIVVIDRSKRLTMIVDITVPHDENLVKAEKDKEIKYQDLAHEVVAMWDVDSAIIVPIVVTANGLIAKSLDQHLKRLSLGGWIKGLIQKAVLLDTARIVRKFLSLRP

SEQ ID NO: 30066 - protein, 1203 aa, Amphipyra tragopoginis
MLTRARARQKDARPRSPDSSLCSASQPPESSPSVSAVTPAAAVASSSSDEYFSPPSSPPPVRRRGGARPPACLGPRSQPASYRVPAAGGNVSRMRWTQSINENVMRAYYGATEGGINLAAYRDRMLSLFRVLEPAINVSTQRLSDQVRVIQRNRRLDDTVLERLRSEVQNNRAVTPPVQAAVQAQLPVVPPCPSQGDGEGDGEVIEVSSQCSDELRSALEGAILEYRATPPELRPRLPRLPMHKKNRALVCALDSLLSSYFDGSEDLADTHSILYCAAIAACRVAHVKFTDNERATRPKSAVPAWQCRIERRIGGARALIGKLICFREGNTRPRVMRFVRRAFSGTDISPRDYMSRITERIDFLKQKVYAWANRIRRYKRHVERYTLNRTFQSDQRRVYRAWERTDTCGSDVRLPDDDAMSSFWRSIWSVPVAHTEGGWMRDIERACEPILEMGAIIISPQDVAGAARPLPNWKSPGPDGLHNFWLKWLRSSHACLASQFQSSLESGSLPQFLTTGATHLLYKSGSTAEPKNYRPITCLPTVYKLLTSILRVKISNHIDSNSILSPSQNGCGSGTRGTKELLLIDMAISQQVRRSRKDLSTCWIDYKKAYDSVPHTWLMRVLELYKINTTLRTFLMSCMRQWKTVLRYPGCREIRRRGEPIRIERGIFQGDSLSPLWFCLALNPLSTLLEGTRQGYRLRRESQVISHLLYMDDLKLFAPTDLRLMELLKVTENFSSSIRMEFGVDKCAVMHVKRGGIVQSEGIQLSNSIQLRSLSPTETYKYLGMSEALGISEADMRQSLRERFFGRLNKVLRSLLSGGNRVRAFNGWVMPVLMYSFGILKWTQTDLDALDRRVRALLTVHRMHHPRSSVMRLYIPRKCGGRGFLNAKTLHNREVCSLREYFLQAEGEMHRDVVAVDKGLTPLALAKENWRKPAVLSTNDREEVWQSKELHGRFYRALHGPEVDFPASVSWLRFGDLFGETEGFVCAIMDEVMMTNNYRKYIVKDGTVDICRACHRPGESIRHIISGCSRLANGEYLHRHNLVARIIHQQLALKYNLVESEVPYYRYVPDPVLENGHVTLYWDRSIITDRTIVANKPDIVVIDRSERRTVIVDITVPHDENLVKAEKDKQIKYLDLAHEVVGMWDVDSAVIVPIVVTANGLIAKSLDQHLKRLSLGGWIKGLIQKAVLLDTARIVRRFLSLEP

SEQ ID NO: 30067 - protein, 1095 aa, Amphipyra tragopoginis
MCVIIIIIIITAYRDRMLSLFQVLEPAINVSTQRLSDQVRVIQRNRRLDDTVLERLRSEVQNNRTVTTPLQAAEQPQLPAVSPRPIHVDEAGDGEVIVVSNQCSDELRSALEGAILEYRATPPELKPRLPRLPMHKKNRALVCALDSLLSNYFDGSEDLGDTHSILYCAAIAACRVANVKLTENERATRPKPAVPAWQYRIERRIDGARALIGKLICFREGNTRPRVMRFVRRAFSGTDISPRDYMSRVTERIDFLKQKVYAWANRIRRYKRRVERYTQNRTFQSDQRRVYRTWERSVPGVGDMRLPDDDAMSSFWRSIWSVPVAHAEGDWTRDIERACEPIPEMGEITISPQDVATAARPLPNWKSPGPDGLHNFWLKWLRSSHARLASQFQSSLESGSLPQFLTTGVTHLLYKSGSAAEPKNYRPITCLPTVYKLLTSILRVKISNHIDSNSILSPSQNGCRNGSRGTKELLLIDMTISQQVRRSRKDVSTCWIDYKKAYDSVPHTWLMRVLELYKINTTLRTFLMSCMGQWRTGLRYPGCRQIRGRGEPIRIERGIFQGDSLSPLWFCLALNPLSTLLEGTGLGYRLRREGQVISHLLYMDDLKLFAPTNLQLMELLKVTENFSNSIRMEFGVDKCAVMHVKRGRIIESEGIQLSNSIQLRSLSPTETYKYLGMSEALGIREADMRQSLMERFFGRLNKVLKSLLSGGNKVRAFNGWVMPVLKYSFGILKWTQTDLDALDRRVRALLTTHRMHHPRSSVMRLYIPRKCGGRGFLNAKTLHNREVCSLREYFLHAEGEMHRDVVAVDGGLTPLALAKENWRKPTVLSTNDREEVWQSKELHGRFYRALHGPDVDFSASVSWLRFGDLFGETEGFVCAIMDEVMMTNNYRKYIVKDGTVDICRACHRPGESIRHIISGCSRLANGEYLHRHNLVARIIHQQLALKYNLVESEVPYYRYVPDPVLENGHATLYWDRSIITDRTIVANKPDIVVIDRAERRTMIVDITVPHDENLVKAEKEKQIKYLDLAHEVVSMWDVDSAVIVPIVVTANGLIAKSLDQHLMRLSLGGWIKGLIQKAVLLDTARIVRRFLSLEP

SEQ ID NO: 30068 - protein, 1207 aa, Amphipyra tragopoginis
MLTRSRAKTLQRTHPTPSASSLSSASQPPEPASIVSDVTPAAAVASSSSDEYFSPATSPSPPPARRRGRGRPPTCLGPRGPPASDRVPAPGGSVQRMRWTQSMNENCMRAYFGATEGGTNLTAYRGRMLSLFQTLEPAVNVSAQRLSDQVRVIQRDHRLDDAALGRLRDEMQNSHATPPPSQIRTQPLVPPAVPLQPNHADEEEQDRAISAGTQYSEIMRSALEDALREFRSTPPELRPRLPRLPMHNKNRALVCALDSLLSNVLESSKDIGDTHSILYCAAVAACRVAHVKFPNDNRATRPKSTVPAWQCRIERRIDEARVLIGKLTCFREGNIRPRVMRFVRRAFSGTDVSPGEYVSRVTERIDFLKQKVYAWANRIRRYRRRVDRYTQNRIFQSDQRWVYRTWERPDQGVSDTHLPDNDVMNAFWRNIWSVPVTHTEGDWMQEVQRACEPIQEMGAVTIGPQDVTSAVRPMPNWKSPGPDGLHNFWIKWLRSSHARLASQFQSSLESGSLPSFLTTGVTHLLFKSGSTAEPKNYRPITCLPTVYKLLTSILRAKINNHIDNNAIMSDSQNGCRNGSRGTKELLLIDMAISQQVRRSRKDLSTCWIDYKKAYDSVPHTWLMRVLELYKINATLRTFLMSCMGRWRTVLHYPGCRQIQGNGELIRIERGIFQGDSLSPLWFCLGLNPLSTLLEGSGLGYRLRRGGQVISHLLYMDDLKLFAPNNLQLLELLKVTETFSNSIRMEFGVDKCAVMHVKRGRIMESVGTQLSDAIHLRSLSSTETYKYLGMSEALGINEADMKQSLKERFFGRLIKVLKSLLSGGNKVRAFNGWVMPVLMYSFGILRWTQTELDALDRRVRTLLTAYRMHHPRSSVMRLYIPRKCGGRGFLNAKTLHNREVCSLREYFSQADVGMHRDVVAVDKGLTPLSLAKENWRKPVVLDTNGRREVWRSKELHGRFYRALHGPDVDFLASEAWLRFGDLFGETEGFVCAIMDEVMMTNNYRKYIVKDGTVDICRACHCPGESIRHIVSGCSRLANGEYLHRHNLVARIIHQQLALKYNLVDTEVPYYKYVPDPVLENGHVTLYWDRSIITDRTIVANKPDIVVIDRLERRTVIVDIAVPHDENLVKAENDKKIKYLDLAHEVVDMWDVDSAVIVPIVVTANGLIAKSLDQHLMRLSLGSWIKGLIQKAVLLDTARIVRKFLSLEP

SEQ ID NO: 30069 - protein, 1200 aa, Mythimna impura
MLTRAAARRARHPPPGSPLSSASPPPDLGSPVSPVAAVALSSSDEYFSPPTSPTPVRRPGRGRPPKSLGPGGQPAPSQVPAAGGCVQRMRWTQSMNENVMRAYYGSTEGGTNLTAYRDRMLSLFQDLEPTVNVSAQRLSDQVRVIQRNHRLDDATLDRLRSEVLSNQIVSTSIQTQTAATPTTNAISPRSNPNNDDADDRVVTVSSQCNDELRSALEDALREYRTTPTELRPRLPRLPMHKKNRALVCTLDSLLKNNFESSENLVDTHSILYCGAVAACRLANTNFPNIDGTIRPKPAVPAWQYRIERRIDGARVLIGKLHCFREGNTRPRVMRFVRRAFLGTGISPQEYMSRVTERIDFLKQKVCAWASRIRRYKRRVDRYSQNRMFQSDERWVYRAWERPEQNVIDGRRPDDFTTITFWRNIWSVPVSHTEGDWMRDVERVCEAIPEMEKVVITPADLAKAVRPLPNWKSPGPDGLQNFWLKWFSNSHAPLASQFQSTLESGSLPEYLTTGITHLLHKTGNPVEPKNYRPITCLSTVYKLLTSILRAKINRHIENNLIMSASQNGCRNGSRGTKELLLIDMAISQQARRSRKDLSTCWIDYKKAYDSVPHTWLMRVLELYKVDMTLRTFLESCMRQWKTVLRYPGCRPIQGNDEPIRIKRGIFQGDSLSPLWFCLALNPLSTLLEESGLGYRLRRGGQAISHLLYMDDLKLFAPSNLQLMELLKVTETFSSAIRMEFGVDKCAAMHVKRGEIMESKGIQLPDSIHLRSLSSTETYRYLGMSEALGINNADMKQSLKERFFGRLKKVLNSLLSGGNKVRAFNGWVMPVLMYSFGILKWTQTELDALDRRVRTLLTANRMHHPRSSVMRLYISRKCGGRGFLNAKTLHNREVCSLREYFLKTDVGMHRDVVAVDKGLTPLSMAKEDWRKPVILTTDDRKEIWKGKELHGRFYRALHEPDVDFLASVAWLRFSDLFGETEGFICAIMDEVILTNNYRRYIMKDGTVDVCRACHRPGESIRHIISGCSRLANGEYLHRHNQVARIIHQQLALKYNLVDSEVPYYKYVPDPVLENDHVTLYWDRSIITDRTIVANKPDIVVIDRLARRAVIVDVTIPHDENLVKAEKEKQIKYLDLAHEVVDMWNVDSAVIVPMVVTANGLIAKSFDDHLSKLSLRGWIKGLIQKAVLLDTARIVRRFLSLEP

SEQ ID NO: 30070 - protein, 1199 aa, Phlogophora meticulosa
MITRAATRRARPPSPDSPLSSASPPPDLGSPVTPAVAAASSSSDEYFSPPTSPTPVRRQGRGRPPKSLGSRGQPAPSQVPATGGCVQRMRWTQSMNENVMRAYYGSTEGGTNLTAYRVRMLSLFQGFEPTVNVSAQRLSDQVRVIQRNHRLDDAALDRLRSEMLSNHIVLTSTQTAVQAPAFNAILPRSNHVSNEADDRVDTVCSQYNDRLRSALEDALREYRSTPTELRPRLPRLPMHRKNRALVCALDSLHKNFFESSGDLVDTHSILYCAAVAACRLANVKFPKNDLAIRPQPAVPAWQSRIERRIDGARVLIGKLYCFREGNTRPRVMRFVRRAFSGTGISPREYMSRIVERIDFLKQKVCAWANRIRRYKRRVDRYSQNRMFQSDERWVYRAWERPEQDVAGEHRPDDVATNAFWRSIWSVPAHHVEAHWMSDYESVCETIPEMEKIIITPEDVATAVRPVPNWKSPGPDGLHSFWLKWLSSSHTRLASQFQSCLESGSLPQFLTTGITHLLYKSGSTTEPKNYRPITCLSTVYKLLTSILRAKITEHIVGNSIMSASQNGCRNGSRGTKELLLIDMAISQQVRRSRKDLSTCWIDYKKAYDSVPHAWLTRVLELYKIDATLRTFLASCMGQWKTVLRYPGCRQIQGNAEPIWIKRGIFQGDSLSPLWFCLALNPLSTLLEDSGLGYRLKRGGQVISHLLYMDDLKLFAPNNLRLMELLKITESFSSAIRMEFGVDKCAVMHVKRGEIVESEGIQLSDSIHLRSLSSSENYKYLGMSEALGINATDMKQSLKERFFGRLKKVLNCLLSGGNKVRAFNSWVMPVLMYSFGILKWTQTELDALDRRVRTLLTANRMHHPRSSVMRLYIPRKCGGRGFLNAKTLHNREVCNLRDYFLKTEVGMHRDVVAVDKGLTPLSMAKENWRKPVVLTTDDRKQVWQSKELHGRFYRALHGPDVDFLASVSWLRFGDLFGETEGFVCAIMDEVILTNNYRKHIMKDGTVDMCRACHRPGESIRHIISGCSRLANGEYLHRHNQVARIIHQQLALRYKLVESEVPYYKYVPDPVLEDDHVTLYWDRSIITDRTIVANKPDIVVIDRLARRAMIVDVTIPHDENLVKAEKEKQIKYLDLAHEVVDMWNVDSAVIVPIVVTANGLLAKSLDDHLSRLSLHGWIKGLIQKAVLLDTARIVRRFLSLQP

SEQ ID NO: 30071 - protein, 1209 aa, Xestia xanthographa
MITRSRAKLHQEAHPPSPGSSLSSASQPPGRATPVSIVSPVAAVASSSSDEFFSPPSTPSPSPRRGRRRGRGRPPAGLGPRGQQAPSRVPAAGGNVSRIRWTQSMNENVMRAYYGATEGGINLTAYRGRMLSLFQVLEPGVSASAQRLSDQVRVIQRNHMLDDTVLDRLRSESRSNLVTPASPMIAVQQQNIPSAPPRSDYDGEEDRDEVISVSTQCNAQLRSALEGAFREYRSTPPELRPRLPRLPMHNKNKALMCALDSQLSNCFDSSKDLTDTHSILYCGAVAACRVAHVKFPNNDRATRPKLAVPAWQSRIERRIGEARALIGKLICFREGNTRPRVMRFVRRAFSGTDISFRDYLARVTERIDSLKQKICAWASRIRRYKRRVERYTQNRTFQSDERWVYRAWEQPDQGVTDTRLPDDSAMYSFWRNIWSVPVSHTEGDWTREVEQACDPIPQIGAIIISPQDVARAVRPLPNWKSPGPDGLHNFWIKWFQRSHARLASQFQSALESGSLPQFLTTGITHLLHKSGSAAEPKNYRPITCLPTVYKVLTSILRAKINQHIDSNSIMSASQNGCRNGSRGTKELLLIDMAISQQVRRSRKNLSTCWIDYKKAYDSVPHTWLMRVLELYKIDATLRTFLMSCMGHWRTVLRYPGCRQIQGNSESIRIERGIFQGDSLSPLWFCLALNPLSTLLERSGLGYLLRRDGQVISHLLYMDDLKLFAPNNLQLMKLLKVTETFSSAIRMEFGVDKCAVMHVKRGEIMESEGTQLSDSIHLRSLSSTETYKYLGMSEALGINTADMKQSLRERFFGRLNKVLGSLLSGGNKVRAFNGWVMPVLMYSFGILKWTQTELDALDRRVRTLLTANRMHHPRSSVMRLYIPRKCGGRGFLNAKTLHNREVYSLREYFLEAEGEMHRDVVSVDKGFTPLSLANENWRKPKVLDTNDRKVEWQGKELHGRFYRALHGPDVDFLASVSWLRFGDLFGETEGFICAIMDEVMMTNNYRKYIVKDGTVDICRACHRPGESIRHIISGCSSLANGEYLHRHNLVARIIHQQLALKYNLVESEVPYYKYAPDPVLDNGHITLYWDRPITTDRTVVANRPDIVVIDRLERRAMVVDITIPHDENLVKAEKDKQFKYLDLAREVVDMWDVNTAVIVPIVVSANGLIAKSLDQHLRRLSLGSWIKGLIQKAVLLDTARIVRRFLSQEP

SEQ ID NO: 30072 - protein, 1122 aa, Mamestra brassicae
MLTRSQARHLATHPSPSASSLSSASPPPEPSPTVSAVTPAVAVASSSSDEYFSPPTTPPPARRRRGRRPPDGLGPRGPPASDRIPAPGGSVQRMRWTQSINENVMRSYFGATEGGTNLTAYRGQMLSLFQVLEPAVNVSAQRLSDQVRVIQRNRMLDDSVLDRLRMEMCGHVITPPSQTVSPPQSQISSHADEESNDRVINVSTQCNEELRSALECAIREYGYVPPELRPRLPRLPMHNKNRALVAALDSQLSNYFDDCEDLTDTHSIMYCAAVAACRVAHVKMTNDRVTRPKPAVPAWQCRIERRIGGARALIGKLICFREGNTRPRVMRFVRRAFSGTDISPRDYMSRVTERIDFLKQKVYAWANRIRRYRRRVERYTQNRTFRSNERWVYRVWEQPDQGVTDTRLPDDDAMCSFWRNIWSVPVSHTEGGWIREVERACDPLPEMGAITISPQDVARAVRPLPNWKSPGPDGLHNFWIKWLQRSHARLASQYQTALESGSLPEFLTTGVTHLLHKSGSTAEPKNYRPITCLPTVYKVLTSILRAKINNHINSNNIMSVSQNGCRNGPRGTKELLLIDMAISQQVRRSRKDLSTCWIDYKKAYDSVPHTWLMRVLELYKIDTMLLTFLMSCMGQWRTVLRYPGCRNIQRNSEPVRIERGIFQGDILSPLWFCLALNPLSTLLENSGLGYRLKRGGQVISHLLYMDDLKLFAPSNLQLMELLKVTETFSSEIRMEFGVDKCAVMHVKRGEIMESVGTQLSDSINLRSLSSTETYKYLGMSEALGNNVTDMKQSLKERFFGRLKKVFNSLLSGGNKVRAFNGWVMPVLMHSFGVLKWTQTELDALDRRVRTLLTAYRMHHPRSSVMRLYIPRKCGGRGFLNAKTLHNREICSLREYFLAVDVGMHRDVVAVDKGLTPLSLANENWRKPAVLDTNDSRAVWQSKELHGRYFRALHGPDVDQLASVAWLRFGDLFGETEGFVCAIMDEVIMTNNYRRFIVKDGTVDICRACHRPGESIRHIVSGCSRLANGEYLHRHNLVARIIHQQLALKYSLVESEVPYYRYAPDPVLDNGNITLYWDRSIITDRTIVANKPDIVVVGRIERRAMIVDITVPQDENLVKAEKD

SEQ ID NO: 30073 - protein, 1199 aa, Mamestra brassicae
MLTRAASRRARPPSPDPSLSSASPPPDSGSPMSPAVAVASSSSDEYFSPPTSPTPVRRQGRGRPPRGLGPRGQPAPSRVPATGGCVQRMRWTQSMNENVMRAYYGSTEGGTNLTAYRVRMLSLFQDLEPTVNVSAQRLSDQVRVIQRNHRLDDAALDRLRSEVLNNLIISTPTQTAVQAPVNDAITPRPNNVSHEVDDRVVTVSSQCNDRLRSALEDALREYRSTPTELRPRLPRLSMHKKNRALVCALDSLLQNTFESSESLVDTHSILFCGAVAACRIANVKFPSYDEAIRPKPAAPAWQCRIERRIDEARALIGKLYCFREGNTRPRVMRFVRRAFLGTGISPRDFTSRVTERIDFLKQKVCAWANRIRRYKRRVDRYSQNRMFQSDERWVYRAWERPEQSVMDVCRPDDNTTSTFWRGIWSVPVCHTEGGWLRDVEHVCEAIPEMDTITITPLDVAKAVRPLPNWKSPGPDGLHNFWLKWYSSSHVLLASQFQSSLESGSLPQFLTTGVTHLLHKTGSPAEPKNYRPITCLSTVYKLLTSILRAKINQHIERNSIMSASQNGCRKGSRGTKELLLIDMAISQQVRRSRKDLSTCWIDYKKAYDSVPHTWLMKVLELYKIDATLRTFLESCMRQWKTVLRYPGCRPIQGSDEPVWIKRGIFQGDSLSPLWFCLALNPLSTLLEDSGLGYRLRRGGQAISHLLYMDDLKLFAPNNLRLMELLKVTETFSSSIRMEFGVDKCAVMHVKKGEIMESEGIQLSDSIQVRSLSSTETYKYLGMSEALGINGADMKQSLRERFFGRLKKVLNSLLSGGNKVRAFNGWVMPVLMYSYGILKWTQTELDALDRRVRTLLTANRMHHPRSSVMRLYIPRKCGGRGFLNAKTLHNREVCNLRDFFLKTDVGMHRDVVAVDKGLTPLSMAKENWRKPVILTTDDRKEVWKGKELHGRFYRALHEPDVDFPASVSWLRFGDLFGETEGFVCAIMDEVILTNNYRRYIMKDGTVDVCRACHRPGESIRHIISGCSRLANGEYLHRHNQVARIIHQQLALKYQLVDSEVPYYKYVPDPVLENDHVTLYWDRSIITDRTIVANKPDIVVIDRLARRTMIIDVTIPHDVNLVKAEKEKQIKYLDLAHEVVDMWNVDSAVIVPIVVTANGLLSKSFDDHLSKLSLRGWVKGLIQKAVLLDTARIVRRFLSLEP

SEQ ID NO: 30074 - protein, 1194 aa, Abrostola tripartita
MITRSRAKIAQSTSPDSSPRSASQLPDQQALHSPASAVASSSSDEYFSPPTLPTPVRRQRRGRPPTSLGLRGQLAPNRVPASGGYVQRMKWSQQINENVMRAYYGSTEGGTNLTAYRDRMLALFQDLEPAVNVSAQRLSDQVRVILRNHRLDDATLDRLRSEVHSSPVTCRPVHVVVPPIGPPQPSCDMEADDRATTVSTQYNDVLRSTLEDTIREYRASPFGLRPRLPRLPMHNKNKAMIGALDSLLSTYFEGSEDLCDTHSILYCAAATACRVANVKCFDSSTATRPKPAVPAWQCRIERRIAEARALIGKLIAFREGNTRPRVMRFVRRAFAGVDINPREYAARATERIDFYKQKVYAWASRIRRYKRRVDRFTQNRIFNQDQRWVYRNWERSAQGVSDGHLPDDDVTNAFWRSIWSVPVNHTEGSWMLDVEQSCESIPEMGTITISPQDVASAVRPMSNWKSPGPDGLHNFWIKWLRSSHGCLASQFQSALEVGSLPQFLTTGSTHLLHKTGSTTDPKNFRPITCLPTIYKLLTSILRAKITKHIDDNNIMSASQNGCKNGSRGTKELLLIDMTICQQVRRSKKDLSTCWIDYKKAYDSVPHTWLMRVLELYKIDTTLRTFLLSCMRQWRTVLHYPGCRDIQQDGEPIRIERGIFQGDSLSPLWFCLALNPLSTLLENSGLGYSLRRRSQVISHLLYMDDLKLFAPSRFQLIKLLKITEAFSNSIRMEFGVDKCAVMHVKRGGIIESQGIQLSDSINLRSLSATETYKYLGMSEALGINVVDMKQSLKERFFGRLNKVLKSLLSGGNKVRAFNGWVMPTLMYSFGILKWTQTELDALDRRVRTLLTSNRMHHPRSSVMRLYIPRKCGGRGFLNAKTLHNREVCSLREYFLRAEVGMHREVVAVDKGLTPLFLAKENWCKPVVLSVNDRRDVWQSKELHGRFYKALHGPNVDFLSSVSWLRFGDLFGETEGFVCAIMDEVIMTNNYRKYILKDGTVDICRACHRPGESLRHIMSGCSRLANGEYLHRHNQVARIIHQQLALKYKLVDSEMPYYKYVPDPVLENDHITLYWDRSIITDRTIVANKPDIVVIDRLERRAMIVDITIPHDENLVKAERDKQIKYLDLAHEVVDMWEVDSAIIVPIVVSANGLMAKSLDQHLKRLTLGGWVKGLMQKAVLLDTARIVRRFLSLEP

SEQ ID NO: 30075 - protein, 1194 aa, Furcula furcula
MLTRNRAHPRPPDSSPRSASQPLGPSADGSLAAVASSGSDEYFSPPTSPPPVRRRRGRPPRVLGSLEQPAPNGVLAPGGVVRRMRWTSSINENVMRAYYEATERGTNLTAYRLRMLSLFQALEPAVNVSAQRLSDQVRAIQRGHMLDDAVLDRLRSEVQGSRVAPCIPSSQAVAPAVNIVPAPRPATNSDDDRDDMTTDVSTNLNTQLRSTLEDVVREYRTMPLNLRPRLPRLPMHKRNRALVCALDSLLSSYFDSSEDLADAHSLLYCAAMTACRVARVKFPSTDAATRPRPAVPAWQFRIECRIGEARVLIGKLNCFREGNTRPRVMRFVRRAFSGTGIDPREYLSRVTERIDFLKQKVCAWANRIRRYKARVDRYSQNNMFQRDQRWVYRSWERSSQIEGDGRRPDDSAMTTFWRNIWSVPVTHSEGDWMRDVEQICEPLPEMGAITIRPQDVADAVRPMPNWKAPGPDGLHNFWLKWIRSSHICLASLFQSALESGSLPEFMTMGITHLLHKTSSTTDPKNYRPITCLPTVYKTLTSILRAKIYRHVEDNSIMSASQNGCRSGARGTKELLLIDMAICQQARRNRKDLSTCWIDYKKAYDSVPHTWLMRVLELYKVNPTLRTFLASCMRQWRTVLLYPGSRQILGDPIRIERGIFQGDSLSPLWFCLALNPLSTLLRGSGLGCRLRRGGQVISHLLYMDDLKLFAPTELQLMGLLKVTETFSNSISMEFGVDKCAVMHVKRGRMVESRSVQLLDTTDLRTLSATETYKYLGMSQALGINETDMKQSLRERFLGRLRKVLKSLLLGGNRVRAYNGWVMPVLMYSFGILKWTQTELDTLDRTVCTLLTTYRMHHPRSSVMRLYIPRKCGGRGFLNAKTLHNREICNLREYFLHCGGVMHTDVVAVDNGLTPLSLAKGNWRKPVVLTTGNREAVWQSKELHGRFYRALHGPDVDFSASVAWLRFGDLFGETEGFVCAIMDEVVMTNNYRKYILRDGTIDICRACHRPGESLRHIISGCSRLANGEYLHRHNQVARIIHQQLALKYRLVMSEVPYYRYVPEPVLEDGHITLYWDRSIITDRTIVANKPDIVLIDRNERRAMIVDVTVPHDENLVKAEKDKECKYLDLAHEVVDMWDIDRAIIVPIVVSAHGLMAKSLDKHLKRLTLGGWIKGQMQKAVLLETARIVRRFLSLEP

SEQ ID NO: 30076 - protein, 958 aa, Mamestra brassicae
MHNKNRALVCALDSQLTNCFDSSEDLADTHSILYCAAVAACRVAHVKFLNSDRATRPAVPAWQCRIERRIGEARALIGKLICFREGNTRRRVMRFVRRAFSGTDTNPRDYLTRVTERIDFLKQKIYAWANRIRRYKRRVERYTQNRTFQSNERWVYRAWERPDQGVTNTRLPDDDVMCSFWRNIWSVPVSHTEGDWIREVERACDPILEMGAITISPQDVARAVRPLPNWKSPGLDGLHNFWIKWFTGSHARLASQFQSASESGSLPQFLTTGITHLLHKSGSTAEPKNYRPITCLPTVYKVLTSILRAKINHHIESNSIMSASQNGCRNGSRGTKELLLMDIAISQQVRRSRKDLSTCWIDYKKAYDSVPHTWLMRVLELYKVDAVLRTFLMSCMGQWRTVLRYPGCRQIQVNGDPIKIERGIFQGDSLSPLWFCLALNPLSTLLEGSGQGYRLRRGGQVISHLLYMDDLKLFAPNNLQLIELLKVTETFSSAISMEFGVDKCAVMHVKRGEIMESVGTQFSDSIHLRSLSSTETYKYLGMSEALGINANDMKQSLKERFFGRLNKVLNSLLSGGNKVRAFNGWVMPVLMYSFGILKWTQTELDALDRRVRSLLTANRMHHPRSSVMRLYIPRKCGGRGFLNAKTLHNREICSLREFFLEADVGMHRDVVAVDKGLTALSLANENWRKPVVLDTNDRREVWQSKELHGRFYRVLHGPDVDFLVAWLRFGDLFGETEGFVCAIMDEVMMTNNYRKYIVKDGTVDICRACHRPGESIRHIISGCSSLANGDYLHRHNLVARIIHQQLALKYNLVESEVLYYRYVPDPVLENGNCTLYWDRSIITNRTIVANKPDIVVIDRLERRAMIVDIAVPHDENLVKTEKDKQTKYLDLAREVVDMWDVNTAVIVPIVVTANGIIAKSLDQHLKRLSLGSWIKGLIQKAVLLDTARIVRRFLSQGP

SEQ ID NO: 30077 - protein, 1197 aa, Mamestra brassicae
MITRAAARRAHPPPPGSSLSSASPTPDIGSQVSPVVAVASSSSDEYFSPPTSPTPVRRQGRGRPPRSLGSRGQPALSRVPAAGGCVQRMRWTQSMNENVMRAYYGSTEGGTNLTVYRVRMLSLFQDLEPTVNVSAQRLSDQVRVIQHNCRLDDAALERLRSEVLSNLIISTPTQTVVQAPASGAITPRPNNGSDEVDDRVVTVSSQCNDRLRSALEDALREYRLTPTELRPRLPRLPMHKKNRALVCALDSLLQNIFESSESLVDTHSILFCGAVAACRIANVKFPSCDEAIRPKPAAPAWQCRIERRIDEARALIGKLYCFREGNTRPRVMRFVRRAFSGTGISPREYTFRVTERIDFLKQKVCAWANRIRRYKRRVDRYSQNRMFQSDERWVYRAWERPEQSVTDVYRPDDVATSTFWRSIWSVPICHAEGGWMRDVERVCEAIPQMEKITITTLDIAKAVRPLPNWKSPGPDGLHNFWLKWYSSSHALLASQFQSSLESGSLPQFLTTGITHLLHKTGSPAEPKNYRPITCLSTVYKLLTSILRAKINEHIESNSIMSASQNGCRKGSRGTKELLLIDMAISQQVRRSRKDLSTCWIDYKKAYDSVPHTWLMKVLELYKIDATLRTFLESCMRQWKTVLRYPGCQPIQGSDEPVWIKRGIFQGDSLSPLWFCLALNPLSTLLEDSGLGYRLRRGGQAISHLLYMDDLKLFAPNNLRLMELLKVTETFSSAIRMEFGVDKCAVMHVKKGEIMESEGIQLSDSIQVRSLSSTESYKYLGMSEALGINGTDMKQSLRERFFGRLKKVLNSLLSGGNKVRAFNGWVILMYTFGILKWTQTELDALDRRVRTLLTANRMHHPRSSVMRLYIPRKCGGRGFLNAKTLHNREMCSLREYFLKADVGMHRDVVAVDKGLTPLSMAKENWRKPVILTTDDRKEVWKGKELHGRFYRALYGSDVDFSASVAWLRFGDLFGDTEGFVCAIMDEVILTNNYRKHIMKDGTVDVCRACHRPGESIRHIISGCSRLANGEYLHRHNQVARIIHQQLALKYKLVDSEVPYYKYVPDPVLENDHVTLYWDRSIITDRTIVANKPDIVVIDRLARRTMIIDVTIPHDENLVKAEKEKQIKYLDLAHEVVDMWNVDSAVIVPIVITANGLMAKSFDDHLSKLALRGWIKGLIQKAVLLDTARIVRRFLSLEP

SEQ ID NO: 30078 - protein, 963 aa, Mesoligia furuncula
MHKKNRALVCALDSQLKNFFESSEDLVDTHSILYCAAVAACRLANVKFSSCDGATRPKPAVPAWQRRIERRIDGARVLIGKLYCFREGNTRPRVMRFIRRAFSGTGISPREYMSRITERIDFLKQKVCAWASRIRRYKRRVDRYTQNRMFQSDERWVYRAWERPEQNVTDVCRPDDAATSAFWCSIWSVPVCHTEAGWMQNVERVCESVPEMEKVLITPSDVARAVRPLSNWKSPGPDGLHNFWLKWLISSHTCLASQFQSSLESGSLPQFLTTGVTHLLHKSGSPAEPKNYRPITCLSTVYKLLTSILRAKINKHIESNSIMSASQNGCRKGSRGTKELLLIDMAISQQVRRSRKDLSTCWIDYKKAYDSVPHTWLMRVLELYKIDATLRTFLGSCMGQWKTVLRYPGCRQIQGNDEPVWIKRGIFQGDSLSPLWFCLALNPLSTLLEDSGLGYHRLRRGGQVISHLLYMDDLKLFAPNKLRLMELLKVTKTFSSAIKMEFGVDKCAVMHVKRGEIMESEGIQLSDSISLRSLSSSESYKYLGMSEALGINDADMKQSLKERFFCRLKKVLISLLSGGNKVRAFNGWVMPVLMYSFGILKWTQTELDALDRRVRTLLTANRMHHPRSSVMRLYIPRKCGGRGFLNAKTLHNREVCSLREYFLKAEVGMHRDVVAVDKGLTPLSMAKENWRKPVVLSTDDRKRVWQSKELHGRFYRALHEPGVDFIASVSWLRFGDLFGETEGFVCAIMDEVILTNNYRRHIMKDGTVDVCRACHRPGESIRHIISGCSRLANGEYLHRHNQVARIIHQQLALKYKLVDSEVPYYKYVPDPVLENDHVTLYWDRSIITDRTIVANKPDIVVIDRLARRTMIVDVTIPHDGNLVKAEKEKQIKYLDLAHEVVDMWNVSSAIIVPFVVSTNGLMAESLDQHLSRLSLGGWIKGLIQKAVLLDTARIVRRFLSLEP

SEQ ID NO: 30079 - protein, 1112 aa, Mythimna ferrago
MLTRAAARRTRPPPLASSLSSASLPPEPSLTVSAVTPAAAAASSSSDEYYSPPTTPPPARRRGGRRLPACLGPRGPPVSDRVPAAGGSVPRMRWTQSTNENVMRAYYGATEGGNNLTAYRVRMLSLFQVLEPAVNVSAQRLSDQVRVIQRNNMLDDTVLDRLRTEMSNRVITPPSQPVVPVVVPQSSHISLHTDEVSTDTVTNVSTQCNNELRSALECAIREYRNMPLELRPRLPRLPMHNKNKALVAALDSQLSNYFDDCEDLTDTYSIMYCAAVAACRVAHVKFPNSDVATRPKPAVPAWQYRIERRIGGARALIGKLICFREGNTRPRVMRFVRRAFSGTDISPRDYMSRVTERIDFLKQKVYAWANRIRRYKRRVERYIQNSTFRSNERWVYRAWERPDQSVTDTRPPDDDAMCSFWRNIWSVPVSHTEGGWTREVERACESVTEMGAITISPQDVARAVRPLPNWKSPGPDGLHNFWIKWLQRSHARLASQYQAALESGSLPEFLTTGVTHLLHKSGSTAEPKNYRPITCLPTVYKVLTSILRAKINHHVDNNAIMSASQNGCRNGSRGTKELLLIDMAISQQVRRSRKDLSTCWIDYKKAYDSVPHTWLMRVLELYKVDATLRTFLMSCMRQWRTVLRYPGCRNIQRNSEPVRIERGIFQGDSLSPLWFCLALNPLSTLLENSGLGYRLKRGGQVISHLLYMDDLKLFAPNNLQLMELLKVTETFSSAIRMEFGVDKCAVMHIKRGEIVESVGIQLSDSIHLRSLSPTETYKYLGMSEALGINATDMKQSLRERFFGRLKKVLNSLLSGGNMHRDVVAVDKGLTPLSLANENWRKPVVLDTNVRREVWQSKELHGRFFRALHGPDVDQLASVAWLRVGDLFGETEGFVCAIMDEVIMTNNYRRFIVKDGTVDICRACHRPGESIRHIISGCSRLANGEYLHRHNLVARIIHQQLALKYSLVESEVPYYRYVPDPVLDSGDITLYWDRSIITDRTIVANKPDIVVVDRSERRAMIVDISVPHDENLAKAEKDKQIKYIDLAREVVDMWEVDSAIIVPIVVSANGLIAKSLDQHLRRLSLGDWIKGLIQKAVLLDTARIVRRFLSLEP

SEQ ID NO: 30080 - protein, 1102 aa, Mamestra brassicae
MLTRSRARHLATHPSPSASSLSSASPPPEPSPTVSAVTPAVAVASSSSDEYFSPSTTPPPARRRRGRRPPDGLGPRGPPASDRVPAPGGSVQRMRWTQSINENVMRSYFGATEGGTNLTAYRGRMLSLFQVLEPAVNVSAQRLSDQVRVIQRNRMLDDSVLDRLRMEMCGHVITPPSQTVAPPQSQISSHADEASNDRVSNVSTQCNEELRSALECAIREYRYIPPELRPRLPRLPMHNKNRALVAALDSQLSNYFDDCEDLTDTHSILYCAAVAACRVAHVKMTNDRVTRPKPAVPASQCRIERRIGGARALIDKLICFREGNTRPRVMRFVRRAFSGTDISPRDYMSRVTERIDFLKQKVYAWANRIRRYRRRVERYTQNRTFRSNERWVYRVWEQPDHGVTDTRLPDDDAMCSFWRNIWSVPVSHTDGDWIREVERACDPLPEMGAITISPQDVARAVRPLPNWKSPGPDGLHNFWIKWLQRSHARLASQYQSALESGSLPKFLTTGVTHLLHKSGSTAEPKNYRPITCLPTVYKVLTSILRAKINNHINSSNIMSVSQNGCRNGSRGTKELLLIDMAISQQVRRSRKDLSTCWIDYKKAYDSVPHTWLRRVLELYKIDTMLRTFLMSCMGQWRTVLRYPGCRSIQRNSEPVRIERGIFQGDSLSPLWFCLALNPLSTLLENSGLGYRLKRGGQVLSHLLYMDDLKLFAPSNLQLMELLKVTETFSSAIRMEFGVDKWTQTELDALDRRVRTLLTAYRMHHPRSSVMRLYIPRKCGGRGFLNAKILHNREICSLREYFLAVDVGIHRDVVAVDKGLTPLSLANENWRKPAVLDTDDRRAVWQSKELHGRYFRALHGPDVDQLASVAWLRFGDLFGETEGFVCAIMDEVIMTNNYRRFIVKDGTVDICRACHRPGESIRHIVSGCSRLANGEYLHRHNLVARIIHQQLALKYSLVESEVPYYRYVPDPVLDNGNITLYWDRSIITDRTIVANKPDIVVVDRIERRAMIVDITVPHDENLVKAEKDKQIKYIDLAREVVDMWDVDSAIIVPIVVSANGLIATSLDQHLRRLSLGSWIKGLIQKAVLLDTARIVRRFLSLEP

SEQ ID NO: 30081 - protein, 1040 aa, Griposia aprilina
MTLYLIACEMKCREVMSSPPPLQTVVVLPQSKTSQADEESDDRATNVSTQCNDELRSALEDAIREYRFISPELRPRLPRLPMHNKNRALVVALDGQLSNYFDDCVDLTDTHSILYCAAVAACRVAHVKFANDPRATRPKPAVPAWQCRIERRIGGARALIGKLICFREGNTRPRVMRFVRRAFAGTDISPQDYMSCVTERIDFLKQKVYAWANRIRRYKRRVERYTQNRTFQRDERWVYRGWERPDQGVADTCLPDDDAMCSFWRNIWSVPVSHTEGDWTREVERACDPIPEMGAITICPQDVTRAVRPLPNWKSPGPDGLHNSWIKWFGRSHARLAAQYQVALESGSLPQFLTTGVTHLLHKLGSTAEPKNYRPIACLPTVYKVLTSILRDKINKHIDTNYIMSPSQNGCRNGSRGTKELLLIDMAISQQVRRSRKDLSTCWIDYKKAYDSVPHTWLMRVLELYKVEATLRTFLMSCMGQWRTVLRYPACRNTQRNSEPIRIERGIFQGDSLSPLWFCLALNPLSTLLEDSGLGYRLRRGGQVISHLLYMDDLKLFAPNNSQLMDLLKVTETFSSAIRMEFGVDKCAVMHVKRGEIVESVGTQLSDSINLRALSASETYKYLGMSEALGINGTDMKQSLKDRFFGRLKKVFNSLLSGGNKVRAFNGWVMPVLMYSFGILKWTQTELDALDRKVRTLLTANRMHHPRSSVMRLYIPRKCGGRGFLNAKTLHNREICSLREYFLEADVGMHRDVVTVDKGLTPLSLAKENWRKPVVLDTNDRMQSKELHGRFFRALHGPDVDQLAFVASLRFGDLFVETEGFVCAIMDEVMMTNNYRRFIVKDGTVDICRACHRPGESIRHIISGCSRLANEEYLHRHNLVARIIHQQLSLKYSLVESEVPYYRYVPDPVLENGHITLYWDRSIITDRTIVANKPDIVMVDRLERRAMIVDITVPHDGNLVKAEKDKQIKYLDLAREVVDMWDVDSAIIVPIVVTANGLIAKSLDKHLRRLSLGSWIKGLIQKAVLLDTARIVRRFFSLEP

SEQ ID NO: 30082 - protein, 1115 aa, Hecatera dysodea
MRWTQSMNENVMRAYYGSTEGGTNLTAYRVRMLSLFQDLEPTVTVLAQRLSDQVRVIQRSHRLDDAALDRLRSEVLSSLIISTPPQAAVQAPTIGAIRAIILRPNNVSDEVDDTAVTVSTQCNDRLRSALEDALREYRSTPSELRPRLPRLPMHKKNRALVCALDSLLKNIFESSENLVDTHSILYCGAVAACRVANVKFTNSDGATRPKNAAPAWQCRIERRIDEARVLIGKLYCFREGNTRPRVMRFVRRAFLGTEISPQEYMSRVTERIDFLKQKVCAWANRIRRYKKRVDRYSQNRMFQSDERWVYRAWERPEQSVMDVCRPDDVTTNTFWRSIWSVPVCHAEGGWMRDVERVCEAIPQMEKITITSLDVAKAVRPLPNWKSPGPDGLHNFWLKWYSSSHALLASQFQSSLESGSLPQLLTTGVTHLLHKTGSPAEPKNYRPITCLSTVYKLLTSILRVKINEHIETNSIMSSSQNGCRKGSRGTKELLLIDMAISQQVRRSRKDLSTCWIDYKKAYDSVPHTWLLKVLELYKIDATLRTFLESCMRQWKTVLRYPGCRPIQGSDEPVWIKRGIFQGDSLSPLWFCLALNPLSTLLEDSDLGYRLRRGGQAIISHLLYMDDLKLFAPNKLRLMELLKVTETFSSDIRMEFGVDKCAVMHVKKGKIMESEGIQLSDSIQVRSLSSTETYKYLGMSEALGINVADMKQSLKERFFGRLKKVLNSLLSGGNKVRAFNGWVMPVLMYSFGILKWTQTELDALDRRVRTLLTANRMHHPRSSVMRLYIPRKWGGRGFLNAKTLHNREMCSLREYFLETDVGMHRDVVAVDKGLTPLSMANENWRKPVIQTTDDRKEVWKGKELHGRFYRALYGSDVDFSASVAWLRFGDLFGETEGFVCAIMDEVILTNNYRRHIMKDGTVDVCRACHRPGESIRHIISGCSRLANGEYLHRHNQVARIIHQQLALKYKLVDSEVPYYKYVPDPVLENGHVTLYWDRSIITDRTIVANKPDIVVIDRLARRTMIIDVTIPHDENLVKAEKEKQIKYLDLAHEVVDMWNVDSAVIVPIVITANGLMAKSFDDHLSKLALNGWLKGLIQKAVLLDTARIVRRFLSLEP

SEQ ID NO: 30083 - protein, 1195 aa, Phlogophora meticulosa
MLTRAAKRRARPPSPDSPLSSASPPPDLGSPVTPTVAAASSSSDEYFSPPTTSPTPVRRQGRGRPPKSLGSRGQPAPSQVPTTGGCVQRMRWTQSMNENVMRAYYGSTEGGTNLTAYRVRMLSLFQVLEPTVNVSAQRLSDQVRVIQRNHRLDDTALDRLLSEVLNNHIVLTSTQTAVQAPIINATPSPSNHVSEEADDRVVTVSSQCNEKLRSALEDALREYRSTPTELRPRLPRLPMHKKNRALVCNLDSLLKDLFESSGDLVDTHSILYCAAVAACRLANVKFPNNDIAIRPKPAVPAWQSRIERRIDGARVLIGKLYCFREGNTRPRVMRFVRRAFSGTGISPREYMSRIVERIDFLKQKVCAWANRIRRYKRRVDRYSQNRMFQSDERWVYRAWERPEQDVADVHHPDDTTTNTFWRNIWSVPVCHTEAHWIRDVERVCETITEMEKNIITPLDVATAVRPLPNWKAPGPDGLHNFWLKWLGSSHTRLASQFQSCLESGSLPQFLTTGITHLLYKSGSTTEPKNYRPITCLSTVYKLLTSILRAKISEHIVGNSIMSASQNGYRNGSRGTKELLLIDMGISQQVRRSHKDLSTCWIDYKKAYDTVPHAWLMRVFELYKIDATLRTFLESCMGQWRTVLRYPGCRQIQGNDEPIWIKRGIFQGDSLSPLWFCLALNPLSTLLEDSGLGYRLRRGGQVISHLLYMDDLKLFAPNNLQLMELLKITESFSSTIRMEFGVDKCAVMHVKRGEIVESEGIQLSDSIQLRSLSSSDNYKYLGMSEALGTNVTDKERFFGRLKKVLNSLLSGGNKVRAFNGWVMPVLMYSFGILKWTQTELDALDRRVRTLLTANRMHHPRSSVMRLYIPRKCGGRGFLNAKTLYNREVCNLRDYFLKTEVGMHRNVVAVDKGLTPLSMAKENWRKPVVLTTDDRKQVWQSKELHGRFYRALHGPDVDFIASVSWLRFGDLFGETEGFVCAIMDEVILTNNYRKHIMKDGTVDMCRACHRPGESIRHIISGCSRLANGEYLHRHNQVARIIHQQLALRYKLVETEVPYYKYVPDPVLEDDHVTLYWDRSIITDRTIVANKPDIVVIDRLARRAMIVDVTIPHDENLVKAEKEKQIKYLDLAHEVVDMWNVDSAVIVPIVVTANGLLAKSLDDHLSRLSLHGWIKGLIQKAVLLDTARIVRRFLSLQP

SEQ ID NO: 30084 - protein, 1197 aa, Eupsilia transversa
MLTRSAVRRARLPPPDSPLSSASPPPVPSPIVSAVSTPAAVVASSSSDEYFSPPTSPTPVRRQGRGRPPKSLGLRGQPAPSRVPAAGGCVQRMRWTQSMNENVMRAYYGSTEGGINLTAYRVRMLSLFQELEPTVNVSAQRLSDQVRVIQRNHRLDDAELDRLRSEVLSNHIIPSPAQTAELATPSNVIPPRSNRGLEQEDDRVATVSSQCNDRLRNALEDAFREYRYTPTELRPRLPRLPMHKKNRALVCALDSQLKNFFESSEDLIDTHSILYCAAVAACRLANVKFPNCDAATRPKPAVPAWQCRIERRVDGARVLIGKLYCFREGNTRPRVMRFVRRAFSGTGISPQEYMSRVTERIDFLKQKVCAWASRIRRYKRRVDRYTQNRMFQSDERWVYRAWERPEQNVADVCRPDDAATSAFWRSIWSVPVCHAEAGWMHGVERVCEAIPEMEAVIITPLDVARAVRPLPNWKSPGPDGLHNFWLKWLISSHTRLASQFQSSLESGSLPQFLTTGVTHLLHKSGSPAEPKNYRPITCLSTVYKLLTSILRAKINSHIDSHSIMSASQNGCRNGSRGTKELLLIDMAISQQVRRSRKDLSTCWIDSVPHTWLMRVLELYKIDATLRTFLMSCMGQWRTVLRYPGCRQIQGNDEPVWIKRGIFQGDSLSPLWFCLALNPLSTLLEESGLGYRLRRGGQVISHLLYMDDLKLFAHNKLRLMELLKVTETFSSAIRMEFGVDKCAVMHVKRGEIMESEGTQLSDSIHLRSLSSTESYKYLGMSEALGINVADMKQALKERFFGRLKKVLISLLSGGNKVRAFNGWVMPVLMYSFGILKWTQTELDALDRRVRTLLTANRMHHPRSSVMRLYIPRKCGGRGFLNAKTLHNREVCSLREYFLKTEEGMHRDVVAVDKGLTPLSMAKENWRKPVVLTTDDRKEVWQSKELHGRFYRVLHEPGVDFLASVSWLRFGDLFGETEGFVCAIMDEVILTNNYRRHIMKDGTVDVCRACHRPGESIRHIISGCSRLANGEYLHRHNQVARIIHQQLALKYKLADSEVPYYKYVPDPVLENDHVTLYWDRSIITDRTIVANKPDIVVIDRLARRAMIVDVTIPHDENLVKAEKEKQIKYLDLAHEVVDMWNVSSAIIVPIVVTANGLMAESLDQHLLRLSLGGWIKGLIQKAVLLDTARIVRRFLSLQP

SEQ ID NO: 30085 - protein, 1103 aa, Noctua janthe
MNENVMRAYYGATEGGINITAYRCRILSLFQALEPAVNVSAQRLSDQVRVIQNNHRLDDATLDRLRSEMQISPASNPLPSQNVTHVPAVLPLRANQHAEEEDDRTISADNLCNVELRSALEGAIREYRFMSPDLRPRLPRLPMNKKNRALVCALDALLPNFIESSTNLCDTHSILYCTAVAACRVANVKFPNTDSPTRPKSAVPAWQCRIERRINEARAFIGKLICFREGNTRPRVMRFVRRAFSGTDISPREYMSRVTERIDFLKQKVYAWANRIRRYRQRMDRYTQNRMFQSDERWVYRTWERPVTIQGVTDAHLPDNDAMNAFWRSIWSVPVGHTEGDWMRVVERACDSIPEMEVISISPLYVACAVRPLPNWKSPGPDGLHNFWIKWLQRSHACLASQFQSSLETRSLPPFFTTGVTHLLYKSGSTVEPKKYRPITCLPTVYKVLTSILRAKIVRHIDSNSIMSVSQNGCKNGSRGTKELLLIDMAISQQVRRSRRDLSTCWIDYKKAYDSVPHTWLMRVLELYKIDATLRTFLMSCMGQWRTVLLYPGCRQVLGNDEPIRIERGIFQGDSLSPLWFCLALNPLSTLLEDSGLGYRLRRGGQVISHLLYMDDFKIFAPSNLKLMELLKVTETYSSAIRMEFGLDKCVVMHVKRGEIMESVGTQLSDSIFLRSLSSTETYKYLGMSEALGINAADMKQSLKERFFGRLNKVLNSLLSGGNKVRAFNGWVMPVLMYSYGILKWTQTELDALDRKVRTLLTANRMHHPRSSVMRLYIPRKCGGRGFLNAKTLHNREVCSLREYFLETDVGMHRDVVSVDKGFTPLSLANQKPVVLDTNNRREVWQSKELHGRFFRALHGPDVDFLASVSWLRFGDLFGETEGFVCAIMDEVIMTNNFRKYIIQDGTVDICRACHRPGESIRHIVSGCSRLANGEYLHRHNLVARIIHQQLTLQYNLVSSEVPYYKYVPDPVLENGHATLYWDRSIITDRTILANKPDIVVIDRRERRAMIVDITVPHDENLVKAENDKKIKYLDLAHEIVDMWDVDSAIIVPIVVTVNGLIAESLDQHLRRLSLRGWVKGLIQKAVLLDTARIVSRFLSLEP

SEQ ID NO: 30086 - protein, 1111 aa, Erannis defoliaria
MITRSKANIAAAEPNARPPSPPAPSSPSASSGDDEFLTPRESSATSSDSDVSGPRTPAPPPPVRRGRPPLPARLGPAGLPASRPALAAGGVVRRMRWSQINNENCMRAYYGATEGGTNLSAYRVRMLPLFQALEPTVTVSAQRLSDQVRAIQRLNLLDQSLLDRLRLEAQSARATPASTRDSHVASSAPTLASMPTSAATLATPADPVVDEGDCTSMSVSSQVSEQLRRALEDAICQYRFALNSRPRLPRLPTHRRNLALMGALNALLAPYLRASKDLTDTHSILYCGAIAACRVARVRFPDTNRAPRTVGDVPAWQVRIERRISTFRTLIAKLICFSRGNNRPRVMRFVTQAFSGTGLRPQQYMASVTERIDYLKQKVYAWANRIRRYRERVDRYWQNRLFQSDQRKVYRNWEGAAQRVNDGHLPDANAMTNFWRSIWSVPVEHTEGDWMRVVERECEAIEPMGPILIDPVDVSCAIRTAQNWKSPGPDGLHNFWIKWFRCSHDRLATQFQEALELGSLPSFMTTGITFLLHKSGSTTEPKNYRPVTCLPTIYKLLTSILSTKINAHIIANNVLAPAQNGCRVGSRGTKELLLIDMAISQQVRRSKGALSAAWIDYKKAYDSVPHSWLERILELYQIDTTLKSFLGACMRQWTTVLRQPGGGNDSSDPQDLIRIERGIFQGDSLSPSWFCLALNPLSTLLKDSGLGYRLRRGSEVISHLLYMDDLKLFAPKHQDLLELLKTTQVFSSAIRMEFGVDKCAVMRVQRGKVVNSPDLQLSEIMTLRSLSEAETYKYLGMSESLGISVVDIKKSVKERFFCRLTKVLNSLLSGGNKARAFNGWVMPLLIYSFGILRWTQTELDALDRRVRQLLTAHRMLHPRSSVMRLYIPRKWGGRGFLNAKNLHNREVCSLRDYFLNNECRMHRDVVTVDKGLTPLSLANENWRRPSVLSTDDRKEVWKSKELHGRFYRALTGSDVDLLASVNWLRFGDLFGETEGFACAIADEVIKTNNYRKYIMKDGTVDICRACHRPGESLRHIISGCSHLANGEYLHRHNQVARIIHQQLALQYGLVESEVPYYKYAPAPVLENGRVLLYWDRSRHTDCHHGQDYCRQ

SEQ ID NO: 30087 - protein, 866 aa, Sesamia nonagrioides
MRFVRQAFSGTGISPREYINNVTERIDFLKQKVCAWASRIRRYKKRMDRYTQNRMFQSDERWVYRAWERPEQNEADECRPDDATTSAFWRGIWSVSVCHTEGDWTQDVEQVCEAIPEMDNILITPLDVATAVRSLPNWKSPGPDGLHNFWLKWLSSSHTCLASQFQSSLESGSLPQFLTTGITHLLHKSGSTAEPKNYRPITCLPTVYKVLTSILKAKINNHLDSNSIMSVSQNGCRSGSRGTKELLLIDMAISQQVRRSRKDLSTCWIDYKKAYDSVPHTWLMRVLELYKINATLRTFLRSYMGQWKTVLRYPGSRQIQGNDEPVWIKRGIFQGDSLSPLWFCLALNPLSTLLEDSGLGYRLKRGGQVISHLLYMDDLKLFAPNKLHLMKLLNVTETFSSGIKMEFGVDKCAVMHVKRGQIMESEGITLPDSIHLRSLSSIESYKYLGMSEALGINDADMKQSLKERFFARLKKVLNSLLSGGNKVRAFNGWAMPVLMYSFGILKWTQTELDALDRRVRTLLTANRMHHPRSSVMRLYIPRKCGGRGFLNAKTLHNREVFSLREYFLKTVVGMHHDVVTVDKGPLSMAKENWHKPIILTTDDRKMVWQSKELHGRFYRALHGPDVDFLASVSWLRFGDLFGETEGFVCAIMDEVILTNNYRRYIMKDGTIDVCRACHHPGESIRHIISGCSRLANSEYLHRHNQVARIIHQQLALKYKLVDSEVPYYKYVPDPVLENDHVTLYWDRSIITDRTIVANKPDIVVIDRLARLAMIVDVTIPHDGNLVKAEKEKQMKYLDLAHEVVDMWNVNSVVIVPIVVSANGLIAKSLDQHLLRLSLGSWIKGLIQKAVLLDTARIVRRFLSLEP

SEQ ID NO: 30088 - protein, 1204 aa, Sesamia nonagrioides
MLTRSAARQRARPPSPDSLLSSASPPPVSSATVNAVTTPAAAVALSSSDEYFSPPTSPTPVRRQGRGRPPKSLGLRGHPAPSRVPAAGGCVQRMRWSQTMNENVMRAYYGATEGGTNLTAYRERMLSLFQALEPTVNVSAQRLSDQVRVIQRNHRLDDTALDRLRSEVLSNQIAPTLTQTAALASIIDAVPPRSNHVEEEDDRVETVSSQYNDRLRSTLEDAFREYRSTPTDLRPRLPRLPMHKKNRALVSALDSQLKNVFESSEDLIDTHSILFCAAVAACRLANIKFPNCDEANRPKPAVPAWQHRIERRIDGARVLIGKLYCFREGNTRPRVMRFVRQAFSGTGISPREYLTHVTERIDFLKQKVCAWANRIRRYKRRVDRYTQNRMFQSDERWVYRAWERSELNEADVCRPDVAATSAFWRSIWSVPVCHAEDDWIQNVEQVCEMIPEMDTILITPIDVATAVRSLPNWRSPGPDGLHNFWLKWLSSSHTCLASQFQSSLESGSLPQFLTTGITHLLHKSGSTAEPNNYRPITCLPTVYKVLTSILKAKINKHLDSNSIMSVSQNGCKSGSRGTKELLLIDMAISQQVRRSRKDLSTCWIDYKKAYDSVPHTWLMRVLELYKINTTLRTFLRSCMGQWKTVLRYPGSRRIQGNDEPVWIKRGIFQGDSLSPLWFCLALNPLSTLLEDSGLGYRLKRGGQVISHLLYMDDLKLFAPNKLHLMKLLNVTETFSSGIKMEFGVDKCAVMHVERGQIMESEGITLPDSIHLRSLSSFESYKYLGMSEALGINDADMKQSLKERFFGRLKKVLKSLLSGGNKVRAFNGWVMPVLMYSFGILKWTQTELDALDRRVRTLLTANRMHHPRSSVMRLYIPRKCGGRGFLNAKTLHNREVCSLREHFLKTVVGMHHDVVTVDKGLTPLSMAKENWHKPIILTTDDRKMIWQSKELHGRFYRALHGPDVDFFLASVSWLRFGDLFGETEGFVCAIMDEVILTNNYRRYIMKDGTIDVCRACHHPGESIRHIISGCSRLANSEYLHRHNQVARIIHQQLALKYKLVDSEVPYYKYVPDPVLENDHVTLYWDRSIITDRTIVANKPDIVVIDRLARLAMIVDVTIPHDGNLVKAEKEKQMKYLDLAHEVVDMWNVNSAVIVPIVVSANGLIAKSLDQHLLRLSLGSWIKGLIQKAVLLDTARIVRRFLSLEP

SEQ ID NO: 30089 - protein, 1103 aa, Furcula furcula
MRTSLRAYYKATEGGTNLTAYRDRMLSLFQTLEPAVNVSAQRLSDQVRAIQRGHMLDDAVLDRLRSEVQGGRVVPCIPSSQAVAPAVNTAPAPRLAANSGDDRDDMSTNISTNVSTQLRSTLEDVVREYRTMPQGLRPRLPRLPMHKRNRALVCALDSLLSSYFDSSEDLADAHSLLYCAAMTACRVARVKFPNSDAATRPRPAVPAWQCRIERRIGEARVLIGKLTCFREGNTRPRVMRFVRCAFSGTGIDPREYLSRVTERIDFLKQKVCAWANRIRRYRARVDRYSQNNMFQRDQRWVYRSWERPSQIGGEVLRPDDDAMIRFWRNIWSVPVTHSEGDWIGDVRQVCEPIPEMGAITIRPQDVADAVRPLPNWKAPGPDGLHNFWLKWLRSSHACLASLFQSAVESGSLPEFLTTGITHLLHKTNSTADPKNYRPITCLPTVYKTLTSILRAKIYRHVESNSIMSACQNGCRSGARGTKELLLIDMAICQQARRNRKDLSTCWIDYKKAYDSVPHTWLMRVLELYKVNTTLRTFLASCMRQWRTVLLYPGSRQTLGDGEPIRIEQGIFQGDSLSPLWFCLALNPLSTLLKSSGLGYRLRRGGQVISHLLYMDDLKLFAPTEVQLMGLLKVTETFSSSIRMEFGVDKCAVMHVKRGRLVESRLSDSTDLRTLSATETYKYLGMSQALGINETDMKQSLRERFLGRLRKVLKSLLSGGNRVCAYNGWVMPVLMYSFGILKWTQTELDTLDRTVRTLLTAYRMHHPRSSVMRLYIPRKCGGRGFLNAKTLHNREIYNLREYFLHCGGEMHTDVVAVDSGLTPLSLAKGNWRKPVVHTTGDREAVWQSKELHGRFYRALHGPDVDFSASVAWLRFGDLFGETEGSVCAIMDEVVMTNNYRKYILRDGTIDICRACHRPGESLRHIISGCSRLANGEYLHRHNQVARIIHQQLALKYRLVMSEVPYYRYVPEPVLEDGHITLYWDRSIITDRTIVANRPDIVLIDRTERRAMIVDVTVPHDENLVKAEKDKECKYLDLAHEVVDLWDIDKAIIVPIVVSAHGLMAKSLDKHLKRLTLDGWIKGQMQKAVLLETARIVRKFLTLEP

SEQ ID NO: 30090 - protein, 1197 aa, Mythimna ferrago
MLTRAAARRARHPPPGSSLSSASPPPDSGSPVSPTAAVASSSSDEYFSPPTSPTPVRRPGRGRPPKSMGPRGQPAPSRVPAAGGCVQRMRWTQSMNENVMRAYYGSTEGGTNLTAYRERMLSLFQDLEPTVNVSAQRLSDQVRVIQRNHRLDDAALDRLRSEILSNQIVSTSTQTQTAATPTTNAISPRSDHNNDDADDRVVIVSSQCNERLRSALEDALCEYMSTPTELRPRLPRLPMHKKNRALVCALDSLLKNIFESSENLVDTHSILYCGAVAACRLAKIKFPNIDGTIRPKTAVPAWQCRIERRIDEARVLIGKLHCFREGNTRPRVMRFVRRAFLGTGISPQGYMSRVTERIDFLKQKVCAWASRIRRYKRRVDRYSQNRMFQSDERWVYRAWERPEHSVTDGCRPDDLATITFWRNIWSVPVSHTEGGWMRDVERVCEAIPEMEKVTITPEDVARAVRPLPNWKSPGPDGLQNFWLKWFSSSHAPLASQFQSILESGSLPEYLTTGVTHLLHKTGNPVDPKNYRPITCLSTVYKLLTSILRAKINIHIENNQIISPSQNGCRNGSRGTKELLLIDMAISQQTRRSRKDLSTCWIDYKKAYDSVPHTWLMRVLELYKIDITLRTFLESCIRQWKTVLRYPGCRPIQGNDEPIWIKRGIFQGDSLSPLWFCLALNPLSTLLEDSGLGYRLRRGGQVISHLLYMDDLKLFAPSNLQLMELLKVTETFSSAIRMEFGVDKCAGMHVKRGEIMESEGIQLPDSIHLRSLSSTETYRYLGMSEALGINNADMKQSLKERFFGRLKKVLNSLLSGGNKVRAFNGWVMPVLMYSFGILKWTQTELDALDRRVRTLLTANRMHHPRSSVMRLYIPRKCGGRGFLNAKTLHNREVCSLREYFLKTDVGMHRDVVAVDKGLTPLSMAKEDWHKPVIMTTDNRKEIWKGKELHGRFFRALHEPDVDFLAWLRFSDLFGETEGFVCAIMDEVILTNNYRRYIMKDGTVDVCRACHRPGESIRHIISGCSRLANGEYLHRHNQVARIIHQQLALKYNLVDLEVPYYKYVPDPVLENDHVTLYWDRSIITDRTIVANKPDIVVIDRLARRAMIVDITIPHDENLVKAEKEKQMKYLDLAHEVVDMWNVDSAIIVPIVVTANGLIAKSFDDHLSKLSLRGWIKGQIQKAVLLDTARIVRKFLSLEP

SEQ ID NO: 30091 - protein, 1185 aa, Phlogophora meticulosa
MLTRSAARRARPPPPASSLSSASSPPKPSTIVSTVKPAVPVASSSSDEYFSSPTSPPPACRRRGRRPPDGLGPRGPPASDRVPAPGGSVQRMRWTQSINENVMRSYYGATEGGNNLTAYRVRMLSLFQVLEPAVNVSAQRLSDQVRVIQRNHMLDDVVLDRLRTEMQSSRVITSPSHTVVPPQYNIVSSSFADGEGSDKVTNVSTQCNEELRSALEGAIREYRFMLPALRPRLPRLPMHNKNRALVAALDSQLSNYFDNCDDLTDAHSILYCAAVAACRVAHVKFPNDIATRPKPAVPAWQCRIERRIAGARALIGKLVCYREGNTRPRVMRYVRRAFLGTDISPRDYMSRVTERIDFLKQKVYAWASRIRRYKRRVERYTQNRTFQSNERWVYRAWERPVQGVTDTHLPDDDVMCSFWRNIWSVPVSHTEGDWTREVERACDPIPQMGAITISPQDVARAVRPLPNWKSPGPDGLHNFWIKWLQKSHARLASQFQSALKTGSLPQFLTTGITHLLHKSGNTAEPKNYRPITCLPTVYKVLTSILRVKINNHIDSNSIMSASQNGCRNGSRGTKELLLIDTAISQQVRRSRKDLSTCWIDYKKAYDSVPHTWLKRVLELYKVDATLRTFLTSCMGQWRTVLRYPGCRQIQRNSEPIRIERGIFQGDSLSPLWFCLALNPLSTLLEDSGLGYRLKRGGQVVSHLLYMDDLKLFAPSDLQLMELLTVTKTFSSAIRMEFGVDKCAVMHVKRGKIVESVGTQLPDFINFRAQALGINAADMKQSLKERFFGRLKKVCNSLLSGGNKVRAFNGWVMPVLMYSFGILKWTQTELDALDRRVRTFLTASRMHHPRSSVMRLYIPRKCGGRGFLNAKTLHNREICSLRDYFLETDMGMHRDVVAVDQGLTPLSLAKENWRKPVVLDTNDRKEVWQSKELHGRFFQALHGPDVDQLASVSWLRFGDLFGETEGFVCAIMDEVIMTNNYRRFIVKDGTVDICRACHRPGESIRHIISGCSRLANEEYLHRHNLVARIIHQQLALKYSLVESEVPYYKYVPDPVLENGSVTLYWDRSIITDRTIVANKPDIVVMDRIERRATIIDVTVPHDGNLVKAEKDKQIKYLDLAREVVDMWDVDSAIVVPIVVSANGLIAKSLDQHLRRLALGSWIKGLIQKAVLLDTARIVRRFLSLEP

SEQ ID NO: 30092 - protein, 1089 aa, Mesoligia furuncula
MRWTQSMNENVMRAYYGSTEGGINLTAYRDRMLSLFQEPTVNVSAQRLSDQVRVIQRNHRLDDIALDRLRSEVLSNHIVSTSAQTAAQVSTVDAIPPRFNRVEEEDDRVDTVSSQCNVRLRSALEDALREYRSTPTELRPRLPRLPMHKKNRALVCALDSQLKNFFESSEDLVDTHSILYCAAVAACRLANVKFSSCDGATRPKPAVPAWQRRIERRIDGARVLIGKLYCFREGNTRPRVMRFVRRAFSGTGISPREYMSRVTERIDFLKQKVCAWASRIRRYKRRVDRYTQNRMFQSDERWVYRAWERPEQNVTDVYRPDDAATSAFWCSIWSVPVCHTEAGWMQDVERVCESVPEMEKVLITPSDVARAVRPLSNWKSPGPDGLHNFWLKWLISSHTCLASQFQSSLESGSLPQFLTTGVTHLLHKSGSPAEPENYRPITCLSTVYKLLTSILRAKINKHIESNSIMSASQNGCRNGSRGTKELLLIDMAISQQVRRSRKDLSTCWIDYKKAYDSVPHTWLMRVLELYKIDATLRTFLESCMGQWKTVLRYPGCRQIQGNDEPVWIKRGIFQGDSLSPLWFCLALNPLSTLLEDSGLGYRLRRGGQVISHLLYMDVIKMEFAKMEFGVDKCAVMHVKRGEIMESEGIQLSDSISLRSLSSSESYKYLGMSEALGINDADMKQSLKERFFCRLKKVLISLLSGGNKVRAFNGWVMPVLMYSFGILKWTQTELDALDRRVRTLLTANRMHHPRSSVMRLYIPRKCGGRGFLNAKTLHNREVCSLREYFLKAEVGMHRDVVAVDKGLTPLSMAKENWRKPVVLSTDDRKRVWQSKELHGRFYRALHEPGVDFIASVSWLRFGDLFGETEGFVCAIMDEVILTNNYRRHIMKDGTVDVCRACHRPGESIRHIISGCSRLANGEYLHRHNQVARIIHQQLALKYKLVDSEVPYYKYVPDPVLENDHVTLYWDRSIITDRTIVANKPDIVVIDRLARRTMIVDVTIPHDGNLVKAEKEKQIKYLDLAHEVVDMWNVSSAIIVPIVVSANGLMAESLDQHLSRLSLGGWIKGLIQKAVLLDTARIVRRFLSLEP

SEQ ID NO: 30093 - protein, 1110 aa, Xestia xanthographa
MKWTQSMNENVMRAYYGSTEGGTNLTAYRVKMLSLFQDLEPTVIVSAQRLSDQVRVIQRSHRLDDAALDRLRSEVLSNLIVLTPTQTAVQVSAIDATPPRLNPAVVEEDDGVATVSSQCNDRLRSALENALHEYRSTPTELRPRLPRLPMHKKNRALVCALDSQLKNIFESSENLVDTHSILYCGAVAACRIANVKFPNCDVATRPKPAVPAGQRRIERRIDGARVLIGILYCFREGNTRPRVMRFVRRAFSGTEISPQEYMSRATERIDFLKQKVYAWANRIRRYKRRVDRYSQNRMFQSDERWVYRAWERPEQNMTDVCRPDDAATSSFWRSIWSVPVCHTEADWMRDVERVCEPIPEMEPIFITPLDVARAVRPLPNWKSPGPDGLHNFWLKWFSSSHTCLASQFQSSLESGSLPQFLTTGVTHLLHKSGSPAEPKNYRPITCLSTIYKLLTSILRVKINTHIDKNSIMSASQNGCRNGSRGTKELLLIDMAISQQVRRSRKDLSTCWIDYKKAYDSVPHTWLMRVLELYKVDTTLRTFLESCMGQWKTVLRYPGCRQIQGSDEPVWIKRGIFQGDSLSPLWFCLALNPLSTLLENSGLGCRLKKDGQVISHLLYMDDLKLFAPNKLRLMELLKITETFSSAIRMEFGVDKCAVMYVKRGEIMESEGLQFSDSIHLKSLSSSETYKYLGMSEALGINVTDMKQSLRERFFGRLRKVLNSLLSGGNKVRAFNGWVMPVLMYSFGILKWTQTELDALDRRVRTLLTESRMHHPRSLVMRLYIPRKCGGRGFLNAKTLHNREVCSLREYFLKAEVGHRDVVAVDKGLTPLSMAKENWHRPEVLTTDDRKEVWQGKELHGRFYRALHGPDVDFIASVSWLRFGDLFGETEGFVCAIMDEVMLTNNYRKYIMKDGTVDVCRACHLPGESIRHIISGCSRLANGEYLHRHNQVARIIHQQLALKYKLVEPEVPYYKYVPDPVLENDHVTLYWDRSIITDRTIVANKPDIVMMDRSARRVMIIDVTIPHDENLVKAEKEKQIKYLDLAHEVRGMWNMNSVIIVPIVVTANGLIAKSFDDHLSKLSLGGWIKGLIQKAVLLDTARIVRRFLSLQP

SEQ ID NO: 30094 - protein, 1135 aa, Biston betularia
MWTRSRTAAASGLHDAHIPSPPAPSTPSASSGDEEFATPLATSASSSSSDVSGPRTPAPPPPARRGRPPLPARLGPAGQSASRSALAAGGVVRRMRWSQTNNENCMRAYYGATEGGINLSAYRVRMLPLFQALEPTVAVSTQRLSDQVRAIQRLQLLDQSVLDRLRLEALPARPTPVSTRDSPVASSAPTLVSVPTSMATLATPTDPVVDVGECTSMAVCSQVSEHLRRTLEDAICQYRFAPDSRPRLPRLPTHRRNLALMGALNALLAPYLRASEDLTDTHSILYCGAIAACRVARVKFPDTNRAPRPAGGVPAWQLRIERRISTFRTLIAKLICFSRGNNRPRVMRFVTQAFAGTDIRPQHYLASVTERIDYLKQKVYAWANRIRRYRERADRYWQNRVFQSDQRKVYRDWEGTGQRVSDRQLPDTSVMTEFWRGIWSLPVEHTEGDWMRVVERECESIESMGSVLIDPADVSCAIRTAQNWKSPGPDGLHNFWIKWIRCSHDRLATQFQEALELGSLPCFMTTGVTFLLHKTGSTTEAKNYRPITCLPTIYKLLTSILRTKINAHVVANNVLAPAQNGCRVGSRGTKELLLIDMTISQQVRRNKGALSTAWIDYKKAYDSVPHSWLERVLELYKIDTTLKSFLGACMRQWTTVLRQPGSGDGSSEPQDLIRIERGIFQGDSLSPLWFCLALNPLSTLLKESGLGHRLRSGGEVISHLLYMDDLKLFAPKRPDLMELLKTTQVFSNAIKMEFGVDKCAVMHVQRGEVVNCPDLQLSETMTFRSLSEAETYKYLGMSESLGIAVVDNKRSVKERFFCRLTKVLNSFLSGGNKVRAFNGWVMPLLIYSFGILRWTQTELDALDRRVRQQLTTHRMLHPRSSVMRLYIPRKLGGRGFLSAKNLHNREVCSLRDYFRDNECGMHRDVVAVDKGLTPLSLANENWRKPSVLSTEDRKEVWKSKQLHGRFYRVLTGPDVDMLASVNWLRFGDLFGETEGFACAIADEVIKTNNYRKYIMKDGTVDICRACHRPGESLRHIISGCSHLANGEYLHRHNQVARIIHQQLALQYGLVESEVPYYKYAPAPVLENGRALLYWDRSIITDRTIVANKPDIVVVDRAQRRAVLVDITIPHDENLV

SEQ ID NO: 30095 - protein, 960 aa, Hecatera dysodea
MHKKNRALVCALDSLLQNTFVSSENLVDTHSILYCGAVAACRLANVKFPSGDEAIRPKPAAPAWQCRIERRIDEARALIGKLYCFREGNTRPRVMRFVRRAFAGTGISPHEYTSSITERIDFLKQKVCAWANRIRRYKRRVDRYSQNRMFQSDERWVYRTWERPEQSVTDVCRPDDIATTTFWRSIWSVPVRHTEGDWMRDVERVCEAIPQMEKITITPTDIATAVRPLPNWKSPGPDGLHNFWLKWYSSSHAVLASQFQSSLESGSLPQFLTTGVTHLLHKTGSPAEPKNYRPITCLSTVYKLLTSILRVKINEHIESNSIMSSSQNGCRKGSRGTKELLLIDMAISQQVRRSRKDLSTCWIDYKKAYDSVPHTWLMKVLELYKIDATLRTFLESCMRQWKTVLRYPGCRPIQGSDEPIWIKRGIFQGDSLSPLWFCLALNPLSTLLEDSGLGYRLRRGGQAISHLLYMDDLKLFAPNNLRLMELLKVTETFSSAIRMEFGVDKCAVMHVKKGEIMESEGIQLSDSIQVRSLSSTETYKYLGMSEALGINGADMKQSLKERFFGRLKKVLNSLLSGGNKAFNGWVMPVLMYSFGILKWTQTELDALDRRVRTLLTANRMHHPRSSVVRLYIPRKCGGRGFLNAKTLHNREMCSLREYFLETDVGMHRDVVAVDKGLTPLSMAKENWRKPVIHTTDDRKEVWKGKELHGRFYRALYGSDVDFSASVAWLRFGDLFGETEGFVCAIMDEVILTNNYRRHIMKDGTVDVCRACHRPGESIRHIISGCSRLANSEYLHRHNQVARIIHQQLALKYKLVDSEVPYYKYVPYPVLENGHVTLYWDRSIITDRTIVANKPDIVVIDRLARRTMIIDVSIPHDENLVKAEKEKQIKYLDLAHEVVDMWDVDSAVIVPIIVTANGLMAKSFDDHLSKLALRSWVKSLIQKAVLLDTARIVRRFLSLQP

SEQ ID NO: 30096 - protein, 1200 aa, Noctua fimbriata
MLTRAAARRARLPPPDPSHSSASPPPESSHIVSAVTPAVAVASSSSDEYFSPPTSPTPVRRQGRGRPPRSLGLRGHPAPSRVPAAGGCVQRMRWTHSINENVMRAYYGSTEGGTNLTAYRVGMLSLFQVLEPTISVSAQRLSDQVRVIQRNHMLDDAVLDRLRSEVLSNRIVFTPAQTAVQASVIDATPPRFNPAVVEEDDRVAVVSSQCNDRLRSALEDALREYRSTPTELRPRLPRLPMHNKNRALVCALDSQLKNLFESSENLVDTHSILYCGAVAACRLANVKFPNCDVATRPKPAVPAWQRRIERRIDGARVLIGKLHCFREGNTRPRVMRFVRRAFSGTGISPQEYMSRVTERIDFLKQKVYAWANRIRRYKRRVDRYSQNRMFQSDERWVYRAWERPDQNMTDVCRPDDAATSSFWRSIWSVPVCHTEADWMRDVEQVCEPIPEMEPILITPLDVARAVRPLPNWKSPGPDGLHNFWLKWLSSSHTCLASQFQSSLESGSLPQFLTTGVTHLLHKSGSPAEPKNYRPITFLSTVYKLLTSILRAKINTHIDKNSIMSASQNGCRNGSRGTKELLLIDMAISQQVRRSRKDLSTCWIDYKKAYDSVPHTWLMRVLELYKIDATLRAFLESCMGQWRTVLRYPGCRQIQGNDEPVWIKRGIFQGDSLSPLWFCLALNPLSTLLEDSGLGYRLRRGGQVISHLLYMDDLKLFAPNKLRLMELLKVTETFSSAIRMEFGVDKCAVMYVKQGEIMESEGIQLSDSIHLRTLSSTESYKYLGMSEALGINVTDMKQSLKERFFGRLNKVLHSLLSGGNKVRAFNGWVMPVLMYSFGVLKWTQTELDALDRRFRTLLTANRMHHPRSSVMRIPRKCGGRGFLNAKSLHNREMCSLREYFLKVDLGMHRDVVAVDKGLTPLSMAKENWRKPEVLTTDDRKEVWQGKELHGRFYRALHGPDVDFLASVSWLRFGDLFGETEGFVCAIMDEVMLTNNYRKYIMKDGTVDVCRACHRPGESIRHIISGCSRLANGEYLHRHNQVARIIHQQLALKYKLVESEVPYYKYVPDPVLEKDHVTLYWDQSIITDRTIVGNKPDIVVIDRSARRVMIVDVTIPHDENLVKAEKEKQIKYLDLAHEVVDMWNVNSAIIVPIVVTANGLIAKSLDDHLSKLSLGGWIKGLIQKAVLLDTARIVRRFLSLEP

SEQ ID NO: 30097 - protein, 865 aa, Sesamia nonagrioides
MRFVRQAFSGTGISPREYINNVTERIDFLKQKVCAWASRIRRYKKRVDRYTQNRMFQSDERWVYRAWERPEQNEADECRPDDATTSAFWRGIWSVSVCHTEGDWTQDVEQVCEAIPEMDNILITPLDVATAVRSLPNWKSPGPDGPHNFWLKWLSSSHTCLASQFQSSLESGSLPQFLTTGITHLLHKSGSTAEPKNYRPITCLPTVYKVLTSILKAKINNHLDSNSIMSVSQNGCRSGSRGTKELLLIDMAISQQVRRSRKDLSTCWIDYKKAYDSVPHTWLMRVLELYKINATLRTFLRSCMGQWKTVLRYPGSRQIQGNDEPVWIKRGIFQGDSLSPLWFCLALNPLSTLLEDSGLGYRLKRGGQVISHLLYMDDLKLFAPNKLHLMKLLNVTETFSSGIKMEFGVDKCAVMHVKRGQIMESEGITLPDSIHLRSLSSIESYKYLGMSEALGINDADMKQSLKERFFGRLKKVLNSLLSGGNKVRAFNGWVMPVLMYSFGILKWTQTELDALDRRVRTLLTANRMHHPRSSVMRLYIPRKCGGRGFLNAKTLHNREVFSQFLKTVVGMHHDVVTVDKGLTPLSMAKENWHKPIILTTDDRKMVWQSKELHGRFYRALHGPDVDFLASVSWLRFGDLFGETEGFVCAIMDEVILTNNYRRYIMKDGTIDVYRACHHPGESIRYIISGCSRLANSEYLHRHNQVARIIHQQLALKYKLVDSEVPYYKYVPDPILENDHVTLYWDRSIITDRTIVANKPDIVVIDRLARLAMIVDVTIPHDGNLVKAEKEKQMKYLDLAHEVVDMWNVNSAVIVPIVVSANGLIAKSLDQHLLRLSLGSWIKGLIQKAVLLDTARIVRRFLSLEP

SEQ ID NO: 30098 - protein, 953 aa, Lymantria dispar
MHRKNRRLVNTLDSLLGSYLSTSDNISNTFNPVLCGRRMARLKFLKTESAIRQKEAIPVWQRRIECRVREARVLIGKLSCFRTGNTRPRVMRYVRRAFFGTDIKPEEYKARVTERIDYLKQKVYAWANRIRRYKKRVNRYSMNRMFESDQKSVYRNWERPCQLVDDERLPDAEATNTFWRSIWSVPVVHSEGDVKRACENIPQMENIIIDQEDVACAVRSLSNWKSPGPDGLHNFWLKWLHSAHARLASHFQSALVTGMLPEFMTTGSTHLLHKTGSTTEPSNYRPITCLPSVYKLLTFILRNKIAKHIHLNSVMSISQNGCRNGGRGTKELLLIDMAISQQVRRNRKDLSTCWIDYRKAFDSVPHTWLLRVLELYKVDSTLCTFLKACMGQWKTILRYPTCRLNRGSTEPIYVRRGIFQGDSLSPLWFCLAMNPLSTLLEHSGLGCRLRRGGQTISHLLYMDDLKLFTPNNTQLVELLKITETFSNSISMEFGVDKCAIMHVKQGEVVEVDRDQLFDTLQFRPLHRTETYKFLGMSQALNINEADMKQALRERFLGRLKVLNSLLSGGNKVRAYNAWVMPLLMHSFGILKWTQTKLDTLDRKVRTLLTSHRMHHPRSSIMRLYIPRRCGGRGFLNAKALHNREVCNLRDYFLKKTSGVHLDMMKVDSGLTPLGLAKENWRRPVVLSTTDRENVWQSKELHGRFYGALHAPEVDLSASVTWLRFGNLFGETEGFVCAITDEVIKTNNYRKYILRDGTADICRACHRPGESLRHIVSGCSRLANGEYLHRYNQVARIIHQQLALRYKLVSVEMPYYRYGPEPVLENSRVTLYWDRSIITDSTIVANKPDIVVIDRLERRAMIVDITVPHDGNLVKAEKDKQIKYQDLAHEIVDMWDVDSAIVVPIVISTNRIIAKSLDQHLKRLTLGSWIAGLMQKAVLLDTARIVRKFLSLEP

SEQ ID NO: 30099 - protein, 974 aa, Lymantria dispar
MHRKNRRLVNTLDSLLGSYLSTSDNISNTFNPVLCGRRMARLKFLKTESAIRQKEAIPVWQRRIECRVREARVLIGKLSCFRTGNTRPRVMRYVRRAFFGTDIKPEEYKARVTERIDYLKQKVYAWANRIRRYKKRVNRYSMNRMFESDQKSVYRNWERPCQLVDDERLPDAEATNTFWRSIWSVPVVHSEGDVKRACENIPQMENIIIDQEDVACAVRSLSNWKSPGPDGLHNFWLKWLHSAHARLASHFQSALVTGMLPEFMTTGSTHLLHKTGSTTEPSNYRPITCLPSVYKLLTFILRNKIAKHIHLNSVMSISQNGCRNGGRGTKELLLIDMAISQQVRRNRKDLSTCWIDYRKAFDSVPHTWLLRVLELYKVDSTLCTFLKACMGQWKTILRYPTCRLNRGSTEPIYVRRGIFQGDSLSPLWFCLAMNPLSTLLEHSGLGCRLRRGGQTISHLLYMDDLKLFTPNNTQLVELLKITETFSNSISMEFGVDKCAIMHVKQGEVVEVDRDQLFDTLQFRPLHRTETYKFLGMSQALNINEADMKQALRERFLGRLKVLNSLLSGGNKVRAYNAWVMPLLMHSFGILKWTQTKLDTLDRKVRTLLTSHRMHHPRSSIMRLYIPRRCGGRGFLNAKALHNREVCNLRDYFLKKTSGVHLDMMKVDSGLTPLGLAKENWRRPVVLSTTDRENVWQSKELHGRFYGALHAPEVDLSASVTWLRFGNLFGETEGFVCAITDEVIKTNNYRKYILRDGTADICRACHRPGESLRHIVSGCSRLANGEYLHRYNQVARIIHQQLALRYKLVSVEMPYYRYGPEPVLENSRVTLYWDRSIITDSTIVANKPDIVVIDRLERRAMIVDITVPHDGNLVKAEKDKQIKYQDLAHEIVDMWDVDSAIVVPIVISTNRIIAKSLDQHLKRLTLGSWIAGLMQKAVLLDTARIVRKFPLFGALTTDSLVLVLAAGGSSRFLYF

SEQ ID NO: 30100 - protein, 1131 aa, Amphipyra tragopoginis
MLTRSRAKATRPPSSASSLSSASQPPEPAPTVSDVTPAAAVASSSSDEYFSPPTSPPPPRRRGRGRPPASIGPRGPPASDRVPAPGGSVQRMRWTQAMNENCMRAYFGATEGGTNLTAYRGRMLSLFQALEPAVNVSAQRLSDQVRVIQRDHRLDGAALDRLRSEMQSSHVAPLQSQTAAQSQVPSVVAPRSIPADEESDDRVTNVSTQSNEQLRSALELAIREYRSTLPDLRPRLPRLPMNKKNKALMCALDPLLSSYFDGSEDLADTHSILYCAAVAACRVAHVKVDNNDRATRPKPAVPAWQCRVERRIGGARALIGKLICFREGNTRPRVMRFVRRAFSGTDTSPRDYMSCVTERIDFLKQKVYAWANRIRRYKRRVERYTQNRMFQRDQRWVYRAWERADQGVGDAHLPDDDATNSFWRSIWSVPVSHTEGDWMRDVERVCEPILDMGAISISPQDVASAVRPLPNWKSPGPDGLHNFWLKWLRSSHARLASQFQSSLETGTLPQFLTTGVTHLLHKSGSTAEPKNYRPITCLPTVYKLLTSILRCKINSHIENNPIMSVSQNGCRNGSRGTKELLLIDMAISQQVRRSRKDLSTCWIDYKKAYDSVPHTWLMRVLELYKVNTTLCAFLTSCMGQWRTVLHYPGCRQIQGIGEPIRIERGIFQGDSLSPLWFCLALNPLSTLLEGSGLGYRLRRGGQVISHLLYMDDLKLFAPNNLQLLDLLKVTETFSNSIRMEFGVDKCAVMHVKRGRIMESVGTQLSDSIQLRSLSSTETYKYLGMSEALGINEADMKQSLRERFYGRLKKVLKSLLSGGNKVRAFNGWVMPVLMYSFGILKWTQTELDALDRRVRTLLTAYRMHHPRSSVMRLYIPRKCGGRGFSALHGPDVDFLASVAWLRFGDLFGETEGFVCAIMDEVMMTNNYRKYVVKDGTVDICRACHCPGESIRHIVSGCSRLANGEYLHRHNLVARIIHQQLALKYNLVDAEVPYYKYVPDPVLENGHVTLYWDRSIITDRTIVANKPDIVVIDRSERRAMIVDITVPHDENLVKAENDKKIKYLDLAHEVVDMWDIDSAVIVPIVVTANGLIAKSLDQHLMRLSLGGWIKGLIQKAVLLDTARIVRKFLSLEP

SEQ ID NO: 30101 - protein, 1202 aa, Amphipyra tragopoginis
MLTRSRAKTQGTRLPSSASSLSSASQPPEPASTVSDVTPAAAVASSSSDEYFSPPTSPPPRRRGRGRPPASLGPRGPPASDRVPAAGGSVQRMRWTQSMNENCMRAYFGATEGGTNLTAYRGRMLSLFRTLEPAVNVSAQRLSDQVRVIQRDHRLDDAALDRLRSEVQSSHVISLQPQTAVQLQVPTVVPPRSIFADGESDDRVTNVSTQCSDQLRSALELAIREYRSTPPDLRPRLPRLPMNKKNRALMCALDSLLSSYFDGSEDLADTHSILYCAAVAACRVARVKFDNNDRATRPKPAVPAWQCRIERRIGGARALIGKLICFREGNTRPRVMRFVRRAFSGTDTSPRDYMSRVTERIDFLKQKVYAWANRIRRYGRRVERYTQNRMFQRDQRWVYRAWERSDQGVGDAHLPDDDAMNSFWRSIWSVPVSHTEGDWMRDVERVCEPILDMGAISISPQDVASAVRPLPNWKSPGPDGLHNFWLKWLRSSHARLASHFQSSLETGTLPQFLTTGVTHLLHKSGSTAEPKNYRPITCLPTVYKLLTSILRCKISCHIENNSIMSASQNGCRNGSRGTKELLLIDMAISQQVRRSRKDLSTCWIDYKKAYDSVPHTWLMRVLELYKVNTTLCTFLTSCMGQWRTVLRYPGCRQIQGIGEPIRIERGIFQGDSLSPLWFCLALNPLSTLLEGSGLGYRLRRGGQVISHLLYMDDLKLFAPNNLQLLELLKVTETFSNAISMEFGVDKCAVMHVKRGRIMESVGTQLSDSINLRSLSSTETYKYLGMSEALGINEADMKQSLRERFYGRLKKVLKSLLSGGNKVRAFNGWVMPVLMYSFGILRWTQTELDALDRRVRTLLTAYRMHHPRSSVMRLYIPRKCGGRGFLNAKTLHNREVCSLREYFSQADVGMHRDVVAVDKGFTPLSLAKENWRKPIVLDTNGRKEVWRSKELHGRFYRALHGPDVDFLASVAWLRFGDLFGETEGFVCAIMDEVMTNNYRRYIVKDGTVDICRACHCPGESIRHIVSGCSRLANGEYLHRHNLVARIIHQQLALKYNLVDAEVPYYKYVHDPVLENGHVTLYWDRSIITDRTIVANKPDIVVIDRSERRAMIVDITVPHDENLVKAENEKKIKYLDLAHEVVDMWEVDSAAIVPIVVTANGLIAKSLDQHLMRLSLGSWIKGLIQKAVLLDTARIVRKFLSLEP

SEQ ID NO: 30102 - protein, 992 aa, Autographa pulchrina
MTVSTQCSELIRSTLEDAIRDYRTSPPDRRPRLPRLPMHNRNKAIMGALDSLLPIYFDSSEDLRDTHSILYCAAFTACRVANVAICYSNIAARPKPAVPAWQCRIEQRVAEARTLIAKLIAFKQGNSRPRVMRFVRRAFAGTDISSSEYTARVTERIDLFKQKVCAWASRIRRYKRRVERFYLNRMFQKDQRWVYRAWERPASGVDGGCLPDGDATNSFWRSIWSVPVSHSEGGWMREVEQVCEPIQEMGAITISPQDVANAVRPMANWKTPGPDGLQNFWLKWLRSSHGCLASQFQSAVESASLPQFLTTGSTHLLHKTGSATDPKNYRPITCLPTVYKLLTSILRAKINEHVVSFSIMSASQNGCRSGSRGTKELLLIDTAICQQVRRSKKDLSTCWIDYKKAYDSVPHTWLMRVLELYKINATLRAFLVSCMGQWSTVLHYPGCRDIQQGGEPIRIERGIFQGDSLSPLWFCLALNPLSTLLENSRLGYSLRRGSQVISHLLYMDDLKLFANSGLQLKLLKITESFSNSIRMEFGVDKCAVMHVKRGGVVESQGIQLSDSINLRSLSATETYKYLGMSEALGINGADVKQSLQARFFGRLNKVLKSVLSGGNKVRAFNGWVMPVLMYSFGVLKWTQTELDALDKRVRTLLTANRMHHPRSSVMRLYIPRKCGGRGFLNAKTLHNREVCNLREYFLQVDVGMHRDVVVVDKGFTPLSLGKENWHKPVVLSVKDRKDVWQNKELHGRYYRSLHGSDVAWLRFGDLFGETEGFVCAIMDEVIMTNNYRKYIIKDGTVDICRACHCPGESLRHIISGCSRLANGEYLHRHNQVARIIHQQLALRYKLVESEMPYYRYVPDPVLENGRVTLYWDRSIITDRTIVANKPDIVVIDRSERRAIIVDVTIPHDENLVKAEKEKQLKYLDLAHEVVDMWEVDSAIIVPIVVTANGIIAKSLDQHLKRLSLGAWVKGLIQKTVLLDTARFVRRFLSLEP

SEQ ID NO: 30103 - protein, 1199 aa, Cosmia trapezina
MLTRSAARARPPPPDSSLSSASPPPVSSPTVSAVTTPAAVVASSSSDEYFSPPTSPIPVRRQGRGRPPKSLGLGGQPAPSRVPAAGGCVQRMRWTQSMNENVMRAYYGSTEGGTNLTAYRVRMLSLFQELEPTVNVSAQRLSDQVRVIQRNHRLDDAALDRLRSEILSDRIVSTQAQTAVQDSIIDALPPRSNHVVEEEDDRVATVSSQSNDRLRSALEDAFREYRSTPTELRPRLPRLPMHKKNRALVCALDSHLKDFFESSEDLVDTHSILYCAAVAACRLANVKFPNCDGANRSKPAVPAWQCRIERRIDGARVLIGKLYCFREGNTRPRVMRFVRRAFSGTGISPPEYMSRVTERIDFLKQKVCAWASRIRRYKRRVDRYTQNRMFQSDERWVYRAWERPEQNVTDVCRPDDAATSAFWRSIWSVPVCHAEAGWMQDVERVCETIPEMETVLITPLDVARAVRPFPNWKSPGPDGLHNFWLKWLISSHTCLASQFQSSLESGSLPQFLTTGVTHLLHKSGSPVEPKNYRPITCLSTVYKLLTSILRAKINTHIASNSIISASQNGCRTGSRGTKELLLIDMAISQQVRRSRKDLSTCWIDYKKAYDSVPHTWLLKVLELYKIDATLRTFLESCMGQWRTVLRYPGCQQIRGSDEPVWIKRGIFQGDSLSPLWFCLALNPLSTLLEDSGLGYRLRRGGQVISHLLYMDDLKLFAPNELRLMELLKVTETFSGAIRMEFGVDKCAVMHVKRGEIMESEGIQLTDSIYLRSLSSSETYKYLGMSEALGINVADVKQSLKERFFGRLKKVLISLLSGGNKVRAFNGWVLMYSFGILKWTQTELDALDRRVRTLLTANRMHHPRSSVMRLYIPRKCGGRGFLNAKTLHNREVCSLREYFLKADVGMHRDVVAVDKGLTPLSMAKENWRKPVLLTTDDRRKVWQSKELHGRFYRALHEPGVDFLASVSWLRFSDLFGETEGFVCAIMDEVILTNNYRRYIMKDGTVDVCRACHRPGESIRHIISGCSRLANGEYLHRHNQVARIIHQQLALKYKLVDSEVPYYKYVPDPVLENDHVTLYWDRSIITDRTIVANKPDIVVIDRLARRAMIVDVTIPHDGNLVKAEKEKQIKYLDLAHEVVDMWNVDSAVIVPIVVTANGLIADSLDQHLSRLSLGGWIKGQIQKAVLLDTARIVRRFLSLQP

SEQ ID NO: 30104 - protein, 1203 aa, Amphipyra tragopoginis
MLTRSRAKTRAQTTQPPPPASSLSSASQPPESSPNVSAVTPAAAVASSSSDEYFSPPTSPPPARRRGGRRPPDRLGPRGPLASDRVPAPGGSVSRMRWTQTINENAMRAYFGATEGGTNLTAYRSRMLSLFQVLEPTVNVSAQRLSDQVRAIQRGHMLDDTVLDRLRSEIQCSPVISSSSQAPGLISRNVPVASPRLQYVDEEDDDRATAVSIQCNEQLRRALEDAMREYRSTRPELRPRLPRLPMHRRNRALMCALDSLLSNYFDSSEDLGDTHSILYCAAVAACRVAHVKFINNERATRPKNAVPAWQCRIERRIAEARALIGKLICFGEGNTRPRVMRFVRRAFSGTDVSPREYMSRVTERIDFLKQKVYAWANRIRRYRRRVDRYNQNRMFRSDERWVYRNWERPDQSVGAAHLPDDDAMNSFWRSIWSVPVTHTEGDWMRDVERMCEPILDMGAIIISPQDVAGAVRPLPNWKSPGPDGLHNFWLKWLRSSHARLASQFQSSLETGTLPQFLTTGVTHLLHKSGSTAEPKNYRPITCLPSVYKVLTSILRTKINNHIDNNSIMSASQNGCRNGSRGTKELLLIDMAISQQVRRSRKDLSTCWIDYKKAYDSVPHTWLMRVLELYKVNTTLCAFLTSCMRQWRTVLRYPGCRQIQGMGEPIRIERGIFQGDSLSPLWFCLALNPLSTLLEGSGLGYRLRRGGQVISHLLYMDDLKLFAPNKLQLLELLKVTETFSNSIRMEFGVDKCAVMHVKRGRIMESVGTQLTDSIHLRSLSSTETYKYLGMSEALGINETDMKQSLRERFYGRLKKVLNSLLSGGNKVRAFNGWVMPVLMYSFGILKWTQTELDALDRRVRSLLTANRMHHPRSSVMRLYIPRKCGGRGFLNAKTLHNREVCSLREYFSQADVGMHRDVVAVDKGFTPLSLAKENWRKPVIFDTNGRREVWRSKELHGRFYRALHGPDVDFLASVAWLRFGDLFGETEGFVCAIMDEVMMTNNYTTDGTVDICRACHCPGESIRHIVSGCSRLANGEYLHRHNLVARIIHQQLALKYNLEDAEVPYYKYVPDPVLENGHVTLYWDRSIITDRTIVANKPDIVVIDRSERLTMIIDITVPHDENLVKAEKDKEIKYQDLAHEVVDMWDVDSAVIVPIVVTANGLIAKSLDQHLKRLSLGGWIKGLIQKAVLLDTARIVRKFLSLRP

SEQ ID NO: 30105 - protein, 1200 aa, Hecatera dysodea
MLTRAATLRARHPPPGSPLSSASPPPDIESQVSPAVAVASSSSDEYFSPPTSPPPVRRQGRGRPPRGLGPRGQPAPSRVPATGGCVQRMRWTQSMNENVMRAYYGSTEGGTNLTAYRVRMLSLFQDLEPAVNVSAQRLSDQVRVIQRSHRLDDAALERLRSEVLNNLIISTQTQTAVQVPASGASIPRANNDSDEVDERVVTVSSQCNDRLRSALEDALREYRSTPAELRPRLPRLPMHKKNRALVCALDSLLQNTFLSSENLVDTHSILYCGAVAACRLANVKFPSCDEAIRPKPAAPAWQCRIERRIDEARALIGKLYCFREGNTRPHVMRFVRRAFAGTGISPHEYTSRITERIDFLKQKVCAWANRIRRYKRRVDRYSQNRMFQSDERWVYRNWERPEQSVTDVYRPDDIATSTFWRSIWSVPVRHTEGDWMRGVERVCEAIPQMEKIIITSADVATAVRPLPNWKSPGPDGLHNFWLKWYSSSHALLASQFQSSLESGSLPQFLTTGVTHLLHKTGSPAEPKNYRPITCLSTVYKLLTSILRVKINKHIESNSIMSSSQNGCRKGSRGTKELLLIDMAISQQVRRSRKDLSTCWIDYKKAYDSVPHTWLMKVLELYKIDTTLRTFLESCMRQWKTVLRYPGCRPIQGNDEPVWIKRGIFQGDSLSPLWFCLALNPLSTLLEDSGLGYRLKRGGQAISHLLYMDDLKLFAHNKLRLMELLKVTETFSSAIRMEFGVDKCAVMHVKKGEIVESEGVQLSDSIQVRSLSSTETYKYLGMSEALGINGADMKQSLKERFFGRLKKVLNSLLSGGNKVRAFNGWVMPVLMYSFGILKWTQTELDALDRRVRTLLTANRMHHPRSSVMRLYIPRKCGGRGFLNAKTLHNREMCSLREYFLKADVGMHRDVVAVDKGPCPPLSMAKENWRKPVILTTDDRKEVWRGKELHGRFYRALHGSDVDFSASVAWLRFGDLFGETEGFVCAIMDEVILTNNYRRHIMKDGTVDVCRACHCPGESIRHIIFGCSRLANGEYLHRHNQVARIIHQQLALKYKLVDSEVPYYKYVPDPVLENDHVTLYWDRSIITDRTIVANKPDIVVIDRLARRTMIIDVTIPHDENLVKAEKEKHIKYLDLAHEVVDMWNVDSAVIVPIVVTANGLMAKSFDDHLSKLALHGWLKGLIQKAVLLDTARIVRRFLSLEP

SEQ ID NO: 30106 - protein, 877 aa, Abrostola tripartita
MRFVRRAFAGVDINPREYATRATERIDFYKQKVYAWASRIRRYKRRVDRFSQNRIFNQDQRWVYRNWERSAQGVSDGHLPDDDVTNAFWRSIWSVPVNHTEGSWMLDVEQSCESIPEMGTITISPQDVASAVRPMSNWKSPGPDGLHNFWIKWLRSSHGCLASQFQSAIEVGSLPQFLTTGSTHLLHKTGSTTDPKNFRPITCLPTIYKLLTSILRAKITKHIDDNNIMSASQNGCKNGSRGTKELLLIDMTICQQVRRSKKDLSTCWIDYKKAYDSVPHTWLMRVLELYKIDTTLRTFLLSCMRQWRTVLHYPGCRDIQQDGEPIRIERGIFQGDSLSPLRFCLALNPLSTLLENSGLGYSLRRRSQVISHLLYMDDLKLFAPSRFQLIKLLKITEAFSNSIRMEFGVDKCAVMHVKRGGIIESQGIQLSDSINLRSLSATETYKYLGMSEALGINVVDMKQSLKERFFGRLNKVLKSLLSGGNKVRAFNDCFMSGYTQYRVMPTLMYSFGILKWTQTELDALDRRVRTLLTSNRMHHPRSSVMRLYIPRKCGGRGFLNAKTLHNREVCSLREYFLRAEVGMHREVVAVDKGLTPLFLAKENWCKPVVLSVNDRRDVWQSKELHGRFYKALHGPNVDLLSSVSWLRFGDLFGETEGFVCAIMDEVIMTNNYRKYILKDGTVDICRACHRPGESLRHIMSGCSRLANGEYLHRHNQVARIIHQQLALKYKLVDSEMPYYRYVPDPVLENDHITLYWDRSIITDRTIVANKPDIVVIDRLERRAMIVDITIPHDENLVKAERDKQIKYLDLAHEVVDMWEVDSAIIVPIVVSANGLMAKSLDQHLKRLTLGGWVKGLMQKAVLLDTARIVRRFLSLEP

SEQ ID NO: 30107 - protein, 1135 aa, Xestia c-nigrum
MITRAASRRRARPPTPDSSLSSASPPPDPGSPVPPVAAVASSSSDEYFSPPTSPTPVRRAGRGRPPRSLGLRGQQAPSRVPATGGCVQRMRWTQSMNENVMRAYYGSTEGGINLTAYRDRMLSLFQDLEPAVNVSAQRLSDQVRVIQRSHRLDDATLDRLRSEVLSNLITITPTQTAVHMSVVNATLPRSNPVVVEEDDRVALVSSQCNDRLRSALDNALREYRSISAELRPRLPRLPMHKKNRALVCALDSQLKNIFESSEDLVDTHSILFCGAVAACRLANVKFPNCDIAIRPKPAVPAWQRRIERRIDGARVLIGKLYCFREGNTRPRVMRFVRRAFSGTEISPQEYMSRVTERIDFLKQKVYAWASRIRRYKRRVDRYSQNRMFQSDERWVYRAWERPQQNMTDVCRPDDAATSSFWRSIWSVPVCHSEADWMRDVERVCEPIPTMEPILITPLDIARAVRPLPNLKSPGPDGLHNFWLKWFSSSHTCLASQFQSSLESGSLPQFLTTGVTHLLHKSGSPAEPKNYRPITCLSTVYKLLTSILRMKINTHVDSNSIMSASQNGCRNGSRGTKELLLIDMAISQQVRRARKDLSICWIDYKKAYDSVPHSWLKRVLELYKIDATLRAFLESCMGQWRTVLRYPGCRQIQGNDEPVWIKRGIFQGDSLSPLWFCLALNPASTLLENSGLGYRVRKDGQVISHLLYMDDLKLFAPNKLQLMELLKVTETFSSAIGMEFGVDKCAVMYVKRGKIMGSEGLQLSDSIHLRSLSSSESYKYLGMSEALGTLLTENRMHHPRSSVMRLYIPRKCGGRGFLNAKTLHNREVCSLREYFLKADVGMHRDVAAVDKGLTPLSMAKENWRKPVVLTTDDRMKEWQGKELHGRFYRALHGPDVDFLASESWLRFGDLFGETEGFVCAIMDEVMLTNNYRKYIMKDGTVDVCRACHLPGESIRHIISGCSRLANGEYLHRHNQVARIIHQQLALKFNLVELEVPYYKYVPDPVLVKDHLTLYWDQSIITDRTIVANKSDIVVIDRSARRVMIIDVTIPHDENLVKAEKEKQIKYLDLAHEVRDMWNMDSVIIVPIVVSANGLIAKSLDEHLSKLSLGGWIKGLIQKAVLLDTARIVRRFLSLQP

SEQ ID NO: 30108 - protein, 909 aa, Acronicta aceris
MATPIYTRGYSHNAVVECPGCMPHPILDQSSPRGLCALDLCPPASLPKDRMSSSREACRVIQKGDTNDNNNNNNKQKVYAWANRIRRYKRRAERYSLNRTFQGDQRWVYRTWDRPDNGVSDVCRPNDDAMSSFWRNIWSVPVNHTEDDWICDVERACESLPAMDEINISPQDVACAVHSVPNWKAPGPDGLHNFWIKWLRSSHARLASQFQSSLESGTLPQFLTTGITHLLHKSGDTADPKNYRPITCLPTVYKLLTSILRAKICYHIDESSIMSASQNGCRNGSRGTKELLLIDMTISQQVRRLRKNLSTCWIDYKKAYDSVPHTWLMRVLELYKVDVSLRTFLRSCMGQWRTVLHYPGCRQIQRISEPIRIERGIFQGDSLSPLWFCLALNPLSTLLEESRLGYRLRRGGQVISHLLYMDDLKLFASSDLHLKITENFSNSIRMEFGVEKCAVMHVKRGGIVESVGIQLSDSTQLRSLASTETYKYLGMAEALGINVADMKQSLQVRFFGRLTKVLKSLLSGGNKVRAFNGWVMPVLMYSFGVLKWTQTELETLDRKVRTLLTAYRMHHPRSSVMRLYIPRKCGGRGFLNAKNLHNREVCSLREHFLKTEMGMHRDVVAVDNGLTPLSMAKENWRKPVVLSTNDRRNVWQGKELHGRYYRALHEPGVDTLASVSWLRFGDLFGETEGFVCAIMDEVMMTNNYRKFIVKDGTVDICRACHRPGESIRHIISGCSRLANGEYLHRHNLVARIIHQQLALKYNLVESEVPYYKYVPDPVLENGHATLYWDRSIITDRTIIANKPDIVVIDRLERRAMIVDITVPHDENLFKAEKEKEIKYLDLAHEVVDMWGVDAAIIVPIVVSANGLIAKSLDRHLKRLSLGGWIKGLIQKVVLLDTAGIVRRFLSLGP

SEQ ID NO: 30109 - protein, 1193 aa, Eilema sororculum
MLTRAKARNFAHPTPSDSSCSSASQPPETTSPRATTAEASSSDEYFSPPTSPTPVRRPGRGRPPSSLGSRGPPASNRAPAAGGNVRRMRWTSSMNENVMRAYFAATEGGTNLTAYRVRMLPLFQVLEPDVNVSAQRLSDQVRVIQRNQLLDGDALERLRSECLQSNPVIPPNPVHSESTPILSRVSVVVDDRVITVDTECNEEVKVALECAMREYRSMPINIRPRLPRLPMHRKNVMLMSALDSLLPVYMDSSESLSDTHSILYCAAVAACRLARVKFPTQMTTHRQKPAVPAWQRRIDGRIAEARVLIGKLTCFRSGNTRPRVMRFVNRAFSGTGISPPEFMARVTERIDLLKQKIYAWANRVRRYKKRVDRFSVNRAFQRDQRWVYRSWDRPENDVRDGCLPNADETNMFWRGIWSAPVAHVEDDWTRDVERACEGIPDMECVTIDDSDVASAVRPLSNWKSPGQDGLHNFWIKWLRSSHVRLASQFQAAIEVGSLPIFMTTGITHLLHKTGSTSNPSNYRPITCLPSIYKLITSILRDKITKHISTNTVMSASQNGCRSGARGTKELLLIDMTISQQVRRCRKNLSVCWIDYKKAFDSVPHTWLLRVLELYKVNTTLCTFLASCMRQWRTVLSYPGCRGMCSNGEPINIERGIFQGDSLSPLWFCLALNPLSTLLGNSGLGYRLRGGGQIISHLLYMDDLKLFATSSSQLVDLLKITKSFSDSIKMEFGVDKCAVMHVKRGRTVESEGIQLSDSIHLKSLLVTDTYKYLGMSQALGIIEADMKQSLRERFFGRLKKVMNSLLSGGNKVRAYNGWVMPLLMYSFGILKWTQTELDAIDRRVRTLLTAYRMHHPRSSVMRLYIPRKCGGRGFLNAKNLHNREVYNLREYFLRVNEDMHRDVIAVDVSLTPLKLAKENWCKPVLLSISDRQEVWQSKELHGRFYRALHGPDVDLLASVAWLRFGDLFGETEGFACAIADEVIMTKNYRKYILRDGTVDIICRACHQPGESLRHIVSGCSRLANSEYLHRHNQVARIIHQQLALLYQLVDTEVPYYRYVAEPVLENGHITLYWDRSIITDRTVVANKPDIVVIDRSERRAIIVDVTIPHDENLVKAEKDKQIKYLDLAHEIVDMWEVDSAIIVPIVITVNGLIAKSLDQHLKRLALGSWIKGLIQKAVLLDTARIVRKFLSLEP

SEQ ID NO: 30110 - protein, 1192 aa, Eilema sororculum
MLTRAKARNFAHPTPSDSSCSSASQPPETTSPRATTAEASSSDEYFSPPTSPTPVRRPGRGRPPSSLGSRGPPASNRAPAAGGNVRRMRWTSSMNENVMRAYFAATEGGTNLTAYRVRMLPLFQVLEPDVNVSAQRLSDQVRVIQRNQLLDGDALERLRLECLQSNPVIPPNPAHSESTPILSRVSVVVDDRVITVDTECNEEVKVALECAMREYRSMPINIRPRLPRLPMHRKNVMLMSALDSLLPVYMDSSESLSDTHSILYCAAVAACRLARVKFPTQKTTHRQKPAVPAWQRRIDGRIAEARVLIGKLTCFRSGNTRPRVMRFVNRAFSGTGISPPEFMARVTERIDLLKQKIYAWANRVRRYKKRVDRFSVNRAFQRDQRWVYRSWDRPENDVRDGCLPNADETNMFWRGIWSAPVAHVEGDWTRDVERACEGIPDMECVTIDDSDVASAVRPLSNWKSPGQDGLHNFWIKWLRSSHVRLASQFQAAIEAGSLPIFMTTGITHLLHKTGSTSNPSNYRPITCLPSIYKLLTSILRDKITKHISTNTVMSASQNGCRSGARGTKELLLIDMTISQQVRRCRKNLSVCWIDYKKAFDSVPHTWLLRVLELYKVNTTLCTFLASCMRQWRTVLSYPGCRGMCSNGEPINIERGIFQGDSLSPLWFCLALNPLSTLLGNSGLGYRLRGGGQIISHLLYMDDLKLFATSSSQLVDLLKITKSFSDSIKMEFGVDKCAVMHVKRGRTVESEGIQLSDSIHLKSLLVTDTYKYLGMSQALGIIEADMKQSLRERFFGRLKKVMNSLLSGGNKVRAYNGWVMPLLMYSFGILKWTQTELDAIDRRVRTLLTAYRMHHPRSSVMRLYIPRKCGGRGFLNAKNLHNREVYNLREYFLRVNEDMHHDVIAVDVSLTPLKLAKENWCKPVVLSISDRQEVWQSKELHGRFYRALHGPDVDLLASVAWLRFGDLFGETEGFACAIADEVIMTKNYRKYILRDGTVDICRACHQPGESLRHIVSGCSRLANSEYLHRHNQVARIIHQQLALLYQLVDTEVPYYRYVAEPVLENGHITLYWDRSIITDRTVVANKPDIVVIDRSERRAIIVDVTIPHDENLVKAEKDKQIKYLDLAHEIVDMWEVDSAIIVPIVITVNGLIAKSLDQHLKRLALGSWIKGLIQKAVLLDTARIVRKFLSLEP

SEQ ID NO: 30111 - protein, 1085 aa, Eilema sororculum
MLTRAKAKLQNAHPTPSDSSCSSASQPPESTSPRPATVEASSSDEYFSPPTPNPAHSESIPILSRVSVVVDDRVITVDTECNEEVKVALECAMREYRSMPINVRPRLPRLPMHKKNLMLMSALDSLLPVYMDSSESLSDTHSILYCAAVAVCRLARVKFPTQMTTPRQKPAVPAWQRRIDGRIAEARVLIGKLTCFSSGNTRPRVMRFVNRAFSGTGISPPEYMARVTERIDLLKQKIYAWANRVRRYKKRVDRFSVNHAFQRDQRWVYRSWDRPDNDVRDGCLPNADETNMFWRSIWSAHVAHVEGDWTRDVERACEGIPDMECVTIDDSDVASAVHPLSNCKSPGPDGLHNFWIKWLRSSHVRLASQFQAAIESGSLPIFMTTGITHLLHKTGSTSNPSNYRPITCLPSIYKLITSILRDKITKHISTYTVMSASQNGCRSGARGTKELLLIDMTISQQVRRCRKNLSVCWIDYKKAFDSVPHTWLLRVLELYKVNTTLCTFLASCMRQWRTVLSYPGCRGMCSNGEPINIERGIFQGDSLSPLWFCLALNPLSTLLGNSGLGYRLRGGGQIISHLLYMDDLKLFATSSSQLVDLLKITKSFSDSIKMEFGVDKCGVMHVKRGRTVESEGIQLSDSIHLKSLLVTDTYKYLGMSQALGINEADMKQSLRERFFGRLKKVLNSLLSGGNKVRAYNGWVMPLLIHSFGILKWTQTELDAIDRRVRTLLTTYRMHHPRSSVMRLYIPRKCGGRGFLNAKNLHNREVYNLREYFLRVNEDMHRDVVAVDVSLTPLKLAKENWCKPVVLSISDRQEVWQSKELHGRFYRALHGPDVDLLASVAWLRFGDLFGETEGFACAIADEVIMTKNYRKYILRDGTVDICRACHQPGESLRHIVSGCSRLANSEYLHRHNQVAWIIHQQLALLYQLVDAEVPYYRYVAEPVLENGHITLYWDRSIITDRTVVANKPDIVVIDRSERRAMIVDVTIPHDENLVKAEKDKQIILHPLYYCTSCYPRLRPRLVRNSSNSLLNMVEDFHPNWNGSTRNTGNSEFYAKETFLYFIKETKLIIRIQIISKTRLTSSTLYF

SEQ ID NO: 30112 - protein, 1192 aa, Eilema sororculum
MLTRAKARNFAHPTPSDSSCNSASQPPETTSPRATTAEASSSDEYFSPPTSPTPVRRPGRGRPPSSLGSRGPPASNRAPAASGNVRRMRWTSSMNENVMRAYFAATEGGTNLTAYRVRMLPLFQVLEPDVNVSAQRLSDQVRVIQRNQLLDGDALERLRLECLQSNPVIPPNPVHSESTPILSRVSVVVDDRVITVDTECNEEVKVALECAMREYRSMPINIRPRLPRLPMHRKNVMLMSALDSLLPVYMDSSESLSDTHSILYCAAVAACRLVRVKFPTQMTTHRQKPTVPAWQRRIDGRIAEARVLIGKLTCFRSGNTRPSVMRFVNRAFSGTGISPPEFMARVTERIDLLKQKIYAWANRVRRYKKRVDRFSVNRAFQRDQRWVYRSWDRPENDVRDGCLPNADETNMFWRGIWSAPVAHVEGDWTRDVERACEGIPDMECVTIDDSDVASAVRPLSNWKSPGQDGLHNFWIKWLRSSHVRLASQFQAAIEVGSLPIFMTTGITHLLHKTGSTSNPSNYRPITCLPSIYKLLTSILRDKITKHISTNTVMSASQNGCRSGARGTKELLLIDMTISQQVRRCRKNLSVCWIDYKKAFDSVPHTWLLRVLELYKVNTTLCTFLASCMRQWRTVLSYPGCRGMCSNGEPINIERGIFQGDSLSPLWFCLSLNPLSTLLGNSGLGYRLRGGGQIISHLLYMDDLKLFATSSSQLVDLLKITKSFSDSIKMEFGVDKCAVMHVKRGRTVESEGIQLSDSIHLKSLLVTDTYKYLGMSQALGIIEADMKQSLRQRFFGRLKKVMNSLLSGGNKVRAYNGWVMPLLMYSFGILKWTQTELDAIDRRVRTLLTAYRMHHPRSSVMRLYIPRKCGGRGFLNAKNLHNREVYNLREYFLRVNEDMHRDVIAVDVSLTPLKLAKENWSKPVVLSISDRQEVWQSKELHGRFYRALHGPDVDLLASVAWLRFGDLFGETEGFACAIADEVIMTKNYRKYILRDGTVDICRACHQPGESLRHIVSGCSRLANSEYLHRHNQVARIIHQQLALLYQLVDTEVPYYRYVAEPVLENGHITLYWDRSIITDRTVVANKPDIVVIDRSERRAIIVDVTIPHDENLVKAEKDKQIKYLDLAHEIVDMWEVDSAIIVPIVITVNGLIAKSLDQHLKRLALGSWIKGLIQKAVLLDTARIVRKFLSLEP

SEQ ID NO: 30113 - protein, 1158 aa, Eilema sororculum
MLTRAKARNFAHPTPSDSSCSSASQPPETTSPRATTAEASSSDEYFSPPTSPTPVRRPGRGRPPSSLGSRGPPASNRAPATGGNVRRMRWTSSMNENVMRAYFAATEGGTNLTAYRVRMLPLFQVLEPDVNVSAQRLSDQVRVIQRNQLLDGDALERLRLECLQSNPVIPPNPVHSESTPILSHVSMVVDDRVITVDTECNEEVKVALESAMREYRSMPINIRPRLPRLPMHRKNVMLMSALDSLLPVYMASSESLGDTHSILYCAAVAACRLARVKFPTQMTTHRQKPAVPAWQRRIDGRIAEARVLIGKLTCFRSGNTRPRVMRFVNREFSGTGISPPEYMARVTERIDLLKQKIYAWANRVRRYKKRVDRFSVNRAFQRDQRWVYRSWDRPDNDVRDGCLPNADETNMFWRGIWSAPVAHVEGDWTRDVERACEGIPDMECVTIDDSDVACAVRPLSNWKSPGQDGLHNFWIKWLRSSHVRLASQFQAAIEAGSLPIFMTTGITHLRHKTGSTSNPSNYRPITCLPSIYKLLTSILRDKITKHISTNTVMSVSQNGCRSGARGTKELLLIDMTISQQVRRCRKNLSVCWIEYKKAFDSVPHTWLLRVLELYKVNTTLCTFLASCMRQWRTVLSYPGCRGMFSNGEPINIERGIFQGDSLSPLWFCLALNPLSTLLGNSGLGYRLRGGGQIISHLLYMDDLKLFATSSSQLVDLLKITKSFSDSIKMEFGVDKCAVMHVKRGRTVESEGIQLSDSIHLKSLLVTDTYKYLGMSQALGIIEADVKQSLRERFFDRQKKVMNSLLSGGNKVRAYNGWVMPLLMYSFGILKWTQTELDAIDRRVRTLLTAYRMHHPRSSVMRLYIPRKCGGRGFLNAKNLHNREVYNLREYFLRVNEDMHRDVIAVDVSLTPLKLAKENWCKPVVLSISDRQEVWQSKELHGRFYRALHGPDVDLLASVAWLRFGDLFGETEGFACAIADEVIMTKNYRKYILRDGTVDICRACHQPGESLRHIVSGCSRLANSEYLHRHNQVARIIHQQLALLYQLVDTEVPYYRYVAEPVLENGHITLYWDRSIITDRTVVANKPDIVVIDRSERRAIIVDVTIPHDENLVKAEKDKQIKYLDLAHEIVDMWEVDSAIIVPIVITVNGLIAKSLDQH

SEQ ID NO: 30114 - protein, 1192 aa, Eilema sororculum
MLTRAKARNFAHPTPSDSSCSSASQPPETTSPRATTAEASSSDEYFSPPMSPTPVRRPGRGRPPSSLGSRGPPASNRAPATGGNVRRMRWTSSMNENVMRAYFAATEGGTNLTAYRVRMLPLFQVLEPDVNVSAQRLSDQVRVIQRNQLLDGDALERLRLECLQSNPVIPPNPVHSESTPILSRVSVVVDDRVITVDTECNEEVKVALECAMREYRSMPINIRPRLPRLPMHRKNVMLMSALDSLLPVYMDSSESLSDTHSILYCAAVAACRLPRVKFPTQMTTHRQKPAVPAWQRRIDGRIAEARVLIGKLTCFRSGNTRPRVMRFVNRAFSGTGISPPEYMARVTERIDLLKQKIYAWANRVRRYKKRVDRFSVNRAFQRDQRWVYRSWDRPDNDVRDGCLPNADETNMFWRGIWSAPVAHVEGDWTRDVERACEGIPDMECVTIDDSDVASAVRPLSNWKSPGQDGLHNFWIKWLRSSHVRLASQFQAAIEAGSLPIFMTTGITHLLHKTGSTSNPSNYRPITCLPSIYKLLTSILRDKITKHISTNTVMSASQNGCRSGARGTKELLLIDMTISQQVRRCRKNLSVCWIDYKKAFDSVPHTWLLRVLELYKVNTTLCTFLASCMRQWRTVLSYPGCRGMCSNGEPINIERGIFQGDSLSPLWFCLALNPLSTLLGNSGLGYRLRGGGQIISHLLYMDDLKLFATSSSQLVDLLKITKSFSDSIKMEFGVDKCAVMHVKRGRTVESGGIQLSDSIHLKSLLVTDTYKYLGMSQALGIIEADMKQTLRERFFGRLKKVMNSLLSGGNKVRAYNGWVMPLLMYSFGILKWTQTELDAIDRRVRTLLTAYRMHHPRSSVMRLYIPRKCGGRGFLNAKNLHNREVYNLREYFLRVNEDMHRDVIAVDVSLTPLKLAKENWCKPVVLSISDRQEVWQSKELHGRFYRALHGPDVDLLASVAWLRFGDLFGETEGFACAIADEVIMTKNYRKYILRDGTVDICRACHQPGESLRHIVSGCSRLANSEYLHRHNQVARIIHQQLALLYQLVDTEVPYYRYVAEPVLENGHITLYWDRSIITDRTVVANKPDIVVIDRSERRAIIVDVTIPHDDNLVKAEKDKQIKYLDLAHEIVDMWEVDSAIIVPIVITVNGLIAKSLDQHLKTLALGSWIKGLIQKAVLLDTARIVRKFLSLEP

SEQ ID NO: 30115 - protein, 981 aa, Eilema sororculum
MREYRSMPINVRPRLPRLPMHKKNLMLMSALDSLLPVYMDSSESLSDTHSILYCAAVAVFRLARVKFPTQMTTPRQKPAVPAWQRRIDGRIAEARVLIGKLTCFSSGNTRPRVMRFVNRAFSGTGISPPEYMARVTERIDLLKQKIYAWANRVRRYKKRVDRFSVNHAFQRDQRWVYRSWDRPDNDVRDGCLPNADETNMFWRSIWSAPIAHVEGDWTRDVERACEGIPDMECVTIDDSDVASAVRPLSNWKSPGPDGLHNFWIKWLRSSHVRLASQFQAAIESGSLPIFMTTGITHLLHKTGSTSNPSNYRPITCLPSIYKLLTSILRDKITKHISTNTVMSASQNGCRSGARGTKELLLIDMTISQQVRRCRKNLSVCWIDYKKAFDSVPHTWLLRVLELYKVNTTLCTFLASCMRQWRTVLSYPGCRGMCSNGEPINIERGIFQGDSLSPLWFCLALNPLSTLLGNSGLGYRLRGGGQIISHLLYMDDLKLFATSSSQLVDLLKITKSVSDSIKMEFGVDKCAVMHVKRGRTVESEGIQLSDSIHLKSLLVTDTYKYLGMSQALGINEADMKQSLRERFFGRLKKVLNSLLSGGNKVRAYNGWVMPLLIHSFGILKWTQTELDAIDRRVRTLLTAYRMHHPRSSVMRLYIPRKWGGRGFLNAKNLHNREVYNLREYFLRVNEDMHRDVVAVDVSLTPLKLAKENWCKPVVLSISDRQEVWQSKELHGRFYRALHGPDVDLLASVAWLRFGDLFGETEGFACAIADEVIMTKNYRKYILRDGTVDICRACHQPGESLRHIVSGCSRLANSEYLHRHNQVARIIHQQLALLYQLVDAEVPYYRYVAEPVLENGHITLYWDRSIITDRTVVANKPDIVVIDRSERRAMIVDVTIPHDENLVKAEKDKQIKYLDLAHEIVDMWEVDSAVIVPIVITVNGLIAKSLDQHLKRLALGSWIKGLIQKAVLLDTARIVRKFLSLEP

SEQ ID NO: 30116 - protein, 1192 aa, Eilema sororculum
MLTRAKARNFAHPTPSDSSCSSASQPPKTTSPRATTAEASSSDEYFSPPTSPTPVRRPGRGRPPSSLGSRGPPASNRAPATGGNVRRMRWTSSMNENVMRAYFAATEGGTNLTAYRVRMLPLFQVLEPDVNVSAQRLSDQVRVIQRNQLLDGDALERLRLECLQSNPVIPPNQVHSESTPILSRVNVVVDDRVITVDTECNEEVKVALECAMREYRSMPINIRPRLPRLPMHRKNVMLMSALDSLLPVYMDSSESLSDTHSILYCAAVAACRLARVKFPTQMTTHRQKPAVPAWQRRIDGRIAEARVLIGKLTCFRSGNTRPRVMRFVNRAFSGTGISPPEYMARVTERIDLLKQKIYAWANRVRRYKKRVDRFSVNRAFQRDQRWVYRSWDRPDNDVRDGCLPNADETNMFWRGIWSAPVAHVEGDWTRDVERACEGIPDMECVTIDDSDVASAVRPLSNWKSPGQDGLHNFWIKWLRSSHVRLASQFQAAIEAGSLPIFMTTGITHLLHKTGSTSNPSNYRPITCLPSIYKLLTSILRDKITKHISTNTVMSASQNGCRSGARGTKELLLIDMTISQQVRRCRKNLSVCWIDYKKAFDSVPHTWLLRVLELYKVNTTLCTFLASCMRQWRTVLSYPGCRGMCSNGEPINIERGIFQGDSLSPLWFCLALNPLSTLLGNSGLGYRLRGGGQIISHLLYMDDLKLFATSSSQLVDLLKITKSFSDSIKMEFGVDKCAVMHVKRGRTVESEGIQLSDSIHLKSLLVTDTYKYLGMSQALGIIEADMKQSLRERFFGRLKKVMNSLLSGGNKVRAYNGWVMPLLMYSFGILKWTQTELDAIDRRVRTLLTAYRMHHPRSSVMRLYIPRKCGGRGFLNAKNLHNREVYNLREYFLRVNEDMHRDVIAVDVSLTPLKLAKENWCKPVVLSISDRQEVWQSKELHGRFYRALHGPDVDLLASVAWLRFGDLFGETEGFACAIADEVIMTKNYRKYILRDGTVDICRACHQPGESLRHIVSGCSRLANSEYLHRHNQVARIIHQQLALLYQLVDTEVPYYRYVAEPVLENGHITLYWDRSIITDRTVVANKPDIVVIDRSERRAIIVDVTIPHDENLVKAEKDKQIKYLDLAHEIVDMWEVDSAIIVPIVITVNGLIAKSLDQHLKRLALGSWIKGLIQKAVLLDTARIVRKFLSLEP

SEQ ID NO: 30117 - protein, 1192 aa, Eilema sororculum
MLTRAKARNFAHPTPSDSSCSSASQPPETTSPRATTAEASSSDEYFSPPTSPTPVRRPGRGRPPSSLGSRGPPASNRAPATGGNVRRIRWTSSMNENVMRAYFAATEGGTNLTAYRVRMLPLFQVLEPDVNVSAQRLSDQVRVIQRNQLLDGDALERLRLECLQSNPVIPPNQVHSESTPILSRVNVVVDDRVITVDTECNEEVKVALECAMREYRSMPINIRPRLPRLPMHRKNVMLMSALDSLLPVYMDSSESLSDTHSILYCAAVAACRLARVKFPTQMTTHRQKPAVPAWQRRIDGRIAEARVLIGKLTCFRSGNTRPRVMRFVNRAFSGTGISPPEYMARVTERIDLLKQKIYAWANRVRRYKKRVDRFSVNRAFQRDQRWVYRSWDRPDNDVRDGCLPNADETNMFWRGIWSAPVAHVEGDWTRDVERACEGIPDMECVTIDDSDVASAVRPLSNWKSPGQDGLHNFWIKWLRSSHVRLASQFQAAIEAGSLPIFMTTGITHLLHKTGSTSNPSNYRPITCLPSIYKLLTSILRDKITKHISTNTVMSASQNGCRSGARGTKELLLIDMTISQQVRRCRKNLSVCWIDYKKAFDSVPHTWLLRVLELYKVNTTLCTFLASCMRQWRTVLSYPGCRGMCSNGEPINIERGIFQGDSLSPLWFCLALNPLSTLLGNSGLGYRLRGGGQIISHLLYMDDLKLFATSSSQLVDLLKITKSFSDSIKMEFGVDKCAVMHVKRGRTVESEGIQLSDSIHLKSLLVTDTYKYLGMSQVLGIIEADMKQSLRERFFGRLKKVMNSLLSGGNKVRAYNGWVMPLLMYSFGILKWTQTELDAIDRRVRTLLTAYRMHHPRSSVMRLYIPRKCGGRGFLNAKNLHNREVYNLREYFLRVNEDMHRDVIAVDVSLTPLKLAKENWCKPVVLSISDRQEVWQSKELHGRFYRALHGPDVDLLASVAWLRFGDLFGETEGFACAIADEVIMTKNYRKYILRDGTVDICRACHQPGESLRHIVSGCSRLANSEYLHRHNQVARIIHQQLALLYQLVDTEVPYYRYVAEPVLENGHITLYWDRSIITDRTVVANKPDIVVIDRSERRAIIVDVTIPHDENLVKAEKDKQIKYLDLAHEIVDMWEVDSAIIVPIVITVNGLIAKSLDQHLKRLALGSWIKGLIQKAVLLDTARIVRKFLSLEP

SEQ ID NO: 30118 - protein, 873 aa, Eilema sororculum
MPINIRPRLPRLPMHKKNLMLMSALDSLLPVYFDSSESLSDTHSILYCAAVAACRLARVKFSAHAPAPRQKPAVPAWQRRIEGRIAEARVLIGNARPRVMRFVNRAFSGTGISPPEYIARVTERIDLLKQKIYAWANRVRRYKKRVDRFSVNRTFQRDQRWVYRSWDWPNKDVSSGCLPSADETNMFWRSIWSAPVAHVEGDWTRDVERACAGIPDMEFVNIDDSDVASAVRPLSNWKSPGPDGLHNFWIKWLRSSHARLASQFQAAIESGSLPIFMTTGVTHLLHKTGSTSNPSNYRPITCLPSVYKLLTSILRDKITKHISTNTVMSASQNGCRNGARGTKELLLIDMAISQQVRRSRKNLSTCWIDYKKAFDSVPHTWLLRVLELYKVDTTLCIFLASCMRQWRTVLSYPGCREVCSNGEPINIERGIFQGDSLSPLWFCLALNPLSTLLGNSGLGYRLRGGGQIISHLLYMDDLRLFATSSSQLVDLLKITKSFSDSIKMEFGVDKCAVMHVKRGRTVESEGIQLSDSIHLKSPLVTDTYKYLGMSQALGINEADMKQSLRERFFGRLKKVLNSLLSGGNKVRAYNGWVMPLLIYSFGILKWTQTELDAIDRRVRTLLTAYRMHHPRSSVMRLYIPRKCGGRGFLNAKNLHNREVYNLREYFLRVNEDMHRDVVAVDVSLTPLKLAKENWCKPVVLSISDRQEVWQSKELHGRFYRALHGPDVDLLASVAWLRFGDLFGETEGFACAIADEVIMTKNYRKYILRDGTVDICRACHQPGESLRHIVSGCSRLANSEYLHRHNQVARIIHQQLALLYQLVDAEVPYYRYVAEPVLENGHITLYWDRSIITDRTVVANKPDIVVNPLKRRVS

SEQ ID NO: 30119 - protein, 1108 aa, Eilema sororculum
MLTKAKARNFAHPTPSDSSCSSASQPPETTSPRTTTAEASSSDEYFSPPTSPTPVRRPGRGRPPSSLGSRGPPASNRAPATGGNVRRMRWTSSMNENAMRAYFAATEGGTNLTAYRVRMLPLFQVLEPDVNVSAQRLSDQVRVIQRNQLLDGDALERLRLECLQSNPVIPPNPVHSESTPILSRVSVVVDDRVITVDTECNEEVKVALECAMREYRSMPINIRPRLPRLPMHRKNVMLMSALDSLLPVYMDSSESLSDTHSILYCAAVAACRLARVKFPTQMTTHRQKPTVPAWQRRIDGRIAEARVLIGKLTCFRSGNTRPRVMRFVNRAFSGTGISPPEYMARVTERIDLLKQKIYAWANRVRRYKKRVDRFSVNRAFQRDQRWVYRSWDRPDNDVRDGCLPNADETNMFWRGIWSAPVAHVEGDWTRDVERACEGMPDMECVTIDDSDVASAVRPLSNWKSPGQDGLHNFWIKWLRSSHVRLASQFQAAIEAGLLPIFMTTGITHLLHKTGSTSNPSNYRPITCLPSIYKLLTSILRDKITKHISTNTVMSASQNGCRSGARGTKELLRIDMTISQQVRRCRKNLSVCWIDYKKAFDSVPHTWLLKVLELYKVNTTLCTFLASCMRQWRTVLSYPGCRGMCSNGEPINIERGIFQGDSLSPLWFCLALNPLSTLLGNSRLGYRLRGGGQIISHLLYMDDLKLFATSSSQLVDLLKITKSFSDSIKMEFGVDKCAVMHVKQGRTVESEGIQLSDSIHLKSLLVTDTYKYLGMSQALGIIEADMKQTLRERFFGRLKKVMNSLLSGGNKARAYNGWVMPLLMYSFGILKWTQTELDAIDRRVRTLLTAYRMHHPRSSLMRLYIPRKCGGRGFLNAKSLHNREVYNLREYFLRVNEDMHRDVIAVDVSLTPLKLAKENWCKPVVLSISDRQEVWQSKELHGRFYRALHGPDVDLLASVAWLRFGDLFGETEGFACAIADEVIMTKNYRKYILRDGTVDICRACHQPGESLRHIVSGCSRLANSEYLHRHNQVARIIHQQLALLYQLVDTEVPYYRYVAEPVLENGHITLYWDRSHQDPQSACGFSRFESDITTKTHSRRAVLVGSSPT

SEQ ID NO: 30120 - protein, 1204 aa, Sesamia nonagrioides
MLTRSAARQRARPPSPDSLLSSASPPPVSSATVNAVTTPAAVVALSSSDEYFSPPTSPTPVRRQGRGRPPKSLGLRGHPAPSRVPAAGGCVQRMRWSQTMNENVMRAYYGATEGGTNLTAYRERMLSLFQALEPTVNVSAQRLSDQVRVIQRNHRLDDTALDRLRSEVLSNQIAPTLTQTAALASIIDAVPPRSNHVEEEDDRVETVSSQYHDRLRSTLEDAFREYRSTPTDLRPRLPRLPMHKKNRALVSALDSQLKNVFESSEDLIDTHSILFCAAVAACRLANIKFPNCDEANRPKPAVPAWQHRIECRIDGARVLIGKLYCFREGNTRPRVMRFVRQAFSGTGISPREYLTHVTERIDFLKQKVCAWANRIRRYKRRVDRYTQNRMFQSDERWVYRAWERSELNEADVCRPDVAATSAFWRSIWSVPVCHAEGDWIQNVEQVCEMIPEMDTILITPIDVATAVRSLPNWRSPGPDGLHNFWLKWLSSSHTCLASQFQSSLESGSLPQFLTTGITHLLHKSGSTTEPNNYRPITCLPTVYKVLTSILKAKINKHLDSNSIMSVSQNGCKSGSRGTKELLLIDMAISQQVRRSRKDLSTCWIDYKKAYDSVPHTWLMRVLELYKINTTLRTFLRSCMGQWKTVLRYPGSRRIQGNDEPVWIKRGIFQGDSLSPLWFCLALNPLSTLLEDSGLGYRLKRGGQVISHLLYMDDLKLFAPNKLHLMKLLNVTETFSSGIKMEFGVDKCAVMHVERGQIMESEGITLPDSIHLRSLSSFESYKYLGMSEALGINDADMKQSLKERFFGRLKKVLKSLLLGGNKVRAFNGWVMPVLMYSFGILKWTQTELDALDRRVRTLLTANRMHHPRSSVMRLYIPRKCGGRGFLNAKTLHNREVCSLREHFLKTVVGMHHDVVTVDKGLTPLSMAKENWHKPIILTTDDRKMIWQSKELHGRFYRALHGPDVDFFLASVSWLRFGDLFGETEGFVCAIMDEVILTNNYRRYIMKDGTIDVCRACHHPGESIRHIISGCSRLANSEYLHRHNQVARIIHQQLALKYKLVDSEVPYYKYVPDPVLENDHVTLYWDRSIITDRTIVANKPDIVVIDRLARLAMIVDVTIPHDGNLVKAEKEKQMKYLDLAHEVVDMWNVNSAVIVPIVVSANGLIAKSLDQHLLRLSLGSWIKGLIQKAVLLDTARIVRRFLSLEP

SEQ ID NO: 30121 - protein, 1178 aa, Mythimna impura
MLTRSRAQKLYTHPTSSGSSLSSASQPPGPAPTVSPEIPVAAVASSSSDKYFSPPTTPPPARRRGRGRPPASLGPRGPPASDRVPAAGGSVQRMRWTSSINENVMRSYFGATEGGINLTAYRGRMLSLFQVLEPAVNVSVQRLSDQVRVIQRNRMLDDAVLDRRCLESQSSRVSPATTPAAVQRLPTASPRPVQVGDADDDAAISVSTQCNDRLRGAVEDAFREYRSTPPGLRPRLPRLPMHKINRALVCALDSQLSNCFDSSKDLTDTHSILYCAAVAACRVAHVKFPNCDRATRPAVPAWQCRIEHRIGEARALIGKLICFREGNTRPRVMRFVRRAFSGTDISPRDYLPCVTERIDFLKQKIYAWANRIRRYKRRVERYTRNRTFQSNERWVYRDWERSDQGVTDTRLPDDDAMCSFWRSIWSAPVSHTEGDWIREVERACDLLPEMGAITISPQDVARAVRPLPNWKSPGPDGLHNFWVKWFQRSHARLASQFQSALESGSLPQFLTTGITHLLHKSGSTAEPKNYRPITCLPTVYKVLTSILRAKINSHIETNSVMSASQNGCRNGSRGTKELLQINIAISQQVRRSRKNLSACWIDYKKAYDSVPHTWLMRVLELYKVDATLRTFLMSCMGQWRTVLHYPGCRQIQENNEPIRIERGIFQGDSLSPLWFCLALNPLSTLLEGSGLGYRLKRGGQVISHLLYMDDLKLFAPNNLQLVELLKVTETFSSAIRMEFGVDKCAVIHVLVKRGEIMESVGIQLSDSIHLRSLCSTETYKYLGMSESLGINTDDVKQSLKERFFGRLNKVLNSLLSGGNKVRAFNGWVMPVLMYSFGILKWTQTELDALDRRVRTLLTANRMHHPRSSVMRLYIPRKCGGRGFLNAKTLHNREVCSLREYFLKTNVGMHRDVVAVDKGLTPLSLANENWRKPIVLDTNDRREVWQSKELHGRFYRALHGPDVDLLASVSWLRFGDLFGETEGFVFAIMDEVMMTNNYRKYIVKDGTVDICRACHRPGESIRHIISGCSHLANGDYLHRHNLVARIIHQQLALKYNLVESEVPYYRYVPDPVLDNGNITLYWDRSIITDRTIVANKPDIVVIDRLERRTMIVDIAVPHDENLVKAEKDKQTKYLDLAREVVDMWEVDRAIIVPIVVTANGLIAKSLEQHLRRLSLGSWI

SEQ ID NO: 30122 - protein, 963 aa, Hecatera dysodea
MHKKNRALVCALDSLLQNTFVSSENLVDTHSILYCGAVAACRLANVKFPSGDEAIRPKPAAPAWQCRIERRIDEARALIGKLYCFREGNTRPRVMRFVRRAFAGTGISPHEYTSRLTERIDFLKQKVCAWANRIGRYKRRADRYSQNRMFQSDERWVYRTWEGPEQSVTDVCRPDDIATTTFWRSIWSVPVRHTEGDWMRDVERVCEAIPQMEKITITPTDIATAVRPLPNWKSPGPDGLHNFWLKWYSSSHAVLASQFQSSLESGSLPQFLTTGITHLLHKTGSPAEPKNYRPITCLSTVYKLLTSILRVKINEHIESNSIMSSSQNGCRKGSRGTKELLLIDMAISQQVRRSRKDLSTCWIDYKKAYDSVPHTWLMKVLELYKIDATLRTFLESCMRQWKTVLRYPGCRPIQGSDEPIWIKRGIFQGDSLSPLWFCLALNPLSTLLEDSGLGYRLRRGGQAISHLLYMDDLKLFAPNNLRLMELLKVTETFSSDIRMEFGVDKCAVMHVKKGEIMESEGIQLSDSIQVRSLSSTETYKYLGMSEALGINGADMKQSLKERFFGRLKKVLNSLLSGGNKVRAFNGWVMPVLMYSFGILKWTQTELDALDRRVRTLLTANRMHHPRSSVMRLYYIPRKCGGRGFLNAKTLHNREMCSLREYFLETDVGMHRDVVAVDKGLTPLSMAKENWRKPVIHTTDDRKEVWKGKELHGRFYRALYGSDVDFSASVAWLRFGDLFGETEGFVCAIMDEVILTNNYRRHIMKDGTVDVCRACHRPGESIRHIISGCSRLANSEYLHRHNQVARIIHQQLALKYKLVNSEVPYYKYVPDPVLENDHVTLYWDRSIITDRTIVANKPDIVVIDRLVRRTMIIDVSIPHDENLVKAEKEKQIKYLDLAHEVVDMWEVDSAVIVPIIVTANGLMAKSFDDHLSKLALRSWVKGLIQKAVLLDTARIVRRFLSLQP

SEQ ID NO: 30123 - protein, 1193 aa, Sesamia nonagrioides
MLTRSAARRARPPSPDSLLSSALPPPVSSATVSVVTTPAAAVASSSSDEYFSPPTTPPPVRRRGGRRPPDCLGPRGPPASDRVPAPGGSVQRMRWTQSINENIMRSYYGATEGGTNLTAYRVRMLSLFQVLEPAVNVSAQRLSDQVRVIQRNHMLDNTVLDRLRNEMQSSRIIAHQSQSAEIPPQPTNYADEGSNDRATNVSTQCNEELRNALEAAVREYRSISAEFRPRLPRLPMHNRNRAPMAALDAQLSNYFDTCEDLTDTHSILYCAAVAACRVAHVKFPSDSRATRPKPVVPAWQHRIERRIGGARALIGKLICFREGNTRPRVMRFVRRAFSGTNTSPQNYMARVTERIDFLKQKVYAWANRIRRYKRRVERYTQNRTFQSNERRVYRDWERPEQGVTDTCLPDDDAMCSFWRSIWSVPVSHTEGDWAQDVERACDPIPEMGAITICPQDVAHAVRPLPNWKSPGPDGLHNFWIKWFPRSHARLASQFQTALVSGSLPQFLTTGITHLLHKSGSTAEPKNYRPITCLPTVYKVLTSILKTKINKHIDSNSILSASQNGSRGTKELLLIDMAISQQVRRSRKDLSTCWIDYKNAYDSVPHTWLMRVLELYKVNATLRTLLMTCMRTWRTVLRYPGCRNIQRNSEPIRIERGIFQGDSLSPLWFCLALNPLSTLLEDSGLGYRLRRGGQVISHLLYMDDLKLFAHTDSQLKELLKITETFSSSIRMEFGVDKCAVMHVKRGEIMESVGTQLTGSINLRALSASETYKYLGMSEALGINVTDMKQSLKERFFGRLKKVLNSLLSGGNKVRAFNGWVMPVLMYSFGILKWTQTELDALDQRVRTLLTANRLHHPRSSVMRLYIPRKCGGRGFLNAKTLHNREICSLRDYFLETDLGMHRDVVAADKGLTPLSLAKENWRKPVVLDTNDRMEVWKSKELHARFFRALHGPDVDFQASVAWLRFGDLFGETEGFVFAIMDEVMMTNNYRRFIVKDGTVDICRACHRPGESIRHIISGCSRLANGEFLHRHNLVARIIHQQLAVKYKLVESEVPYYRYMPDPVLQNGHITLYWDRSIITDRTIIANKPDIVLVDRSERRALIVDITIPHDENLVKAEKDKQTKYLDLAHEVVDMWEVDSAIIVPIVVTANGLIAKSLDQHLRRLSLGSWIKGLIQKAVLLDTARIVRKFLSLEP

SEQ ID NO: 30124 - protein, 1006 aa, Hedya salicella
MRWSQANNENVMRAYYGATEGGTHLSAYRDRMLLLFQTLEPAIAVSAQRLADQVCAIQRRKLLDDATLDRLRLEVLAARAASTSSRNPPATSPVPALALDLVPGAPRVDPDSDEEHCVSSVSTQANEQLRRTLEETIERYRFAPDSRPRLPRLPANKRNLALVGALNALLDPYLRASEDLADTHSIKYCGAIAACRVARVKFPDADRAPRTAGGVPAWQVRIERRISTFRTLIAKLICFRGGNNRPRVMRYVAQAFAGTDVSSCDYMACVTERIDFLKQKVYAWASRIRRYRERVDRFQQNRLFQSDQRKVYRKWEGTDQRMTDGRLPDPTGMSNFWRSIWSVPVEHTEGEGVNVVERECEPIEAMGAVTISPDDVSYAARTTQNWKSPGPDGLHNFWVKWFRCSHERLATKFQQALELGSLPSFLTTGVTFLLYKSGSTTEAKNYRPITCLPTLYKLLTSILREKINTHIVANNVLAFSQNGCRVGSRGTKELLLIDTTICQQVRRSRGSLSAAWIDYKDYDSVPHSWLERILELYKVDTALRSFLGACMRQWTTVLCQLGGRDARPAPQDFIRIKRGIFQGDSLSPLWFCLALNPLSTLLKDSGLGCRLRRGGEIISHLMYMDDLKLFAPKRPELVELLKVTDTFSSAIKMEFGVDKCAVMHVQRGKVVNSTNLELSETMSLRSLSETETYKYLGMSQALSIADGDIRQAVKERFFCRLTKVLNSILSGGNKARAFKAWVMPLLTYSFGILRWTQTELDALDRRVRMLLTTHRMLHPRSSVMRLYIPRKCGGRGFLNAKDLHNREVCSLREYFLNNECGIHRDVVAVDKGLTPLSLANENWRRPTVLSTVDRKDVWKSKELHGRFYKALTGPDVDLLASVNWLRFGDLFGETEGFSCAIADEVIMTNNYRRYILKDGTVDICRACRRPGESLRHIMSGCSHLANGEYLHRHNQVARIIHQQLAVKYGLVGSEVPYYKYVPMPVLENGRATLYWDRSIGQDYCSQ

SEQ ID NO: 30125 - protein, 858 aa, Mythimna ferrago
MRFVRRAFSGTDISPRDYMSRVTERIDFLKQKVYAWANRIRRYKRRVERYTQNSTFRSNERWVYRAWERPDQGVTDTRLPDDDAMTSFWRNIWSVPVSHTEGGWTREVERACESITEMGAITISPQDVARAVHPLPNWKSPGPDELHNFWIKWLQRSHARLASQYQAALESGSLPEFLTTGVTHLLHKSGSTAEPKNYRPITCLPTVYKVLTSILRAKINHHVDSNAIMSASQSGCRNGSRGTKELLLIDMAISQQVRRSRKDLSTCWIDYKKAYDSVPHTWLMRVLELYKVDATLRTFLMSCMRQWRTVLRYPGCRNIHRNGEPVRIERGIFQGDSLSPLWFCLALNPLSTLLENSGLGYRLKRGGQVISHLLYMDDLKLFAPNNLQLMELLKVTETFSSAIRMEFGVDKCVVMHIKRGEIVESVGIQLSDSIHLRSLSPTETYKYLGMSEALGINASDMKQSLRERFFGRLKKVLNSLLSGGNKVRAFNGWVMPVLMYAFGVLIWTQTELDALDRRVRTLLTAYRMHHPRSSVMRLYIPRKCGGRGFLNAKTLHNREVCSLREYFLAADGGMHRDVVAVDKGLTPLSLANENVRKEVWQSKELHGRFFRVLHGPDVDQLASVAWLRSGDLFGETEGFVCAIMDEVIMTNNYRRFIVKDGTVDICRACHRPGESIRHIISGCSRLANGKYLHRHNLVARIIHQQLALKYSLVESEVPYYRYVPDPVLDSGDITLYWDRSIITDRTIVANKPDIVVVDRRERRAMIVDISVPHDENLVKAEKDKQIKYIDLAREVVDMWDVDSAIIVPIVVSANGLIAKSLDQHLRRLSLSGWIKGLIQKAVLLDTARIVRRFLSLEP

SEQ ID NO: 30126 - protein, 1199 aa, Laspeyria flexula
MLTRARKREALIPPPDSLLSVASQPPDPVSTTPPAAEASSSSSSDEYDSPPTSPPPVRRRGRGRPPASLGPRGPPAANRAPATGGNVRRMKWTRSINENVMRAYFVTTEGGTNLTMYRDRMLPVFQVLEPSINVSAQRLSDQVRVIQRAHMLDDATLERLRSEVRSSPVVPSSTQLVTGVADNLPQSHPTSAVEDVDCGATDVSTQCNDRLRSALECALSEYRCKLSAERPRLPRLPTHKKNIALVCALDSLLSEFLDSSEDIGDTHSILYCAAVAACRVAGVKFPTDTATRPRSGVPAWQCRIERRIADARALIGKLICFRTGNTRPRVMRFVKRAFLGTDVRPQDYSSRVTERIDYLKQKVCAWANRIRRYRRRVDRYYQNCTFQKDERWVYRRWECSDLDVAHSGRPDDDVTSLFWRNIWSAPVSHTESDWTRVVERSCESIRDMEPISITTEDVASAARSLPNWKSAGPDGLHNFWLKWLHSSHARLASGFQSCLESGSIPLFLTTGVTHFLYKSGSVADPKNYRPITCLPTVYKLLTSILRTKLVKHVNDNNIMSISQNGCRNGARGTKELLIIDMAVNQQVRRNRKDLSTCWIDYKKAYDSVPHTWLLRVLELYKIDATLCTFLKTCMGQWRTALRYPGCPQSLGNGNPIRIERGIFQGDGLSPLWFCLALNPLSTLLEDSGLGYRLRRGGQVISHLLYMDDLKLFAPGTSQLTALLKVTETFSNSIKMEFGVDKCAVMHVKRGGILESEGIQLSDSTQLRSLSAAETYKYLGMSQALGIMDSGVKQVLGERFLSRLKKVLKSLLSGGNKVRAFNSWVMPVLTYSFGILRWTQTELDARDRKVRTQLTAFRMHHPRSSVMRLYIPRKCGGRGLLCAKTLHNREVYSLREYFLKTDVEMHRDVVAVDNGLTPLGLAKENWRKPAILSLDDRKEVWKGKEQHGRFYRALHGPDVDSLSSVSWLRFGDLFGETEGFVCAIMDEVIMTNNYRRHILKDGTVDICRACHRPGESLRHNIVSGCSRLANGEYLHRHNQVARIVHQQLALKYGLVDSEVPYYIYVPDPVLENGHATMYWDRSIITDRTIVANKPDIVVIDRLERLAVIIDVTVPHDENLVKAEKDKQVKYLDLAHEIVDMWDVDSAIIVPIVVSVNGLIAKSLHRHLKRLALGGWVVGQMQKAVLLDTARIVRRFLSLEP

SEQ ID NO: 30127 - protein, 1198 aa, Laspeyria flexula
MLTRARKREALIPPPDSSLSVASQPPDPVSTTPPAAEASSSSSSDEYYSPPTSPPPVRRRGRGRPPASLGPRGPPAANRAPATGGNVRRMKWTRSINENVMRAYFVATEGGTNLTMYRDRMLPVFQVLESSINVSAQRLSDQVRVIQRAHMLDDATLERLRSEVRSSPVVPSSTQLVTGVADNLPQSHPTSAVEDVDCGATDVSTQCNDRLRSALECALSEYRCKLSAERPRLPRLPTHKKNIALVCALDSLLSEFLDSSEDIGDTHSILYCAAVAACRVAGVKFPTDTATRPRSGVPAWQRRIERRIADARALIGKLICFRTGNTRPRVMRFVKRAFLGTDVRPQDYSSRVTERIDYLKQKVCAWANRIRRYRRRVDRYYQNCTFQKDERWVYRRWECSDLDVAHSGRPDDDVTSLFWRNIWSAPVSHTESDWTRVVERSCESIRDMEPISITTEDVASAARSLPNWKSAGPDGLHNFWLKWLHSSHARLASGFQSCLESGSIPLFLTTGVTHLLYKSGSVADPKNYRPITCLPTVYKLLTSILRTKLVKHVNDNNIMSISQNGCRNGARGTKELLIIDMAVNQQVRRNRKDLSTCWIDYKKAYDSVPHTWLLRVLELYKIDATLCTFLKTCMGQWRTALRYPGCPQSLGNGNPIRIERGIFQGDGLSPLWFCLALNPLSTLLEDSGLGYRLRRGGQVISHLLYMDDLKLFAPGTSQLTALLKVTETFSNSIKMEFGVDKCAVMHVKRGGILESEGIQLSDSTQLRSLSAAETYKYLGMSQALGIMDSGVKQVLGERFLSRLKKVLKSLLSGGNKVRAFNSWVMPVLTYSFGILRWTQTELDALDRKVRTQLTAFRMHHPRSSVMRLYIPRKCGGRGLLCAKTLHNREVYSLREYFLKTDVEMHRDVVAVDNGLTPLGLAKENWRKPAILSLDDRKEVWKGKELHGRFYRALHGPDVDSLSSVSWLRFGDLFGETEGFVCAIMDEVIMTNNYRRHILKDGTVDICRACHRPGESLRHIVSGCSRLANGEYLHRHNQVARIVHQQLALKYGLVDSEVPYYMYVPDPVLENGHATMYWDRSIITDRTIVANKPDIVVIDRLERLAVIIDVTVPHDENLVKAEKDKQVKYLDLAHEIVDMWDVDSAIIVPIVVSVNGLIAKSLHRHLKRLALGGWVVGQMRKAVLLDTARIVRRFLSLEP

SEQ ID NO: 30128 - protein, 1198 aa, Laspeyria flexula
MLTRARKREALIPPPDSSLSVASQPPDPVSTTPPAAEASSSSSSDEYYSPPTSPPPVRRRGRGRPPASLGPRGPPAANRAPATGGNVRRMKWTRSINENVMRAYFVATEGGTNLTMYRDRMLPVFQVLEPSINVSAQRLSDQVRVIQRAHMLDDATLERLRSEVRSSPVVPSSTQLVTGVADNLPQSHPTSAVEDVDCGATDVSTQCNDRLRSALECALSEYRCKLSAERPRLPRLPTHKKNIALVCALDSLLSEFLDSSEDIGDTHSILYCAAVAACRVAGVKFPTDTATRPRSGVPAWQRRIERRIADARALIGKLICFRTGNTRPRVMRFVKRAFLGTDVRPQDYSSRVTERIDYLKQKVCAWANRIRRYRRRVDRYYQNCTFQKDERWVYRRWECSDLDVAHSGRPDDDVTSLFWRNIWSAPVSHTESDWTRVVERSCESIRDMEPISITTEDVASAARSLPNWKSAGPDGLHNFWLKWLHSSHARLASGFQSCLESGSIPLFLTTGVTHLLYKSGSVADPKNYRPITCLPTVYKLLTSILRTKLVKHVNDNNIMSISQNGCRNGARGTKELLIIDMAVNQQVRRNRKDLSTCWIDYKKAYDSVPHTWLLRVLELYKIDATLCTFLKTCMGQWRTALRYPGCPQSLGNGNPIRIERGIFQGDGLSPLWFCLALNPLSTLLEDSGLGYRLRRGGQVISHLLYMDDLKLFAPGTSQLTALLKVTETFSNSIKMEFGVDKCAVMHVKRGGILESEGIQLSDSTQLRSLSAAETYKYLGMSQALGIMDSGVKQVLGERFLSRLKKVLKSLLSGGNKVRAFNCWVMPVLTYSFGILRWTQTELDALDRKVRTQLTAFRMHHPRSSVMRLYIPRKCGGRGLLCAKTLHNREVYSLREYFLKTDVEMHRDVVAVDNGLTPLGLAKENWRKPAILSLDDRKEVWKGKELHGRFYRALHGPDVDSLSSVSWLRFGDLFGETEGFVCAIMDEVIMTNNYRRHILKDGTVDICRACHRPGESLRHIVSGCSRLANGEYLHRHNQVARIVHQQLALKYGLVDSEVPYYMYVPDPVLENGHATMYWDRSIITDRTIVANKPDIVVIDRLERLAVIIDVTVPHDENLVKAEKDKQVKYLDLAHEIVDMWDVDSAIIVPIVVSVNGLIAKSLHRHLKRLALGGWVVGQMQKAVLLDTARIVRRFLSLEP

SEQ ID NO: 30129 - protein, 948 aa, Noctua fimbriata
MHNKNRALVCALDSQLENIFESSENLVDTHSILYCGAVAACRLANVKFPNFDVATRPKPAVPAWQRRIERRIDEARVLIGKLHCFREGNTRPRVMRFVRRAFSGTGISPQEYMSRVTERIDFLKQKVYAWANRIRRYKRRVDRYSQNRMFQSDERWVYRAWERPELNMTDVCRPDDAATSSFWRSIWSVPVCHTEADWMRDVERVCEPIPEMEPILITRLDIARAVRPLPNWKSPGPDGLHNFWLKWLSSSHTCLASQFQSSLESGSLPQFLTTGVTHLLHKSGSPAEPKNYRPITCLSTVYKLLTSILRAKINTHIDKNSIMSASQNGCRSGSRGTKELLLIDMAISQQVRRSRKDLSTCWIDYKKAYDSVPHTWLMRVLELYKIDATLRAFLESCMGQWRTVLRYPGCGQIQGNDEPVWIKRGIFQGDSLSPLWFCLALNPLSTLLEDSGLGYRLRRGGQVISHLLYMDDLKLFAPNKLQLMELLKVTETFSSAIRMEFGVDKCAVMYVKQGEIMESEGIQLSDSIHLRTLSSTESYKYLGMSEALGINVTDMKQSLKERFFGRLNKVLHSLLSGGNKVRAFNGWVMPVLMYSFGVLKWTQTELDALDRRVRTLLTANRMHHPRSSVMRLYILHNREMCSLREYFLKVEVGMHRDVVAVDKGLTPLSMAKENWRKPEVLTTDDRKEVWQGKELHGRFYRALHGPDVDFLASVSWLRFGDLFGETEGFVCAIMDEVMLTNNYRKYIMKDGTVDVCRACHRPGESIRHIISGCSRLANGEYLHRHNQVARIIHQQLALKYKLVESEVPYYKYVPDPVLEKDHVTLYWDQSIITDRTIVANKPDIVVIDRSARRVMIVDVTIPHDENLVKAEKEKQIKYLDLAHEVVDMWNVNSAIIVPIVVTANGLIAKSLDDHLSKLSLGGWIKGLIQKAVLLDTARIVRRFLSLEP

SEQ ID NO: 30130 - protein, 1000 aa, Furcula furcula
MSTNISTNVSTQLRSTLEDVVREYRTMPQGLRPRLPRLPMHKRNRALVCALDSLLSSYFDSSEVLADAHSLLYCAAMTACRVARVKFPNSDAATRPRPAVPAWQCRIERRIGEARVLIGKLTCFREDNTRPRVMRFVRRAFSGTGIDPREYFSRVTERIDFLKQKVCAWANRIRRYRARVDRYSQNNMFQRDQRWVYRSWERPSQIGGEVQRPDDDAMIRFWRNIWSVPVNHSEGDWIRDVKQVCEPIPEMGAITIRPQDVADAVRPLPNWKAPGPDGLHNFWLKWLRSSHACLASLFQSAVESGSLPDFLTTGITHLLHKTNSTADPKNYRPITCLPTVYKTLTSILRAKIYRHVEGNSIMSASQNGCRSGARVTKELLLIDMAICQQARRNRKDLSTCWIDYKKAYDSVPHTWLMRVLELYKVNTTLRTFLASCMRQWRTVLHYPGSRQIGDGEPIRIERGIFQGDSLSPLWFCLALNPLSTLLKGSGLGCRLRRGGQVISHLLYMDDLKLFAPTEPQLMGLLKVTETFSNSIRMGFGVDKCAVMHVKRGRLVESRSVQLSDSTDLRTLSATETYKYLGMSQALGINETDMKQSLRERFLGRLRKVLKSFLSGGNRVRAYNGWVMPVLMYSFGILKWTQTELDTLDRTVRTLLTTYRMHYPRSSVMRLYIPRKCGGRGFLNAKTLHNREICNLWEYFLHCSGEMHTDVVAVDNGLTPLSLAIGNWRKPVVLTTGDREAVWQSKELHGRFYRALHGPDVDFSASVAWLRFGDLFGETEGFVCAIMDEVVMTNNYRKYILRDGTIDICRACHRPGESLRHIISGCSRLANGEYLNRHNQVARIIHQQLALKYRLVTSEVPYYRYVPEPVLEDGHITLYWDRSIITDRTIVANKPDIVLIDRTERYAMIVDVTVPHDENLVKAEKDKECKYLDLAHEVVDMWDIDRAIIVPIVVSAHGLMAKSLDKHLKRLTLDGWIKGQMQKAVLLETARIVRKFLSLEP

SEQ ID NO: 30131 - protein, 1082 aa, Xestia xanthographa
MRWTQSINENVMRAYYGATEGGNNLTAYRVRMLSLFQVLEPAVNVSAQRLSDQVRVIQRNRMLDDTVLDRLRTEIQSNHVIATPSQAVVPPQSSIIPNCDNDVSNDMVTNVSTQCNVEMRSALEGAIREYRFMQPDLRPRIPRLPMHNKNRALVAVLDSQLSNYFDNCEDLTDVHSILYCAAVAACRVAHVKFPSDRATRPKPAVPAWQYRIERRIGGARALIGKLVCFREGNTRPRVMRFVRQAFSGTDISPRDYMSRVTERIDFLNQKVYAWANRIRRYKRRVDRYTQNRTFQKDERWVYRTWERPDQGVADTHLPDDDAMCSFWRSIWSVPVSHAEGEWTRVIERACDPISEMGAITISPQDVARAVRPLPNWKSPGPDGLHNFWIKWFTRSHARLATLFQSALESGSLPEFLTTGITHLLHKSGSTAEPKNYRPITCLPTVYKVLTSILRTKISKHIDDNSVMSASQNGCRNGSRGTKELLLIDMAISHQVRRSRKDLSICWIDYKKAYDSVPHTWLMRVLELYKVDATLRAFLMSCMGQWRTVLRYPGCRQIQRNSEPIRIERGIFQGDSLSPLWFCLALNPLSTLLEDSGLGYRLRKDGQVISHLLYMDDLKLFAPNDLRLMELLKVTETFSNAIRMEFGVDKCAVMHVKRGEIVESVGTQLSDSITLRSLSATETYKYLGMSEALGVNVADMKQSLKERFFGCLKKVLNSLLSGGNKVRAFNGWVMPVLMYSFGILKWTSSVMRLYIPRKSGGRGFLNAKTLHNREICSLREYFLGTDVGMHRDVVTMDKGLTPLSLAKENWRKPPVLDTNDRREVWQSKELHGRFFRALHGPDVDLSASVAWLRSGDLFGETEGFVCAIMDEVMMTNNYRRFIVKDGTVDICRACHRPGESIRHIISGCSRLANGEYLHRHNLVARIIHQQLALKYNLVESEVPYYRYVPDPVLDNGCITLYWDQSIITDRTIVANKPDIVVVDRSERRAMIVDITVPHDENLVKAEKDKQIKYLDLAREVVDMWEVDSAIIVPIVVSAHGLIAKSLVQYLRRLSLGSWIKGLIQKAVLLDTARIVRRFLALEP

SEQ ID NO: 30132 - protein, 1200 aa, Cosmia trapezina
MLTRSAARARPPPPDSSLSSASPPPVPSPTVSAVTTPAAVVASSSSDEYFSPPTSPTPVRRQGRGRPPKSLGLRGQPAPSWVPAAGGCVQRMRWTQSMNENVMRAYYGSTEGGTNLTAYRVRMLSLFQELEPTVNVSAQRLSDQVRVIQRNHRLDDAALDRLRSEILNDRIVSTPAQTAVQASIIDAVPPRSTHVVGEGDDRVATVSSQSNDRLRSALEDAFREYRSTPTELRPRLPRLPMHKKNRALVCALDSQLKDFFESSEDLVDTHSILYCAAVAACRLANVKFPNCDGATRPKPAVPAWQCRIERRIDGARVLIGKLYCFREGNTRPRVMRFVRRAFSGTGISPPEYMSRVTERIDFLKQKVCAWASRIRRYERRVDRYTQNRIFQSDERWVYRAWERPEQNVTDVCRPDDTITSAFWRSIWSVPVCHAEAGWMQDVERVCEAIPEMEAVLITPLDVARAVRPLPNWKSPGPDGLHNFWIKWLISSHTRLASQFQSSLESGSLPQFLTTGVTHLLHKSGSPAEPKNYRPITCLSTIYKLLTSILRAKINMHIENNSIMSASQNGCRNGSRGTKELLLIDMAISQQVRRSRKDLSTCWIDYKKAYDSVPHTWLMRVLELYKIDATLRTFLGSCMGQWRTVLRYPGCRRIQGNDEPVWIKRGIFQGDSLSPLWFCLALNPLSTLLEDSGLGYRLRRGGQVISHLLYMDDLKLFAPNKLRLMELLKETFSSAIRMEFGVDKCAVMHVKRGEIMESEGIQLSDSIHLRSLSSSETYKYLGMSEALGINVADMKQSLKERFFGRLKKVLISLLSGGNKVRAFNGWVMPVLMYSFGILKWTQTELDALDRRVRTLLTTNRMHHPRSSVMRLYIPRKCGGRGFLNAKTLHNREVCSLREYFLKADVGMHRDVVAVDKGLTPLSMANENWRKPVVLTTDDRKKVWQSKELHGRFYRALHEPGVDFLASVSWLRFGDLFGETEGFVCAIMDEVILTNNYRRHIMRDGTVDVCRACHRPGESIRHIVSGCSRLANGEYLHRHNQVARIIHQQLALKYKLVDSEVPYYRYVPDPVLENDHVTLYWDRSIITDRTIVANKPDIVVIDRLARRAMIVDVTIPHDENLVKAEKEKQIKYLDLAHEVVDMWNVSSAIIVPIVVTANGLMAESLDQHLLRLSLGGWIKGQIQKAVLLDTARIVRRFLSLQP

SEQ ID NO: 30133 - protein, 1081 aa, Eupsilia transversa
MLSLFQELEPTVNVSAQRLSDQVRVIQRNHRLDDAELDRLRSEVLSNHIIPSPAQTAELATPSNVIPPRSNRGLEQEDDRVATVSSQCNDRLRNALEDAFREYRYTPTELRPRLPRLPMHKKNRALVCALDSQLKNFFESSEDLIDTHSILYCAAVAACRLANVKFPNCDAATRPKPAVPAWQCRIERRIDGARVLIGKLYCFREGNTRPRVMRFVRRAFLGTGSSPQEYMSRVTERIDFLKQKVCAWASRIRRYKRRVDRYTQNRMFQSDERWVYRAWERPEQNVADVCRPDDAATSAFWRSIWSVPVCHAEAGWMHGVERVCEAIPEMEAVIITPLDVARAVRPLPNWKSPGPDGLHNFWLKWLISSHTRLASQFQSSLESGSLPQFLTTGVTHLLHKSGSPAEPKNYRPITCLSTVYKLLTSILRAKINSHIDSHSIMSASQNGCRNGSRGTKELLLIDMAISQQVRRSRKDLSTCWIDYKKAYDSVPHTWLMRVLELYKIDATLRTFLMSCMGQWRTVLRYPGCRQIQGNDEPVWIKRGIFQGDSLSPLWFCLALNPLSTLLEESGLGYRLRRGGQVILSHLLYMDDLKLFAHNKLRLMELLKVTETFSSAIRMEFGVDKCAVMHVKRGEIMESEGTQLSDSIHLRSLSSTESYKYLGMSEALGINVADMKQALKERFFGRLKKVLSSLLSGGNKVRAFNGWVMPVLMYSFGILKWTQTELDALDRRVRTLLTANRMHHPRSSVMRLYIPRKCGGRGFLNAKTLHNREVCSLREYFLKTEEGMHRDVVAVDKGLTPLSMAKENWRKPVVLTTDDRKEVWQSKELHGRFYRVLHEPGVDFLASVSWLRFGDLFGETEGFVCAIMDEVILTNNYRRHIMKDGTVDVCRACHRPGESIRHIISGCSRLANGEYLHRHNQVARIIHQQLALKYKLADSEVPYYKYVPDPVLENDHVTLYWDRSIITDRTIVANKPDIVVIDRLARRAMIVDVTIPHDENLVKAEKEKQIKYLDLAHEVVDMWNVSSAIIVPIVVTANGLMAESLDQHLLRLSLGGWIKGLIQKAVLLDTARIVRRFLSLQP

SEQ ID NO: 30134 - protein, 1140 aa, Cosmia trapezina
MLTKLKGKLSQLSRLFEFMSNNNNNGCVQRMRWTQSMNENVMRAYYGSTEGGTNLTAYRVRMLSLFQELEPTVNVSAQRLSDQVRVIQRNHRLDDAALDRLRSEVLSNHIISNPTQTAVQPSIIDALPPRSNHVVEEEDDRVATVSSQYNDRLRDALEDAFCEYRSTPTELRPRLPRLPMHKKNRALMCALDSLLKDFFESSENLVDTHSILYCAAVAACRLANVKFPNCDGATRPKPAVPAWQCRIERRIDGARVLIGKLYCFRQGNTRPRVMRFVKRAFSGTGISPPEYMSRVTERIDFLKQKVCAWASRIRRYKRRVDRYTQNRMFQSDERWVYRSWERPEQNVTDVCRPDDAATSAFWRSIWSVPVCHAEAGWMKDVERVCEAIPEMEPVLITPLDVARAVRPLPNWKSPGPDGLHNFWLKWLISSHTRLASQFQSSLESGSLPQFLTTGVTHLLHKSGSPAEPKNYRPITCLSTIYKLLTSILRAKINMHIDSNSIMSTSQNGCRNGSRGTKELLLIDMAISQQVRRSRKDLSTCWIDYKKAYDSVSHAWLMRVLELYKIDATLRTFLESCMGQWRSVLRYPGCRRIRGNDEPVRIKRGIFQGDSLSPLWFCLALNPLSTLLEDSGLGYRLRRGGQVISHLLYMDDLKLFAPNKLRLMELLKVTETFSSAIRMEFGVDKCAVMHVKRGEIMESEGIQLSDSIHLRSLSSSETYKYLGMSEALGINVADMKQSLRERFFGRLKKVLISLLSGGNKVRAFNGWVMPVWMYSFGILKWTQTELDALDRRVRTLLTANRMHHRSSVMRLYIPRKCGGRGFLNAKTLHNREVCSLREYFFKSDVGMHRDVVAVDKGLTPLSMAKENWRKPVVLTTDDRKKVWQSKELHGRFYRALHEPGVDFLASVSWLRFGDLFGETEGFVCAIMDEVILTNNYRRYIMKDGTVDVCRACHRPGESIRHIISGCSRLANGEYLHRHNQVARIIHQQLALKYKLVDSEVPYYRYVPDPVLENDHVTLYWDRSIITDRTIVANKPDIVVIDRLARRAMIVDVTIPHDGNLVKAEKEKQIKYLDLAREVVDMWNVDSAVIVPIVVTANGLIADSLDQHLSRLSLGGWIKGQIQKAVLLDTARIVRRFLSLQP

SEQ ID NO: 30135 - protein, 1194 aa, Mamestra brassicae
MLTRSRARHLATHPSPSASSLSSASPPPEPSPTVSAVTPAVAVVSSSSDEYFSPPTTPPPARRRRGRRPPDGLGPRGPPASDRVPAPGGSVQRMRWTQSINENVMRSYFGATEGGTNLTAYRGRMLSLFQVLEPAVNVSAQRLSDQVRVIQRNRMLDDSVLDRLRMEMCGHVITPPSQTVAPPQSQISSHADEESNDRVTNVSTQCNEELRSALECAIREYGYVPPELRPRLPRLPMHNKNRALVAALDSQLSNYFDDCEDLTDTHSIMYCAAVAACRVAHVKMTNDRVTRPKPAVPAWQCRIERRIGGARALIGKLICFREGNTRPRVMRFVRRAFSGTDISPRDYMSRVTERIDFLKQKVYAWANRIRRYRRRVERYTQNRTFRSNERWVYRVWEQPDHGVTDTRLPDDDAMCSFWRNIWSVPVSHTEGDWIREVERACDPLPEMGAITISPQDVARAVRPLPNWKSPGPDGLHNFWIKWLQRSHARLASQYQSALESGSLPKFLTTGVTHLLHKSGSTAEPKNYRPITCLPTVYKVLTSILRAKINNHINSSNIMSVSQNGCRNGSRGTKELLLIDMAISQQVRRSRKDLSTCWIDYKKAYDSVPHTWLRRVLELYKIDTMLRTFLMSCMGQWRTVLRYPGCRNIQRNSEPVRIERGIFQGDSLSPLWFCLALNPLSTLLENSGLGYRLKRGGQVISHLLYMDDLKLFAPSNLQQMKVTETFSSAIRMEFGVDKCAVMHVKRGEIMESVGIQLSDSINLRSLSSAETYKYLGMSEALGINVTDMKQSLKERFFGRLKKVFNSLLSGGNKVRAFNGWVMPVLMYSFGVLKWTQTELDALDRRVRTLLTAYRMHHPRSSVMRLYIPRKCGGRGFLNAKTLHNREICSLREYFLAVDVGIHRDVVAVDKGLTPLSLANENWRKPAVLDTDDRRAVWQSKELHGRYFRALHGPDVDQLASVAWLRFGDLFGETEGFVCAIMDEVIMTNNYRRFIVKDGTVDICRACHRPGESIRHIVSGCSRLANGEYLHRHNLVARIIHQQLALKYSLVESEVPYYRYAPDPVLDNGNITLYWDRSIITDRTIVANKPDIVVVDRIERRVMIVDITVPHDENLVKAEKDKQIKYIDLAREVVDMWDVDSAIIVPIVVSANGLIATSLDQHLRMLSLGSWIKGLIQKAVLLDTARIVRRFLSLEP

SEQ ID NO: 30136 - protein, 1110 aa, Mamestra brassicae
MRWTQSMNENVMRAYYGSTEGGTNLTAYRVRMLSLFQDLEPTVNVSAQRLSDQVRVIQRNHRLDDAALDRLRSEILNNLIISTPTQTAVQAPVNGRITPRPNNVSDEVDDRVVTVSSQCNDRLRSALEDALREYRSTPTELRPRLPRLPMHKKNRALVCALDSLLQNIFESSESLVDTHSILYCGAVAACRIANVKFPGCDEAIRPKPAAPAWQRRIERRIDETRALIGKLYCFREGNTRPRVMRFVRRAFSGTEISPRDFTSRVTERIDFLKQKVCAWASRIRRYKRRVDRYSQNRMFQSDERWVYRAWERPEQSVTDVCRPDDVATSIFWRSIWSVPICHAEGGWMRDVERVCEAIPQMEKITITTLDVAKAVRPLPNWKSPGPDGLHNFWLKWYSSSHALLASQFQSSLDSGSLPQFLTTGVTHLLHKTGSPTEPKNYRPITCLSTVYKLLTSILRAKINEHIESNSIMSASQNGCRKGSRGTKELLLIDMAISQQVRRSRKDLSTCWIDYKKAYDSVPHTWLMKVLELYKIDATLRTFLESCMRQWKTVLRYPGCRPIQGSDEPVWIKRGIFQGDSLSPLWFCLALNPLSTLLEDSGLGYRLRRGGQAISHLLYMDDLKLFAPNNLRLMEILKVTETFSAIRMEFGVDKCAVMHVKKGEIMESEGIHLSDSIQVRSLSSTETYKYLGMLEALGINGTDMKQSLRERFFGRLKKVLNSLLSGGNKVRAFNGWVMPVLMYTFGILKWTQTELDALDRRVRTLLTANRMHHPRSSVMRLYIPRKCGGRGFLNAKTLHNREMCSLREYFLKADVGMHRDVVAVDKGLTPLSMAKENWRTPVILTTDDRKEVWKGKELHGRFYRALHGSDVDFSASVAWLRFEDLFGETEGFVCAIMDEVILTNNYRRHIMKDGTVDMCRACHRPGESIRHIISGCSRLANGEYLHRHNQVARIIHQQLALKYNLVDSEVPYYKYVPDPVLENDHVTLYWDRSIITDRTIVANKPDIVVIDRLARRTMIIDVTIPHDENLVKAEKEKQIKYLDLAHEVVDMWNVESAVIVPIVVTANGLMAKSFDDHLSKLALRSWVKGLIQKAVLLDTARIVRRFLSLEP

SEQ ID NO: 30137 - protein, 1236 aa, Atethmia centrago
MLTRSAARARPPPPDSSLSSASPPPVPSPTVSAVTTPAAVVASSSSDEYFSPPTSPTPVRRQGRGRPSKSLGLRGQLALSRVPAAGGCAQRMRWTQSMNENVMRAYYGSTEGGTNLTAYRVRMLSLFQKLEPTVNVSAQRLSDQVRVIQRNHRLDDAALDRLRSEVLSNHIVSTPAETATHAPIINAIPPRSNYDVEEEDDRVATVSSQCNGRLRSALEDAFRKYRSTPTELRPRLPRLPMHKKNRALVCALDSLLKDFFESSEDLVDTHSILYCAAVAACRLANVKFPNCDGATRPKPAVPAWQCRIERRIDGARVLIGKLYCFREGNTRPRVMRFVRRAFSGTGISPRKYMSRVTERIDFLKQKFCAWASRIRRYKRRVDRYTQNRMFQSDERWVYRAWERPEQNETDVCRPDDATTTAFWRSIWSVPVCHAEADWMRDVERVCETIPEMEVVIIPPSDIARAVRPLPNWKSPGSDGLHNFWLKWLTSSHTCLASQFQSSLESRLLPQFLTTGITHLLHKSGNPAEPKNYRPITCLSTVYKLLTSILRAKINTHIDSNSIMSDSQNGCRNGSRGTELLLIDMAISQQVRRFRKDLSTCWIDYKKAYDSVPHTWLMRVLELYKIDTTLRTFLESCMVQWRTVLRYPGCRQIQGNDEPVWIKRGIFQGDSLSPLWFCLALNPLSTLLEDSGLGYRLRRGGQVISHLLYMDDLKIFAPNKLQLMELLKVTETFSSAIRMEFGVDKCAVMHVKRGEIMESEGIQLSDSIHLRSLSSPESYKYLGMSEALVINVTDMKQSLKERFFGRLKKVLISPLSGGNKVRAFNGWVMPVLMYSFGILKWTQTELDALDRRVRTLLTANRMHHPRSTVMRLYIPRKCGGRGFLNAKTLYNREICSLREYFLKAEVGMHRDVVAVDKGLTPLSMAKENWCKPVILTTDDRKEIWQNKELHGRFYRALHEPDVDFLASVSWLRFGDLFGETEGFVCAIMDEVILTNNYRRHIMKDGTVDVCRACHRPGESIRHIISGCSRLANGEYLHRHNQVARIIHQQLALKYKLVNSEVPYYKYAPDPVLENDHVTLYWDRSIITDRTIVANKPDIVVIDRLARRAMIVDVTIPHDENLVKAEKEKQIKYLDLAHEVVDMWNVNSAAIVPIVVTANGLMAQPSSLEALVRRLDQGPDSEGSTPRYGPHCEEVPVSGVLTTGSLDPAPDTGGPLFFIFLNFFYTFFQEIFKNIFYM

SEQ ID NO: 30138 - protein, 960 aa, Agrochola circellaris
MHNKNRALVAVLDSQLSNYFDDCEDLTDTHSILYCAAVAACRVAHVKFANYSRATRPKPAVPAWQCRIERRIGGARALIGKLICFREGNTRPRVMRFVRRAFSGTDISPEDYVSRATERIDFLKQKVYAWANRIRRYKRRVERYTQNRTFQSDERRVYRAWEQPDQGVADARLPDDYAMCSFWRSIWSAPVSHTEGDWTREVERACDPIPEMGAITICPQDVACAVRPLPNWKSPGPDGLHNFWIKWFKRSHARLAAQYQTALESGSLPQFLTTGVTHLLHKSGSTADPKNYRPITCLPTVYKVLTSILRAKINKHIDTNSIMSASQNGCRNGSRGTKELLLIDMTISQQVRRSRKDLSTCWIDYKKAYDSVPHTWLMRVLELYKVDATLRTFLLSCMGQWRTVLRYPGCRNIQRNSEPIRIERGIFQGDSLSPLWFCLALNPLSTLLEGSDLGYRLRRGGQVISHLLYMDDLKLFAPNNFQLMELLKVTETFSRAIRMEFGVDKCAVMHVKRGEIVESVGTQLTDSINFRALSASETYKYLGMSETLGINVTDMKQSLKERFFGRLKKVFNSFLSGGNKVRAFNGWVMPVLMYSFGVLKWTQTELDALDRRVRTLLTGYRMHHPRSSVMRLYIPRKCGGRGFLNAKTLHNREICSLREYFLEADVGMHRDVVAVDKGLTPLSLAKENWRKPAVLDTNDRKEVWQNKELHGRYFRALHGPDVDLLASVACFGDLFGETEGFVCAIMDEVMMTNNYRRFIVKDGTVDICRACHRPGESIRHIISGCSRLANEEYLHRHNLVARIIHQQLALKYSLVESEVPYYRYVPDPVLESGNITLYWDRSIITDRSIVANKPDIVVVDRAERRTMIIDITVPHDGNLVKAEKDKQIKYLDLAREVVDMWDVDSAIIVPIVVSANGLIAKSLDQHLRRLSLGGWIKGLIQKAVLLDTARIVRRFLSLEP

SEQ ID NO: 30139 - protein, 1128 aa, Phlogophora meticulosa
MLTRAAARPARPPPPASSLSSASSPPAPSPIVSTVKPAVPVASSSSDEYFSPPTSPPPARRRRGRRPPDGLGPRGPPASDRVPAPGGSVQRMRWTQSINENVMRSYYGATEGGSNLTAYRVRMLSLFQVLEPAVKVSAQRLSDKVRVIQRNHMLDDVVLDRLRTEMQSSRVITSPSHTVVPPQYNIVLSSFADGEGSDKVTNVSTQCNEERRLRPRIPRLPMHNKNRALVAALDSQLSNYFDNCDDLTDAHSILYCAAVAACRVAHVKFPNDIATRPKPAVPAWQCRIERRIAGARALIGKLVCYREGNTRPRVMRYVRRAFLGTDISPRDYMSRVTERIDFLKQVYAWASRIRRYKRRVERYTQNRTFQSNERWVYRAWQRPVQGVTDTHLPDDDVMCSFWRNIWSVPVSHTEGDWTREVERACDPIPQMGAITISPQDVARAVRPLPNWKSPGPDGLHNFWIKWLQKSHARLASQFQSALETGSLPQFLTTGITHLLHKSGSTAEPKNYRPITCLPTVYKVLTSILRVKINNHIDSNSIMSASQNGCRNGSRGTKELLLIDTAISQQVRRSRKDLSTCWIDYKKAYDSVPHTWLKRVLELYKVDATLRTFLTSCMGQWRTVLRYPGCRQIQRNSEPIRIERGIFQGDSLSPLWFCLALNPLSTLLEDSGLGYRLKRGGQVVSHLLYMDDLKLFAPSDLQLMELLKVTKTFSSAIRMEFGVDKCAVMHVKRGKIVESVGTQHPDFINFRALSPIETYKYLGMSEALGINAEMLKKVFNSLLSGGNKVRAFNGWVMPVLMYSFGILKWTQTELDALDRRVRTFLTASRMHHPRSSVMRLYIPRKCGGRGFLNAKTLHNREICSLRDYFLETDVGMHRDVVAVDQGLTPLSLAKENWRKPVVLDTNDRKEVWHSKELHGRFFQALHGPDVDQLASVSWLRFGDLFGETEGFVCAIMDEVIMTNNYRRFIVKDGTVDICRACHRPGESIRHIISGCSRLANEEYLHRHNLVARIIHQQLALKYSLVESEVPYYKYVPDPVLENGSVNLYWDRFIITDRIIVANKPDIVVMDRIERRATIIDVTVPHDGNLVKAEKDKQIKYLDLAREVVDMWDVDSNRCTDSRVSQWLNS

SEQ ID NO: 30140 - protein, 950 aa, Sesamia nonagrioides
MHKKNKALVCALDSQVSNYLKDSKDLTDTHSILYCGAVAICRVAHVKFPDSDRATRPKPAVPAWQCRIERRIGETRALIGKLISFREGNTRPRVMRFVRRAFSGTDISTRDYLLRVTERIHFFKQKIYAWANRIRRYRRRVERYSQNRNFQSDERRVYRAWERSDQGVTDTCLPDDDATCSFWRNIWSVPVSHTEGGWTRDVERACDPVPEMGAITICPQDVARAVLPLPNWKSPGPDGLHNFWIKWFSGSHACLASQFQTALESGSLPQFLTTGITHLLHKSGSTAEPKNYRPITCLPTVYKVLTSILKAKINTHIDSNSIMSASQNGCRNGSRGTKELLLIDMAISQQVRRSRKDLSTCWIDYKKAYDSVPHTWLMRVLELYKVDATLRTFLMTCMSQWRTVLRYPGCRNIQMNSEPIRIERGIFQGDSLSPLWFCIALNPLSTLLEDSGLGYRLRRGGQVISHLLYMDDLKLFAHTNSQLKELLKITETFSSAIRMEFGVDKCAVMHVQRGKIVESVGTQLIGSINLRSLSASETYKYLGMSEALGINITDMKQSLKERFFGRLKKVLNSLLSGGNKVCAFNGWVMPVLLYSFGILKWTQTELDALDQRVRTLLTANRLHHPRSSVMRLYIPRKCGGRGFLNAKTLHNREICSLREYFLKTDVGMHRDVVAVDKGTPVVLETNDRMEVWQSKELHGRFFRALRGPDVDFQASVAWLRCGDLFGETEGFVCAIMDEVMMTNNYRRFIVKDGTVDICRACHRPGESIRHIISGCSRLANGEYLHGHNLVARIIHQQLALKYNLVESEVPYYRYMPDPVLENGHITLYWDRSIITDRTIVANKPDIVMVDRSERRAMIVDITIPHDENLVKAEKDKQIKYLDLAHEVVDMWEVDSAIIVPIVVTANGLIAKSLDQHLRRLSLGGWIKGLIQKAVLLDTARIVRKFLSLEP

SEQ ID NO: 30141 - protein, 1148 aa, Ennomos quercinarius
MITRSKTKKADTQSARPPPPPAPSSPSSSSGDEYGTPPDTTASSDEDGPPSPPPPPPPARRGRPPLPARLGPAGQPAPRAAPATGGIMRRMRWTQAMNENCMRAYYGATEGGSSLTAYRDRMLSLFQDLEPAVAVSAQRLSDQVRAIQRCKMLDEPTLDRLRLEALPIRATSPSPRVLPAALPDPGPIMGPLPVTPRGDPAIDGEESASDSVSTQANEQLRSALEDAILQYRSTPTSRPRLPRLPTNRRNLVLMGALNTLLAPYLRTSEDLVDTHSILYCGAIAACRVARVKFPDTDRAPRPADGAPAWQVRIEKRITTFRTLIAKLVCFSRGNHRPRVMRFVTQAFAGTGIRLQDYMACVTERIDFLKQKVYAWASRIRRYRERVDRYQQNRLFQSDQRKVYRNWEGTGQRVVDGQLPDANAMNEFWRSIWSVPVEHTEGDWMRVVERVCEPIESMGSITIDPEDISCAIRTAQNWKSPGPDGLHNFWIKWIRCSYPCLAIQFQEALEAGSLPSFMTTGVTFLFHKSGSTTEAKNYRPITCLPTLYKLLTSILRTKINSHIVANNILAPAQNGCRVGSRGTKELLLIDTAICQQVRRNRGALSTAWIDYKKAYDSVPHSWLERILELYKIDATLRSFLSACMRQWTTVLRQPGGGESVSDPQDFIRIERGIFQGDSLSPLWFCLALNPLSTLLGDSGLGYRLRRGGEIISHLLYMDDLKLFAPQRPQLIELLKITENFSNSINMEFGVDKCAVMHVHGGKVVNSTNLQLSETMTLRSLSESETYRYLGMSESLGISVGDVKRTVKERFFCRLTKVLNSLLSGGNKTRAFNGWVMPLLMYSFGILRWTQTELDALDRKVRQLLTSHRMLHPRSSVMRLYIPRKWGGRGFLNAKTLHNREVCSLRDYFLNNECGMHRDVVAVDKGLTPLSLANENWRKPVVLSTEDRRDVWKGKELHGRFYRALTGPDVDLHASVNWLRFGDLFGETEGFVCAIADEVIKTNNYRKYIMKDGTVDICRACRRPGESLRHIISGCSHLANGEYLHRHNLVARIIHQQLALQYGLVESEVPYYKYTPGPVLENGRALLYWDRSIITDRTIVANKPDIVLVDRSQRRAVLVDIGSRVRFRRQYSLTRHVLSGGSSLCSPNHR

SEQ ID NO: 30142 - protein, 1139 aa, Erannis defoliaria
MITRSKAIRNAAEQHSARPPSPPAPSSPSASSGEDVFVTPRESSASSSDSDVSGPRTPAPPPPARRGRPPLPARLGPAGLPASRPALAAGGVVRRMRWSQTNNENCMRAYYRATEVGTNLTAYRVRMLSLFQALEPTVTVSAQRPSDQVRAIQRLNLLDQSLLDRLRLEAQSARSTPVSTRDSHVASSAPTLASMPTSVATLATPADPVVDEGDGTGMSVTTQVSEQLRRALEDAISQYRFALNSRPRLPRLPTHRRNLALMGALNALLAPYLRASEDLTDTHSILYCGAVAACRVARVKFPDSNRAPRTAGDVPAWQARIERRINTFRTLIAKLICFSRGNNRPRVMRFVTQAFAGTGIRPQQYMASVTERIDYLKQKVYAWASRIRRYRERVDRYWQNRVFQSDQRKVYRNWEGAEQRVSDGHLPDANAMTNFWRGIWSVPVEHTEGDWMRVVERECESIEPMGSILIDPVDVSCAIRTAQNWKSPGPDGLHNFWIKWFRCSHDRLATQFQEALELGSLPSFMTTGVTFLLHKSGSTTEPKNYRPITCLPTIYKLLTSILSTKINTHIVANNVLAPAQNGCRVGSRGTKELLLIDMAISQQVRRNKGALSAAWIDYKKAYDSVPHSWLERILELYKIDTTLKSFLSACMRQWTTVLRQPGGGNDSSDPQDLIRIERGIFQGDSLSPSWFCLALNPLSTLLKDSGLGYRLRRGGEVISHLLYMDDLKLFAPKHQDLLELLKTTQVFSSAIRMEFGVDKCAVMRVQRGKVVNSPDLQLSEIMTLRSLSEAETYKYLGMSESLGISVVDIKKSVKERFFCRLTKVLNSLLSGGNKARAFNGWVMPLLIYSFGILRWTQTELDALDRRVRQLLTAHRMLHPRSSVMRLYIPRKWGGRGFLNAKNLHNREVCSLRDYFLNNECGMHRDVVTVDKGLTPLSLANENWRRPSVLSTEDRKDVWKSKELHGRFYRALSGLDVDLLASVNWLRFGDLFGETEGFACAIADEVIKTNNYRKYIMKDGTVDICRACHRPGESLRHIISGCSHLANGEYLHRHNQVARIIHQQLALQYGLVESEVPYYKYAPAPVLENGRALLYWDRSIITDRTIVANKPDIVMVDRSQRRAVLVDVTIPHDENLVKAE

SEQ ID NO: 30143 - protein, 1243 aa, Erannis defoliaria
MITRSKNKAKTSTAETTNARPPPPLPAPSSPSASSGDDVFLTPRESSVSSSDSDVSGPRTPAPPPPARRGRPPLPARLGPAGQPASRPALAAGGVVRRMRWSQTNNENCMRAYYGATEGGTNLTAYRVRMLSLFQALEPTVTVSAQRLSDQVRAIQRLNLLDQSLLDRLHLEAQSARPTPASTRDLDVASSAPTLTSVPTSAATLATSTDPVLDEGDCTGMSVSTQVSEQLRRALEDAIGQYRFTLNSRPRLPRLPTHRRNLALMGALNALLAPYLRASKDLTDTHSILYCGAIAACRVARVRFPDTNRAPQTAGDVPAWQVRIERRISTFRTLIAKLICFSRGNNRPRVMRFVTQAFAETGIRPQQYMASVTERIDYLKQKVYAWASRIRRYRERVDRYRQNRLFQSDQRKVYRNWEGNEQRVSDGHLPDASAMTNFWRSIWSVPVEHTEGDWMRVVERECEFIEPMGSILIDPVDVSCAIRTAQNWKSPGPDGLHNFWIKWFRCSHDRLATQFQEALELGFLPSFMTTGVTFLLHKSGSITEPKNYRPITCLPTIYKLLTSILSTKINTHIVANNVLAPAQNGCRVGSRGTKELLLIDMAISQQVRRNKGALSAAWIDYKKAYDSVPHSWLERILELYKIDTTLKSFLSACMRQWTTVLRQPGGGNDSSDPQDLIRIERGIFQGDSLSPSWFCLALNPLSTLLKDSGLGYRLRRGGEVISHLLYMDDLKLFAPKHQDLLELLKTTQVFSSAISMEFGVDKCAVMRVQRGKVVNSPDLQLSEIMTLRSLSEAETYKYLGMSESLGISVVDIKKSVKERFFCRLTKVLNSLLSGGNKARAFNGWVMPLLIYSFGILRWTQTELDALDRRVRQLLTAHRMLHPRSSVMRLYIPRKWGGRGFLNAKNLHNREVCSLRDYFLNNECGMHRDVVTVDKGLTPLSLANENWRRPSVLSTDDRKDVWKSKELHGRFYRALSGPDVDLLASVNWLRFGDLFGETEGFACAIADEVIKTNNYRKYIMKDGTVDICRACHRPGESLRHIISGCSHLANGEYLHRHNQVARIIHQQLALQYGLVESEVPYYKYAPAPVLENGRALLYWDRSIITDRTIVANKPDIVMVDRSQRRAVLVDVTIPHDENHLKAEKDKLSKYLDLAFEITAMWDVDSTIIVPIVVSANGLIAKSLDQYLKRLSLDGWVKGQIQKAVVLDTARIVRRCSPNHRQLKPCPAAGGNLVFKFFIICILVF

SEQ ID NO: 30144 - protein, 1110 aa, Hecatera dysodea
MRWTQSINENVMRAYYGSTEGGTNLTAYRARMLSLFQDLEPTVDVSAQRLSDQVRVIQRNHRLDDAALDRLRSEVLDNPIISTSTQTVVPVPYSGAITSRTINVCDEVDDRIVTVSSQCNDRLRSALEDALREYRSTPTELRPRLPRLPMHKRNRALVCALDSLLQNIFESSENLIDTHSILYCGAVAACRVANVKFTNSDEATRPKTAAPAWQCRIERRIDEARVLIGKLYCFREGNTRPRVMRFVRRAFSGTEISPQEYMSRVTERIDFLKQKVCAWANRIRRYKRRVDRYSQNRMFQSDERWVYRAWERPEQSVTDVCRPDDIVTSTFWRSIWSVPVRHTEDDWMRGVERVCEAIPQMEKISITPTDVATAVRPLPNWKSPGPDGLHNFWLKWYSSAHAVLASQFQSSLESGSLPQFLTTGVTHLLHKTGSPAEPKNYRPITCLSTVYKLLTSILRVKINEHIETNSIMSSSQNGCRKGSRGTKELLLIDMAISQQVRRTRKDLSTCWIDYKKAYDSVPHTWLMKVLELYKIDATLRTFLESCMRQWKTVLCYPRCRPIQGNEPVWIKRGIFQGDSLSPLWFCLALNPLSTLLEDSGLGYRLRRGGQAISHLLYMDDLKLFAHNKLRLMELLKVTETFSSAIRMEFGVDKCAVMHEKKGEIMESEGVQLSDSIQVRSLSSTETYKYLGMSEALGINVADMKQSLKERFFGRLKKVLNSLLSGGNKVRAFNGWVMPVLMYSFGILKWTQTELDALDRRVRTLLTANRMHHPRSSVMRLYIPRKCGGRGFLNAKTLHNREMCSLREYFFKVDVGMHRDVVAVDKGLTPLSMVNENWRKPVIHTTDDRKEVWKGKELHGRFYRALYGSDVDFSASVAWLRFGDLFGETEAFVCAIMDEVILTNNYRRHIMKDGTVDVCRACHRPGESIRHIISGCSRLANGEYLHRHNQVARIIHQQLALKYKLVDSEVPYYKYVPDPVLENGHVTLYWDRSIITDRTIVANKPDIVVIDRLARRTMIIDVTIPHDENHVKAEKEKQIKYLDLAHEVVDMWNVDSAIIVPIVVTANGLMAKSFDDHLSKLALHGWLKGLIQKAVLLDTARIVRRFLSLEP

SEQ ID NO: 30145 - protein, 1113 aa, Omphaloscelis lunosa
MRWTQSMNENVMRAYYGSTEGGTNLTAYRVRMLSLFQELEPTVNVSAQRLSDQVRVIQRNHRLDDTALDRLCSEVLSNHIVSAREQTAAEASNIDPTPPRFNHGVEEEDDRVATVSSQCNNRLRSALEDAFREYRYTPTELRPRLPRLPMHKKNRALMCALDSQLTNFFESSEDLIDTHSILYCAAVAACRLANVKFPNCDGATRPKPAVPAWQCRIERRIDGARVLIGKLYCFREGNTRPRVMRFVRRAFSGTEISPQDYMSRVTERIDFLKQKVCAWASRIRRYKRRVDRYTQNRMFQSDERWVYRAWERPEQNVTDVCRPDDAATSAFWRSIWSVPVCHTEAGWMQDVERVCETIPEMDAVFITPLDVARAVRPLPNWKSPGPDGLHNFWLKWLSSSHTCLASQFQSSLESGSLPQFLTTGVTHLLHKSGNPAEPKNYRPITCLSTVYKLLTSILRTKINTHIDSNSIMSVSQNGCRNGSRGTKELLLIDMAISQQVRRSRKDLSTCWIDYKKAYDSVPHTWLMRVLELYKVDTTLRTFLMSCMGQWRTVLRYPGCRRTQGNDEPVWIKRGIFQGDSLSPLWFCLALNPLSTLLEDSGLGYRLRRGGQVISHLLYMDDLKLFAPNKLRLMELLKVTETFSGAIRMEFGVDKCAVMHVKRGEIMESEGIQLSDSIHLRPLSSAENYRYLGMSESLGINVADMKQSLKERKELFGRLKKVLISFLSGGNKVRAFNGWVMPVLMYSFGILKWTQTELDALDRRVRTLLTANRMHHPRSSVMRLYIPRKCGGRGFLNAKTLHNREVCSLREYFFKADVGMHRDVDAVDNGLTPLSMAKENWRKPTVLTTDDRKEIWQSKALHGRFYRALHEPSVDFLASVSWLRFGDLFGETEGFICVIMDEVILTNNYRRHIMKDGTVDVCRACHRPGESIRHIISGCSRLANGEYLHRHNQVARIIHQQLALKYKLVDSEVPYYKYVPDPVLENDHATLYWDRSIITDRTIVANKPDIVVIDRLARHAMIVDVTIPHDENLVKAEKEKQIKYLDLAHEVVGMWNVSSAIIVPIVVTANGLMAKSLDHHLSRLSLGGWIKRLIQKAVLLDTARIVRRFLSLQP

SEQ ID NO: 30146 - protein, 973 aa, Mythimna impura
MHSASTDRLRSLLDLVYPGYLCTKKNRALVCALESLLENVFESSVNLADTHSILYCGAIAACRLANVKLPSCDGATRPKPAAPAWQCRIERRIDEARALIGKLYCFREGNTRPRVMRYVRRAFSGTEISPREYLSRVTERIDFLKQKVCAWANRIRRYKRRVDRYSQNRMFQSDERWVYRAWERPEQNVTDVTRPDAVATNTFWRNIWSVPVCHTEDGWMREVERVCEAIPEMEKIVISPIDVARAVRPLPNWKSPGPDGLQNFWLKWYSSSHALLASQFQSSLESGSLPQFLTTGVTHLLHKTGSTAEPKNYRPITCLSTVYKLLTSILRTKINKHIDSNSIMSASQNGCRNGSRGTKELLLIDMAISQQVRRSRKDLSTCWIDYKKAYDSVPHTWLMRVLELYKIDATLRTFLESCMGQWNTVLRYPGCRSIRRDDEPIWIKRGIFQGDSLSPLWFCLALNPLSTLLEESGLGYRLRRGGQVLSHLLYMDDLKLIAPNKLRLMELLKVTETFSSAIRMEFGVDKCAVMHVKRGEIMESEGIQLSDSIHLYLGMSEALGINVADMKQSLKERFFGRLKKVLNSLLSGGNKVRAFNGWVMPVLMYSFGILKWTQTELDAVDRRVRTLLTANRMHHPRSSVMRLYIPRKCGGRGFLNVKTLHNREVCSLREYFHKTDVGMHRDVVAVDKGLTPLSMAKENWRKPVVLTTDDRKEVWKSKELHGRFYRALHESDIDFAASVAWLRFSNLFGETEGFICAIMDEVILTNNYRRYIMKDGTVDVCRACHRPGESIRHIISGCSRLANGEYLHRHNQVARIIHQQLALKYNLVDYEVPYYRYVPDPVLENDHVTLYWDRSIITDRTIVANKPDIVVIDRLARRVMIVDVTIPHDENLVKAEKEKQIKYLDLAHEVVDMWNVDSAVIVPIVVTANGLIAKSFDDHLSKLSLRGWIKSLIQKAVLLDTARIVRRFLSLEP

SEQ ID NO: 30147 - protein, 1191 aa, Mamestra brassicae
MLTRAALQRARPPPPDPSLSSASPPPDIGSPLSPAVAVASSSSDEYFSPPTSPTPVRRQGRGRPPRGLGPRGQPAPSRVPATGGCVQRMRWTQSMNENVMRAYYGSTEGGTNLTAYRVRMLSLFQDLEPTVNVSAQRLSDQVRVIQRNHRLDDAALDRLCSEILNNLIISTPTQTAVQAPVNGRITPRPNNVSDEVDDRVVTVSSQCNDRLRSALEDALREYRSTPTELRPRLPRLPMHKKNRALVCALDSLLQNIFESSESLVDTHSILYCGAVAACRIANVKFPGCDEAIRPKPAAPAWQRRIERRIDETRALIGKLYCFREGNTRPRVMRFVRRAFSGTEISPRDFTSRVTERIDFLKQKVCAWASRIRRYKRRVDRYSQNRMFQSDERWVYRAWERPEQSVTDVCRPDDVATSIFWRSIWSVPICHAEGGWMRDVERVCEAIPQMEKITITTLDVAKAVRPLPNWKSPGPDGLHNFWLKWYSSSHALLASQFQSSLDSGSLPQFLTTGVTHLLHKTGSPTEPKNHRPITCLSTVYKLLTSILRAKINEHIESNSIMSASQNGCRKGSRGTKELLLIDMAISQQVRRSRKDLSTCWIDYKKAYDSVPHTWLMKVLELYKIDATLRTFLESCMRQWKTVLRYPGCRPIQGSDEPVWIKRGIFQGDSLSPLWFCLALNPLSTLLEDSGLGYRLRRGGQAISHLLYMDDLKLFAPNNLRLMELLKVTETFSSAIGMEFGVDKCAVMHVKKGEIMESEGIHLSDSIQVRSLSSTETYKYLGMLEALGINGTDMKQSLKERFFGRLKKVLNSLLSGGNKVRAFNGWVMPVLMYTFGILKWTQTELDALDRRVRTLLTANRMHHPRSSVMRLYIPRKCGGRGFLNAKTLHNREMCSLREYFLKADVGMHRDVVAVDKGLTPLSVAKENWRTPVILTTDDRKEVWKGKELHGRFYRALHGSDVVRFGDLFGETEGFVCAIMDEVILTNNYRRHIMKDGTVDMCRACHRPGESIRHIISGCSRLANGEYLHRHNQVARIIHQQLALKYNLVDSEVPYYKYVPDPVLENDHVTLYWDRSIITDRTIVANKPDIVVIDRLARRTMIIDVTIPHDENLVKAEKEKQIKYLDLAHEVVDMWNVESAVIVPIVVTANGLMAKSFDDHLSKLALRSWVKGLIQKAVLLDTARIVRRFLSLEP

SEQ ID NO: 30148 - protein, 1174 aa, Mamestra brassicae
MLTRSRARHLATHPSPSASSLSSASPPPEPSPTVSAVTPAVAVASSSSDEYFSPPTTPPPARRRRGRRPPDGLGPRGPPASDRVPAPGGSVQRMRWTQSINENVMRSYFGATEGGTNLTAYRGRMLSLFQVLEPAVNVSAQRLSDQVRVIQRNRMLDDSVLDRLRMEMCGHVITPPSQTVAPPQSQISSHADEESNDRVTNVSTQCNEELRSALECAIREYRYVPPELRPRLPRLPMHNKNRALVAALDSQLSNYFDDCEDLTDTHSIMYCAAVAACRVAHVKMTNDRVTRPKPAVPAWQCRIERRIGGARALIGKLICFREGNTRPRVMRFVRRAFSGTDISPRDYMSRVTERIDFLKQKVYAWANRIRRYRRRVERYTQNRTFRSNERWVYRVWEQPDQGVTDTRLPDDDAMCSFWRNIWSVPVSHTEGGWIREVERACDPLPEMGAITISPQDVARAVRPLPNWKSPGPDGLHNFWIKWLQRSHARLASQYQTALESGSLPEFLTTGVTHLLHKSGSTAEPKNYRPCLPTVYKVLTSILRAKINNHINSNNIMSVSQNGCRNGSRGTKELLLIDMAISQQVRRSRKDLSTCWIDYKKAYDSVPHTWLLMSCMGQWRTVLRYPGCRNIQRNSEPVRIERGIFQGDSLSPLWFCLALNPLSTLLENSGLGYRLKRGGQVISHLLYMDDLKLFAPSNLQLMELLKVTETFSSAIRMEFGVDKCAVMHVKRGEIMESVGTQLSDSINLRSLSLTETYKYLGMSEALGINVTDMKQSLKERFFGRLKKVFNSLLSGGNKVRAFNGWVMPVLMHSFGVLKWTQTELDALDRRVRTLLTAYRMHHPRSSVMRLYIPRKCGGRGFLNAKTLHNREICSLREYFLAVDVGMHRDVVAVDKGLTPLSLANENWRKPAVLDTNDRRAVWQSKELHGRYFRAVDQLASVAWLRFGDLFGETEGFVCAIMDEVIMTNNYRRFIVKDGTVDICRACHRPGESIRHIVSGCSRLANGEYLHRHNLVARIIHQQLALKYSLVESEVPYYRYAPDPVLDNGNIKLYWDRSIITDRTIVANKPDIVVVDRIERRAMIVDITVPHDENLVKAEKDKQIKYIDLAREVVDMWDVDSAIIVPIVVSANGLIATSLDQHLRRLSLGSWIKGLIQKAVLLDTARIVRRFLSLEP

SEQ ID NO: 30149 - protein, 1195 aa, Lymantria monacha
MLTRSQTKAARPPPPGSSQSSASQPTASVPAASVTTEASSSSSSDEYFSPPTTPTPAPRRGRGRPPICLGPRGPPTSHRAPAAGGNVQRMKWTHSINENVMRAYFEATEGGIKLTAYRDRMLLLFQNLEPTINVTAQRLSDQVRAIQRCHLLDVATLDRLRLVSIQICRVTPISTEISTIDTTQSVPPPYAEGEDATVSMDTQYNEEVRNALECAIREYRFIPHNIRPRLPRLPMHRKNRRLVGTLDSLLTSYLHTSDSISDTHSILYCVAVAACRIAGLKFLENESTIQQKKAKPAWQCRIECRICEARVLIGKLICFRAGNTRPKVMRYVRRAFLGTDIKPDEYNARVTERIDFLKQKVYAWASRIRRYKKRMNRYSVNRMFESDQKSVYRNWERPCLIVDNERLPDAEVTNTFWRSIWSVPVVHSEGDWMGDVKRACENIPQMENVLIDKDDVTCAVRSLSNWKSPGPDGLHNFWLKWLHSAHARLASHFQSALVSGTLPEFMTTGITHLLHKTGSTTEPCNYRPITCLPSVYKLLTSILSNKIAKHVQLNSVMSISQNGCRNGRGTKELLLIDTAISQQVRRNRKDLSVCWIDYRKAFDSVPHTWLLRVLELYKINSLLCTFLKSCMGQWKTFLKYPMHRLNLGSSEPIYIRRGIFQGDSLSPLWFCLALNPLSILLEHSGLGCRLRRGGQIISHLLYMDDLKLFAPNNPQLVKLLKVTETFSSSIKMEYGVDKCAVMHVKHGGIVEVDRGQLFNTLQFRPLQVTDTYKYLGMSQALNINESDMKQALRERFFGRLKKVLNSLLSGGNKVRAYNAWVMPILMYSFGILKWTQTELDALDRKVRTLLTSHRMHHPRSSVMRLYIPRKCGGRGFLNAKTLHNREIYNLRDYFLKMTSGMHLDVVAVDNGLTPLGLAKENWHKPAVLSTKDRESIWQSKELHGRFYGALNASEVDFSASVTWLQFGNLFGETEGFVCAIADEVIKTNNYRKYILRDGTADICRACHLPGESLRHIVSGCSRLANGEYLHRHNQVARIIHQQLALLYRLVSTEVPYYRYIPQPVLENGRATLYWDRSIITDRTIVANKPDIVVIDRLQRRAMIVDVTVPHDGNLVKAEKDKQIKYQDLAHEIVDMWDVDTAIVVPIVISTNGLIAKSLAQHLKRLALGSWIGGLMQKAVLLDTARIVRKFLSLEP

SEQ ID NO: 30150 - protein, 1197 aa, Lymantria monacha
MLTRSQTKAARPPPPGSSQSSASQPTASVPAASVTTEASSSSSSDEYFSPPTTPTPAPRRGRGRPPICLGPRGPPTSHRAPAAGGNVQRMKWTHSINENVMRAYFEATEGGIKLTAYRDRMLLLFQNLEPTINVTAQRLSDQVRTIQRCHLLDVATLDRLRLVSIQTCRVTPISTEISTIDTTQSVPPPYAEGEDATVSMDTQYNEEVRNALECAIREYRFIPHNIRPRLPRLPMHGKNRRLVGTLDSLLTSYLHTSDSISDTHSILYCVAVAACRIAGLKFLENESTIQQKKKAKPAWQCRIECRICEARVLIGKLICFRAGNTRPKVMRYVRRAFLGTDIKPDEYNARVTERIDFLKQKVYAWASQIRRYKKRMNRYSVNRMFESDQKSVYRNWERPCLIVDNERLPDAEVTNTFWRSIWSVPVVHSEGDWMGDVKRACENIPQMENVLIDKDDVTCAVRSLSNWKSPGPDGLHNFWLKWLHSAHARLASHFQSALVSGTLPEFMTTGITHLLHKTGSTTEPCNYRPITCLPSVYKLLTSILSNKIAKHVQLNSVMSISQNGCRNGGRGTKELLLIDTAISQQVRRNRKDLSVCWIDYRKAFDSVPHTWLLRVLELYKINSLLCTFLKSCMGQWKTFLKYPMHRLNLGSSEPIYIRRGIFQGDSLSPLWFCLALNPLSILLEHSGLGCRLRRGGQIISHLLYMDDLKLFAPNNPQLVKLLKVTETFSSSIKMEFGEDKCAVMHVKHGGIVEVDRGQLFNTLQFRPLQVTDTYKYLGMSQALNINESDKKQTLRERFFGRLKKVLNSLLSGGNKVRAYNAWVMPILMYSFGILKWTQTELDALDRKVRTLLTSHRMHHPRSSVMRLYIPRKCGGRGFLNAKTLHNREIYNLRDYFLKMTNGMHLDVVAVDNGLTPLGLAKENWHKPAVLSTKDRESIWQSKELHGRFYGALNASEVDFSASVTWLQFGNLFGETEGFVCAIADEVIKTNNYRKYILRDGTADICRACHLPGESLRHIVSGCSRLANGEYLHRHNQVARIIHQQLALLYRLVSTEVPYYRYIPQPVLENGRATLYWDRSIITDRTIVANKPDIVVIDRLQRRAMIVDVTVPHDGNLVKAEKDKQMKYQDLAHEIVDMWDVDTAIVVPIVISTNGLIAKSLAQHLKRLALGSWIGGLMQKAVLLDTARIVRKFLSLEP

SEQ ID NO: 30151 - protein, 1197 aa, Phlogophora meticulosa
MLTRSAARRARPPPLASSLSSASPPPESSPIVSTVTPAVAIASSSSDEYFSPPTSPPPARRRRGRRPPDSIGPRGPPASDRVPASGGSVQRMRWTQSINENVMRSYYGATEGGTNLTAYRGRMLSLFQMLEPAVNVSAQRLSDQVRVIQRNHMLDDVVLDRLRLNSRIYHVTPALPPVAVQLQSLPSVSPRPDYVGEEDDDAAISVSSQCNVRLRSALEDAFREYRSTPPELRSRLPRLPMHKKNKALMTALDSLLTKSFDNSKDLTDTHSILYCAAAAACRVANVKFPNTERATRPTVPAWQCRIQRRIDEARALIGKLICFREGNTRPRVMRFVRRAFSGTDISSRDYLTRVTERIDFLKQKICAWANRIRRYKRRVERYTQNRTFRSDERWVYRAWERSDQGVTDTCLPDDEAMCSFWRSIWSVPVSHTEGNWTREIERACEPLPEMGAINISPQDVASAVRPLPNWKSPGPDGLHNFWIKWLQSSHARLACQFQSALESGSLPKFLTTGITHLLHKSGSTAEPRNYRPITCLPTVYKVLTSILRSKINNHIDSNLIMSFSQNGCRNGSRGTKELLLIDTAISQQVRRSRKDLSTCWVDYKKAYDSVPHTWLMRVLELYKVDATLRTFLMSCMGQWRTVLRYPGCQQTRENSEPIRIERGIFQGDSLSPLWFCLALNPLSTLLEGSGLGYRLRTGGQVISHLLYMDDLKLFAPNNLQLMELLKVTETFSSAIRMDDKCAVMHVKRGEIVESVGTQLSDSIYLRSLSSTETYKYLGMSEALGINATDMKQSLKERFFGRLNKVLNSLLSGGNKVRAFNGWVMPVLMYSFGILKWTQTELDALDRRVRTLLTANRMHHPRSSVMRLYIPRKCGGRGFLNAKTLHNREICSLREYFLKADVGMHRDVLAVDKTFTPLSLANKNWRKPIVLDTADRMEIWKSKELHGRFYRVLHGPDVDLVASISWLRFGDLFGETEGFVCAIMDEVIMTNNYRKYIVKDGTVDICRACHRPGESIRHIISGCSRLANGDYLHRHNLVARIIHQQLALKYNLVDLEVPYYKYVPDPVLENGSITLYWDRSIITDRTIVANKPDIVVIDRSERRIMIIDITVPHDENLVKAEKEKQMKYLDLAREVVDMWDVNTAVIVPIVVTANGIIAKSLDQHLKRLSLGSWIKGLIQKAVLLDTARIVRRFLSQEP

SEQ ID NO: 30152 - protein, 1190 aa, Mamestra brassicae
MLTRAASRRARPPSPDPSLSSASPPPDSGSPMSPAVAVASSSSDEYFSPPTSPTPVRRQGRGRPPRGLGPRGQPAPSRVPATGGCVQRMRWTQSMNENVMRAYYGSTEGGTNLTAYRVRMLSLFQDLEPTVNVSAQRLSDQVRVIQRNHRLDDAALDRLRSEVLNNLIISTPTQTAVQAPVNDAITPRPNNVSHEVDDRVVTVSSQCNDRLRSALEDALREYRSTPTELRPRLPRLPMHKKNRALVCALDSLLQNTFESSESLVDTHSILFCGAVAACRIANVKFPSYDEAIRPKPAAPAWQCRIERRIDEARALIGKLYCFREGNTRPRVMRFVRRAFLGTGISPRDFTSRVTERIDFLKQKVCAWANRIRRYKRRVDRYSQNRMFQSDERWVYRAWERPEQSVMDVCRPDDNTTSTFWRGILSVPVCHTEGGWLRDVEHVCEAIPEMDTITITPLDVAKAVRPLPNWKSPGPDGLHNFWLKWYSSSHVLLASQFQSSLESGSLPQFLTTGVTHLLHKTGSPAEPKNYRPITCLSTVYKLLTSILRAKINQHIERNSIMSASQNGCRKGSRGTKELLLIDMAISQQVRRSRKDLSTCWIDYKKAYDSVPHTWLMKVLELYKIDATLRTFLESCMRQWKTVLRYPGCRPIQGSDEPVWIKRGIFQGDSLSPLWFCLALNPLSTLLEDSGLGYRLRRGGQAISHLLYMDDLKLFAPNNLRLMELLKVTETFSSSIRMEFGVEKCAVMHVKKGEIMESEGIQLSDSIQVRSLSSTETYKYLGVSEALGINGADMKQSLRERFFGRLKKVLNSLLSGGNKVRAFNGWVMDKWTQTELDALDRRVRTLLTANRMHHPRSSVMRLYIPRKCGGRGFLNAKTLHNREVCNLRDFFLKTDVGMHRDVVAVDKGLTPLSMAKENWRKPVILTTDDRKEVWKGKELHGRFYRALHEPDVDFPASVSWLRFGDLFGETEGFVCAIMDEVILTNNYRRYIMKDGTVDVCRACHRPGESIRHIISGCSRLANGEYLHRHNQVARIIHQQLALKYQLVDSEVPYYKYVPDPVLENDHVTLYWDRSIITDRTIVANKPDIVVIDRLARRTMIIDVTIPHDVNLVKAEKEKQIKYLDLAHEVVDMWNVDSAVIVPIVVTANGLLSKSFDDHLSKLSLRGWVKGLIQKAVLLDTARIVRRFLSLEP

SEQ ID NO: 30153 - protein, 1135 aa, Ennomos quercinarius
MITRSRKKQAETICAHLPPPPTPSSPSSSSGDEYATPPDTTASSDEDGPPSPPPPPPPARRGRPPLPARLGPAGQPAPRPAPATGGIVRRMRWTPTMNENCMRAYYGATEGGSNLTAYRDRMLSLFQNLEPAVAVSAQRLSDQVRAIHRYKLMDQSTLDRLHLEALPIRATSSSPRVLPAALPDSGPIMGPPPVTPRGDPAIEGEESVNDSVSTQANEQLRSALEDAILRYRATPTSRPRLPRLPTNRRNLVLMGALNTLLAPYLRTSEDLVDTHSILYCGAIAACRVARVKFPDTDRAPRPADGAPAWQVRIERRITTFRTLIAKLVCFSRGNHRPRVMRFVTQAFAGTSIRPQDYMACVKERIDFLKQKVYAWASRIRRYRERVDRYQQNRLFQSDQRKVYRNWEGTGQRVVDGQLPDANAMSEFWRSIWSVPVEHTEGDWMRVVERVCEPIESMGSITIDPEDISCAIRTAQNWKSPGPDGLHNFWIKWIRCSYPCLAIQFQEALEAGSLPRFMTTGVTFLLHKSGSTTEAKNYRPITCLPTLYKLLTSILRTKINSHIVANNILAPAQNGCRVGSRGTKELLLIDTAICQQVRRNRGALSTAWIDYKKAYDSVPHSWLERVLELYKIDATLRSFLSTCMRQWITVLRQPGGGESVSDPQDFIRIERGIFQGDSLSPLWFCLALNPLSTLLGDSGLGYQLRRGGEIISHLLYMDDLKLFAPQRPQLIELLKITENFSNSIKMEFGVDKCAVMHVHRGKVVNSTNLQLSETMTLRSLSESETYRYLGMSESLGISVGDVKQSVKERFFCRLTKVLNSLLSGGNKTRAFNGWVMPLLMYSFGILRWTQTELDALDRKVRQLLTSHRMLHPRSSVMRLYIPRKWGGRGFLNAKTLHNREVCSLRDYFLNNEYEMHRDVVAVDKGLTPLSLANENWRKPVVLSTEDRRDVWKGKELHGRFYRALTGPDVDLHASVNWLRFGDLFGETEGFVCAIADEVIKTNNYRKYVMKDGTVDICRTCRRPGESLRHIISGCSHLANGEYLHRHNLVARIIHQQLALQYGLVESEVPYYKYTPGPVLENGRALLYWDRSIITDRTIVANKPDIVLVDRSQRRAVLVDITIPHDENLVKASRGSR

SEQ ID NO: 30154 - protein, 1207 aa, Ennomos quercinarius
MITRSRTKQAEQSARLPPPPAPSSSSSSSGDEYGTPPDTTASSDEDGPSSPPPPPPPARRGRPPLPARLGPAEQPAPRPAPATGGIVRRMRWTQTMNENCMRVYYGATEGGSSLTAYRDRMLSLFQDLEPAVAVSAQRLSDQVRAIQRCKMLDEPALDRLRLEALPIRATSPSPRVLPAALPDPGPIMDPLPVTPRGDPAIDGEESVSDSVSTQANEQLRSALEDAILRYRSTPTSRPRLPRLPTNRRNLVLMGALNTLLAPYLRTSEDLVDTHSILYCGAIAACRVARVKFPDTDRAPQPADGAPAWQVRIEKRITTFRTLIAKLVCFSRGNHRPRVMRFVTQAFPLTGIRPQDYMACVTERIDFLKQKVYAWASRIRRYRERVDRYQQNRLFQSDQRKVYRNWEGTGQRVVDGQLPDANAMNEFWRSIWSVPVDHTEGDWMRVVERVCEPIESMGSITIDPEDISCAIRTAQNWKSPGPDGLHNFWIKWIRCSYPCLAIQFQEALEAGSLPSFMTTGVTFLLHKSGSTTEAKNYRPITCLPTLYKLLTSILRTKINSHIVANNILAPAQNGCRVGSRGTKELLLIDTAICQQVRRNRGALSTAWIDYKKAYDSVPHSWLERILELYKIDATLRSFLSACMRQWTTVLRQPGGGESVSDPQDFIRIERGIFQGDSLSPLWFCLALNPLSTLLGDSGLGYRLRRGGKIISHLLYMDDLKLFAPQRPQLIELLKITENFSNSINMEFGVDKCAVMHVHRGKVVNSTNLQLSETMTLRSLSESETYRYLGMSESLGISVGDVKRTVKERFFCRLTKVLNSLLSGGNKTRAFNGWVMPLLMYSFGILRWTQTKLDALDRKVRQLLTSHRMLHPRSSVMRLYIPRKWGGRGFLNAKTLHNREVCSLRDYFLNNECGMHRDVVAVDKGLTPLSLANENWRKPVVLSTEDRRDVWKGKELHGRFYRALTGPDVDLHASVNWLRFGDLFGETESFVCAIADEVIKTNNYRKYIMKDGTVDICRACRRPGKSLRHIISGCSHLANGEYLHRHNLVARIIHQQLALQYGLVESEVPYYKYTPGPVLENGRALLYWDRSIITDRTIVANKPDIVLVDRSQRRAVLVDITIPHDENLVKAEKDKLSKYLDLAHEVTAMWNVDSTSIVPIVVSANGLIAKSLDQHLERLSLDGWIKGQIQKAVLLDTARIVRRFLTLQP

SEQ ID NO: 30155 - protein, 1210 aa, Ennomos quercinarius
MITRSKTRKTADIHQSARLPPPPAPSSPSSSSGDEYGTPPDTTASSDEGGPPSPPPPPPPARRGRPPLPARLGPAGQPAPRPAPATGGIVRRMRWTPTMNENCMRAYYGATEGGSNLTAYRDRMLSLFQDLEPAVAVSAQRLSDQVRAIHRCKLMDQSTPDRLRLEALPIRATSSSPRVLPAALPDSGPIMGPPPVTPRGDPAIEGEESVNDNVSTQANEQLRSALEDAILRYRATPTSRPRLPRLPTNRRNLVLMEALNTLLAPYLRTSEDLVDTHSILYCGAIAACRVARVKFPDTDRAPRPADGAPAWQVRIERRITTFRTLIAKLVCFSRGNHRPRVMRFVTQAFAGTGIRPQDYMACVTERIDFLKQKVYAWASRIRRYRERVDRYQQNRLFQSDQRKVYRNWEGTGQRVVDGQLPDANAMSEFCRSIWSVPVEHTEGDWMRVVERVCEPIESMGSITIDPEDISCAIRTAQNWKSPGPDGLHNFWIKWIRCSYPCLAIQFQEALEAGSLPRFMTTGVTFLLHKSGSTTEAKNYRPITCLPTLYKLLTSILRTKINSHIVTNNILAPAQNGCRVGSRGTKELLLIDTAICQQVRRNRGALSTAWIDYKKAYDSVPHSWLERVLELYKIDATLRSFLSTCMRQWITVLRQPGGGESVSDPQDFIRIERGIFQGDSLSPLWFCLALNPLSTLLGDSGLGYRLRRGGEIISHLLYMDDLKLFAPQRPQLIELLKITENFSNSIKMEFGVDKCAVMHVHRGKVVNSTNLQLSETMTLRSLSESETYRYLGMSESLGISVGDVKQSVKERFFCRLTKVLNSLLSGGNKTRAFNGWVMPLLMYSFGILRWTQTELDALDRKVRQLLTSHRMLHPRSSVMRLYIPRKWGGRGFLNAKTLHNREVCSLREYFLNNEYGMHRDVVAVDKGLTPLSLANENWRKPVVLSTEDRRDVWKGKELHGRFYRALTGPDVDLHASVNWLRFGDLFGETEGFVCAIADEVIKTNNYRKYIMKDGTVDICRACRRPGESLRHIISGCSHLANGEYLHRHNLVARIIHQQLALQYGLVESEVPYYKYTPGPVLENGRALLYWDRSIITDRTIVANKPDIVLVDRSQRRAVLVDITIPHDENLVKAEKDKLSKYLDLAHEVTAMWNVDSTSIVPIVVSANGLIAKSLDQHLERLSLDGWIKGQIQKAVLLDTARIVRRFLTLQP

SEQ ID NO: 30156 - protein, 1202 aa, Griposia aprilina
MLTRSARTRARPPPPDSSLSSASPPPVSSPIVSAVTTPVAVVASSSSDEYFSPPTSPTPVRRQGRGRPPRSLGLRGHPAPSRVPAAGGCVQRMKWTQSMNENVMRAYYRSTEGGTNLTAYRDRMLSLFQELEPTINVSAQRLSDQVRVIQRSHRLDDAALDRLRSELNNHIISTPAQTAVQASTIDEIQPRSNHGVEVEDDRVASVSSQCNARLRSALEDAFREYRSTPTELRPRLPRLPMHKKNRALVCALDSQLKNVFESSENLIDTHSILYCAAVAACRLANVRFPNCDGATRPKPAVPAWQCRIERRIDGARVLIGKLHCFREGNNRPRVMRFVRRTFSGTGISPREYMSHATERIDFLKQKVCAWASRIRRYKRRVDRYTQNRMFQSDERWVYRAWERPEQNVTDECRPDDATTSTFWRSIWSVPVCHVEADWMRDVGRACETVPEMDAVLITPLDVARAVRPLPNWKSPGPDGLHNFWLKWLISSHACLASQYQSSLESGSLPQFLTTGVTHLLHKSGCPTDPKNYRPITCLSTVYKLLTSILRAKINTHIESNSIMSASQNGCRNGSRGTKELLLIDMAISQQVRRSRRDLSTCWIDYKKAYDSVPHTWLMRVLELYKIDTTLRTFLRSCMGQWRTVLRYPGCRQIQANDEPVWIKRGIFQGDSLSPLWFCLALNPLSTLLEDSGLGYRLRKDGQVISHLLYMDDLKLFAPNKLQLMELLKVTETFSSTIRMEFGVDKCAVMHVKRGEIMEPEGIQLSDSIHLRSLSSSESYKYLGMSEALGINVADMKQSLRERFFGRLKKVLISLLSGGNKVRAFNGWVMPVLMYSFGILKWTQTELDALDRRVRTLLTANRMHHPRSSVMRLYIPRKCGGRGFLNAKTLHNREVCSLREYFLKAEVGMHRDVVAVDKGLTPLSMAKENWRKPVVLTTDDRKEVWQSKELHGRFYRALHEPGVDFLASVSWLRFGDLFGETEGFVCAIMDEVILTNNYRRHIMKDGTVDMCRACHRPGESIRHIVSGCSRLANGEYLHRHNQVARIIHQQLALKYKLVDSEVPYYKYVPDPVLENDHITLYWDRSIITDRTIVANKPDIVVIDRLARRTMIIDITIPHDENLVKAEKEKQIKYLDLAHEVVEIWNVSSAVIVPIVVSANGLMAKSLDQHLSRLSLDGWVKGLIQKAVLLDTARIVRRFLSLEP

SEQ ID NO: 30157 - protein, 1111 aa, Xestia c-nigrum
MRWTQSMNENAMRAYYGSTEGGTNLTAYRVRMLSLFQDLEPAVNVSAQRLSDQVRVIQRNHMLDDAALDRLRSEVLSNRIILTPAQTAVQASAIDATPPRSNPAVVEEDGRVATVSSQCNDRLRSALEDALREYRSTPTELRPRLPRLPMHKKNRALVCALDSQLKNVFESSEDLVDTHSILFCGAVAACRLANVKFPNCDLATRPKPAVPVWQRRIERRIDGARVLIGKLYCFREGNTRPRVMRFVRRAFSGTEISPQEYMSRVTERIDFLKQKVYAWASRIRRYKRRVDRYSQNRMFQCDERWVYRAWERPDQNVTDVCHPGDAATSSFWRSIWSVPVCHSEADWMRDVERVCEPIPEMAPVVITSLDIARAVRPLPNWKSPGPDGLHNFWLKWLGSSHTCLASQFQSSLESGSLPQFLTTGVTHLLHKSGSPTEPQNYRPITCLSTVYKLITSILRTKINTHIDNNSIMSASQNGCRNGSRGTKELLLIDMAISQQVRRSRKDLSTCWIDYKKAYDSVPHSWLMRVLELYKIDATLCTFLKSCMGQWRTVLRYPGCRQIQGNDESVWIKRGIFQGDSLSPLWFCLALNPLSTLLENSGLGYQLRKDGQVISHLLYMDDLKLFAPNKLRLMELLKVTETFSNAIRMEFGMDKCAVMYVKRGEIMESEGLQLSDSIHLRSLSSSESYKYLGMSEALGINVTDMKQLLRERFFGRLKKVLNSLLSGGNKVRAFNGWVMPVLMYSFGILKWTQTELDALDRRVRTLLTENRMHHPRSSVMRLYIPRKCGGRGFLNAKTLHNREVCSLREYFLKAEVGMHRDVVAVDKGLTPLSMAKENWRKPVILTTDDRKKEWQGKVLHGRFYRALHGPDVDFLASVSWLRFGDLFGETEGFVCAIMDEVMLTNNYRKYIMKDGTVDVCRACHCPGESIRHIISGCSRLANGEYLHRHNQVARIIHQQLALKFKLVESEVPYYKYVPDPVLVKDHITLYWDQSIITDRTIVANKPDIVVIDRSARRVMIIDVTIPHDENLVKAEKEKQIKYLDLAHEVRDMWNMNSVIIVPIVVTANGLIAKSLDEHLSRLSLGGWIKGLIQKAVLLDTARIVRRFLSLQP

SEQ ID NO: 30158 - protein, 1202 aa, Griposia aprilina
MLTRSARTRARPPPPDSSLSSASPPPVSSPIVSAVTTPVAVVASSSSDEYFSPPTSPTPVRRQGRGRPPRSLGLRGHPAPIRVPAAGGCVQRMKWTQSMNENVMRAYYRSTEGGTNLTAYRDRMLSLFQELEPTINVSAQRLSDQVRVIQRSHRLDDAALDRLRSELNNHIISTPAQTAVQASTIDEIQPRSNHGVEVEDDRVASVSSQCNARLRSALEDAFREYRSTPTELRPRLPRLPMHKKNRALVCALDSQLKNVFESSENLIDTHSILYCAAVAACRLANVRFPNCDGATRPKPAVPAWQCRIERRIDGARVLIGKLHCFREGNNRPRVMRFVRRAFSGTGISPREYMSHATERIDFLKQKVCAWASRIRRYKRRVDRYTQNRMFQSDERWVYRAWERPEQNVTDECRPDDATTSTFWRSIWSVPVCHVEADWMRDVGRACETVPEMDAVLITPLDVARAVRPLPNWKSPGPDGLHNFWLKWLISSHACLASQYQSSLESGSLPQFLTTGVTHLLHKSGCPTDPKNYRPITCLSTVYKLLTSILRAKINTHIESNSIMSASQNGCRNGSRSTKELLLIDMAISQQVRRSRRDLSTCWIDYKKAYDSVPHTWLMRVLELYKIDTTLRTFLRSCMGQWRTVLRYPGCRQIQANDEPVWIKRGIFQGDSLSPLWFCLALNPLSTLLEDSGLGYRLRKDGQVISHLLYMDDLKLFAPNKLQLMELLKVTETFSSTIRMEFGVDKCAVMHVKRGEIMEPEGIQLSDSIHLRSLSSSESYKYLGMSEALGINVADMKQSLRERFFGRLKKVLISLLSGGNKVRAFNGWVMPVLMYSFGILKWTQTELDALDRRVRTLLTANRMHHPRSSVMRLYIPRKCGGRGFLNAKTLHNREVCSLREYFLKAEVGMHRDVVAVDKGLTPLSMAKENWRKPVVLTTDDRKEVWQSKELHGRFYRALHEPGVDFLASVSWLRFGDLFGETEGFVCAIMDEVILTNNYRRHIMKDGTVDMCRACHRPGESIRHIVSGCSRLANGEYLHRHNQVARIIHQQLALKYKLVDSEVPYYKYVPDPVLENDHITLYWDRSIITDRTIVANKPDIVVIDRLARRTMIIDITIPHDENLVKAEKEKQIKYLDLAHEVVEMWNVSSAVIVPIVVSANGLMAKSLDQHLSRLSLDDWVKGLIQKAVLLDTARIVRRFLSLEP

SEQ ID NO: 30159 - protein, 1111 aa, Xestia c-nigrum
MRWTQSMNENAMRAYYGSTEGGTNLTAYRVRMLSLFQDLEPAVNVSAQRLSDQVRVIQRNHMLDDAALDRLRSEVLSNLIILTPAQTAVQASAIDATPPRSNPAVVEEDGRVATVSSQCNDRLRSALEDALREYRSTPTELRPRLPRLPMHKKNRALVCALDSQLKNVFESSEDLVDTHSILFCGAVAACRLANVKFPNCDLATRPKPAVPVWQRRIERRIDGARVLIGKLYCFREGNTRPRVMRFVRRAFSGTEISPQEYMSRVTERIDFLKQKVYAWASRIRRYKRRVDRYSQNRMFQCDERWVYRAWERPDQNVTDVCHPGDAATSSFWRSIWSVPVCHSEADWMRDVERVCEPIPEMAPVVITSLDIARAVRPLPNWKSPGPDGLHSFWLKWLSSSHTCLASQFQSSLESGSLPQFLTTGVTHLLHKSGSPTEPQNYRPITCLSTVYKLLTSILRTKINTHIDNNSIMSASQNGCRNGSRGTKELLLIDMAISQQVRRSRKDLSTCWIDYKKAYDSVPHSWLMRVLELYKIDATLCTFLKSCMGQWRTVLRYPGCRQIQGNDESVWIKRGIFQGDSLSPLWFCLALNPLSTLLENSGLGYQLRKDGQVISHLLYMDDLKLFAPNKLRLMELLKVTETFSNAIRMEFGVDKCAVMYVKRGEIMESEGLQLSDSIHLRSLSSSESYKYLGMSEALGINVTDMKQSLRERFFGRLKKVLNSLLSGGNKVRAFNGWVMPVLMYSFGILKWTQTELDALDRRVRTLLTENRMHHPRSSVMRLYIPRKCGGRGFLNVKTLHNREVCSLREYFLKAEVGMQRDVVAVDKGLTPLSMAKENWRKPVILTTDDRKKEWQGKVLHGRFYRALHGPDVDFLASVSWLRFGDLFGETEGFVCAIMDEVMLTNNYRKYIMKDGTVDVCRACHCPGESIRHIISGCSRLANGEYLHRHNQVARIIHQQLALKFKLVESEVPYYKYVPDPVLVKDHITLYWDQSIITDRTIVANKPDIVVIDRSARRVMIIDVTIPHDENLVKAEKEKQIKYLDLAHEVRDMWNMNSVIIVPIVVTANGLIAKSLDEHLSKLSLGGWIKGLIQKAVLLDTARIVRRFLSLQP

SEQ ID NO: 30160 - protein, 940 aa, Sesamia nonagrioides
MLSLFQALEPTVNVSAQRLSDQVRVIQRNHRLDDTALDRLRSEVLSNQIAPTLTQTAALASIIDAVPPRSNRVEEEDDRVETVSSQYNDRLRSTLEDAFREYRSTPTDLRPRLPRLPMHKKNRALVSALDSQLKNVFESSEDLIDTHSILFCAAVAACRLANIKFPNCDEANRPKPAVPAWQHRIERRIDGARVLIGKLYCFREGNTRPRVMRFVRQAFSGTGISPREYLTHVTERIDFLKQKVCAWANRIRRYKRRVDRYTQNRMFQSDERWVYRAWERSELNEADVCRPDVAATSAFWRSIWSVPVCHAEGDWIQNVEQVCEMIPEMDTILITPIDVATAVRSLPNWKSPGPDGLHNFWLKWLSSSHTCLASQFQSSLESGSLPQFLTTGITHLLHKSGSTAEPNNYRPITCLPTVYKVLTSILKAKINKHLDSNSIMSVSQNGCKSGSRGTKELLLIDMAISQQVRRSRKDLSTCWIDYKKAYDSVPHTWLMRVLELYKINATLRTFLRSCMGQWKTVLRYPGSRRIQGNDEPVWIKRGIFQGDSLGPLWFCLALNPLSTLLEDSGLGYRLKRGGQVISHLLYMDDLKLFAPNKLHLMKLLNVTETFSSGIKMEFGVDKCAVMHVERGQIMESEGITLPDSIHLRSLSSFESYKYLGMSEALGINDADMKQSLKERFFGRLKKVLKSLLSGGNKVRAFNGWVMPVLMYSFGILKWTQTELDALDRRVRTLLTANRMHHPRSSVMRLYIPRKCGGRGFLNAKTLHNREVCSLREHFLKTVVGMHHDVVTVDKGLTPLSMAKENWHKPIILTTDDRKMIWQSKELHGRFYRALHGPDVDFLASVSWLRFGDLFGETEGFVCAIMDEVILTNNYRRYIMKDGTIDVCRACHHPGESIRHIISGCSRLANSEYLHRHNQVARIIHQQLALKYKLVDSEVPY

SEQ ID NO: 30161 - protein, 1200 aa, Xestia c-nigrum
MITRAASRRRARLPSPDSSLSSASPPPDPGSPVSTVAAVASSSSDEYFSPPTSPTPVRRAGRGRPPRSLRLRGQQAPSRVPATGGCVQRMRWTQSMNENAMRAYYGSTEGGTNLTAYRVRMLSLFQDLEPAVNVSAQRLSDQVRVIQRNQMLDDAALDRLRSEVLSNRIILTLAQTVVQASAIDATPPRSNPAVVEEDGRVATVSSQCNDRLRSALEDALREYRSTPTELRPRLPRLPMHKKNRALVCALDWQLKNVFESSEDLVDTHSILFCGAVAACRLANVKFPNCDLATRPKPAVPVWQRRIERRIDRARVLIGKLYCFREGNTRPRVMRFVRRAFSGTEISPQEYMSRVTERIDFLKQKVYAWASRIRRYKRRVDRYSQNRMFQCDERWVYRAWERPDQNVTDVCHPGDAATSSFWRSIWSVPVCHSEADWMRDVERVCEPIPEMAPVVITSLDIARAVRPLPNWKSPGPDGLHNFWLKWLSSSHICLASQFQSSLESGSLPQFLTTGVTHLLHKSGSPTEPQNYRPITCLSTVYKLLTSILRTKINTHIDNNSIMSASQNGCRNGSRGTKELLLIDMAISQQVRRSRKDLSTCWIDYKKAYDSVPHSWLMRVLELYKIDATLCTFLKSCMGQWRTVLRYPGCRQIQGNDESVWIKRGIFQGDSLSPLWFCLALNPLSTLLENSGLGYQLRKDGQVISHLLYMDDLKLFAPNKLRLMELLKVTETFSNAIRMEFGVDKCAVMYVKRGEIMESEGLQLSDSIHLRSLSSSESYKYLGMSEALGINVTDMKQSLREPFFGRLKKVLNSLLSGGNKVRAFNGWVKPVLMYSFGILKWTQTELDALDRRVRTLLTENRMHHPRSSVMRLYIPRKCGGRGFLNAKTLHNREVCSLREYFLKAEVGMHRDVVAVDKGLTPLSMAKENWRKPVILTTDDRKKEWQGKVLHGRFYRALHGPDVDFLASVSWLRFGDLFGETEGFVCAIMDEVMLTNNYRKYIMKDGTVDLCRACHCPGESIRHIISGCSRLANGEYLHRHNQVARIIHQQLALKFKLVESEVPYYKYVPDPVLVKDHITLYWDQSIITDRTIVANKPDIVVIDRSARRVMIIDVTIPHDENLVKAEKEKQIKYLDLAHEVRDMWNMNSVIIVPIVVTANGLIAKSLDEHLSKLSLGGWIKGLIQKAVLLDTARIVRRFLSLQP

SEQ ID NO: 30162 - protein, 1070 aa, Mythimna ferrago
MLTRAAARRARHPPPGSSLSSASPPPDSGSPVSPTAAVASSSSDEYFSPPTSPTPVRRPGRGRPPKSMGPRGQPAPSRVPAAGGCVQRMRWTQSMNENVMRAYYGSTEGGTNLTAYRERMLSLFQDQEPTVNVSAQRLSDQVRVIQRNHRLDDAALDRLRSEILSNQIVSTSTQTQTAATPTTNAISPRSDHNNDDADDRVVTVSSQCNERLRSALEDALCEYMSTPTELRPRLPRLPMHKKNRALVCALDSLLKNIFESSENLVDTHSILYCGAVAACRLAKIKFPNIDGTIRPKTAVPAWQCRIERRIDEARVLIGKLHCFREGNTRPRVMRFVRRAFLGTGISPQGYMSRVTERIDFLKQKVCAWASRIRRYKRRVDRYSQNRMFQSDERWVYRAWERPEHSVTDGCRPDDLATITFWRNIWSVPVSHTEGGWMRDVERVCEAIPEMEKVTITPEDVARAVRPLPNWKSPGPDGLQNFWLKWYSSSHAPLASQFQSILESGSLPEYLTTGVTHLLHKTGNPVDPKNYRPITCLSTVYKLLTSILRAKINIHIENNQIISPSQNGCRNGSRGTKELLLIDMAISQQTRRSRKDLSTCWIDYKKAYDSVPHTWLMRVLELYKIDITLRTFLESCMRQWKTVLRYPGCRPIQGNDEPIWIKRGIFQGDSLSPLWFCLALNPLSTLLEDSGLGYRLRRGGQVISHLLYMDDLKLFAPSNLQLMELLKVTETFSSAIRMEFGVDKCAGMHVKRGEIMESEGIQLPDSIHLRSLSSTETYRYLGMSEALGINNADMKQSLKERFFGRLKKVLNSLLSGGNKVRAFNGWVMPVLMYSFGILKWTQTELDALDRRVRTLLTANRMHHPRSSVMRLYIPRKCGGRGFLNAKTLHNREVCSLREYFLKTDVGMHRDVVAVDKGLTPLSMAKEDWHKPVIMTTDNRKEIWKGKELHGRFFRALHEPDVDFLASVAWLRFSDLFGETEGFVCAIMDEVILTNNYRRYIMKDGTVDVCRACHRPGESIRHIISGCSRLANGEYLHRHNQVARIIHQQLALKYNLVDLEVLQVCARPSSRK

SEQ ID NO: 30163 - protein, 1218 aa, Mythimna ferrago
MLTRTAARRARHPPPGSSLSSASPPPDPGSPVSPAAAVASSSSDEYFSPPTSPTPVRRPGRGRPPKSMGPRGQTAPSRVPAAGGCVQRMRWTQSMNENVMRAYYGSTEGGTNLTAYRERMLSLFQVLEPIVNVSSQRLSDQVRVIQRNHRLDDAALDRLRSEILSNQIVSTSTQTQTAATPTTNAISPRSDHNNDDADDRVVTVSSQCNERLRSALEDALCEYMSTPTELRPRLPRLPMHKKNRALVCALDSLLKNIFESSENLVDTHSILYCGAVAACRLAKIKFPNIDGTIRPKTAVPAWQCRIERRIDEARVLIGKLHCFREGNTRPRVMRFVRRAFLGTGISPQGYMSRVTERIDFLKQKVCAWASRIRRYKRRVDRYSQNRMFQSDERWVYRAWERPEHSVIDECRPDDLATITFWRNIWSVPVSHTEGGWMRDVERVCEAIPEMEKVTITPEDVAKAVCPLPNWKSPGPDGLQNFWLKWYSSSHAPLASQFQSILESGSLPEYLTTGVTHLLHKTGNPVDPKNYRPITCLSTVYKLLTSILRAKINIHIENNQIISPSQNGCRNGSRGTKELLLIDMAISQQTRRSRKDLSTCWIDYKKAYDSVPHTWLMRVLELYKIDITLRTFLESCMRQWKTVLRYPGCRPIQGNDEPIWIKRGIFQGDSLSPLWFCLALNPLSTLLEDSGLGYRLRRGGQVISHLLYMDDLKLFAPSNLQLMELLKVTETFSSAIRMEFGVDKCAGMHVKRGEIMESEGIQLPDSIHLRSLSSTETYRYLGMSEALGINNADMKQSLKERFFGRLKKVLNSLLSGGNKVRAFNGWVMPVLMYSFGILKWTQTELDALDRRVRTLLTANRMHHPRSSVMRLYIPRKCGGRGFLNAKTLHNREVCSLREYFLKTDVGMHRDVVAVDKGLTPLSMAKEDWHKPVIMTTDNRKEIWKGKELHGRFFRALHEPDVDFLASVAWLRFSDLFGETEGFVCAIMDEVILTNNYRRYIMKDGTVDVCRACHRPGESIRHIISGCSRLANGEYLHRHNQVARIIHQQLALKYNLVDLEVPYYKYVPDPVLENDHVTLYWDRSIITDRTIVANKPNIVVIDRLARRAMIVDITIPHDENLVKAEKEKQIKYLDLAHEIVAMWNVDSAIIVPIVVTANGLIAKSFDDHLSKLSLRGWIKGQIQKAPRYGSHCAEVPVSGALTTGSLDPAPDIGGLLFLYF

SEQ ID NO: 30164 - protein, 1068 aa, Griposia aprilina
MLTRSATRRARPSPPDSSLSSASPPPVSSPTVSAVTTPAAVVASSSSDEYFSPPTSPTPVRRQGRGRPPKSSGLRGHPAPSRVPAAGGCVQRRKWTQSMNENVMRAYYRSTKGGTNLTAYRDRMLSLFQELEPSINVSAQRLSDQVRVIQRSHRLDVAALDRLRSELSNHIVSRPAQTAVQASTIDEIQPRSNHGVELEDDRVASVSSQCNARLRSALEDAFREYRSTPTEIRPRLPRLPMHKKNRALVCALDSHLKNVFENSVNLVDTHSILYCAAVAACRLANVKFPNCDGATRQKPAVPAWRCRIERRIDEARVLIGKLYCFREGNTRPRVMRFVRRAFSGTEISPQEYMSRVTERIDFLKQKVCAWASRIRRYKRRVDRYTQNRMFQSDERWVYRAWKRPEQNVTDECRPDDAATITFWRNIWSVPVCHVEADWIRDVEQVCETVPEMEAVLITPLDVTKAVRPLPNWKSSGPDGLHNFWLKWLISSHTCLASQFQASLESGSLPQFLTTGVTHLLHKSGSSTDPKNYRPITCLSTIYKLLTSILRAKINTHIDNNSIMSASQNGCRNGSRGTKELLLIDMAISQQVRGSCKDLSTCWIDYKKAYDSVPHTWLMRVLELYKIDTTLRTFLGSCMRQWRTVLRYPGCQQIQGNDEPVWIKRGIFQGDSLSRLWFCLALNPLSTLLEDSGLGYRLRRGGQVISHLLYMDDLKLFAPNKLQLMKLLKVTETFSSAIRMEFGEIMESEGIQLSDSIHLRSLSSSESYKYLGMSETLGINVADMKQSLKERFFGRLRKVLISLLSGGNKVRAFNGWVMPVLMYSFGILKWTQTELDALNKRVRTLLTANRMHHPRSSVMRLYIPRKCEGRGFLNAKTLHNREVCSLREYFLKAEVGMHRDVVAVDKGLTPLSMAKENWRKPLVLTTDDRKEVWQSKELHGRFYRALHGPGVDFLASVSWLRFGDLFGETEGFVCAIMDEVILTNNYRRHLMTDGTVDVCRACHRPGESIRHIVSGCSRLANGEYLHRHNQVARIIHQQLALKYKLVDSEVPYYKYVPDPVLENDHITLY

SEQ ID NO: 30165 - protein, 1202 aa, Griposia aprilina
MLTRSARTRARPPPPDSSLSSASPPPVSSLIVSAVTTPAAVVASSSSDEYFSPPTSPTPVRRQGRGRPPRSLGLRGHPAPSRVPAAGGCVQRMKWTQSMNENVMRAYYRSTEGGTNLTAYRDRMLSLFQELEPTINVSAQRLSDQVRVIQRSHRLDDAALDRLRSDLNNHIISTPAQTAVQASTIDEIQPRSNHGVEVEDDRVASVSSQCNARLRSALEDAFREYRSTPTELRPRLPRLPMHKKNRALVCALDSQLKNVFESSENLIDTHSILYCAAVAACRLANVRFPNCDGATRPKPAVPAWQCRIERRIDGARVLIGKLHCFREGNNRPRVMRFVRRAFSGTGISPREYMSHATERIDFLKQKVCAWASRIRRYKRRVDRYTQNRMFQSDERWVYRAWERPEQNVTDECRPDDATTSTFWRSIWSVPVCHVEADWMRDVGRACETVPEMDAVLITPLDVARAVRPLPNWNSPGPDGLHNFWLKWLISSHACLASQYQSSLESGSLPQFLTTGVTHLLHKSGSPTDPKNYRPITCLSTVYKLLTSILRAKINTHIESNSIMSASQNGCRNGSRGTKELLLIDMAISQQVRRSRRDLSTCWIDYKKAYDSVPHTWLMRVLELYKIDTTLRTFLRSCMGQWRTVLRYPGCRQIQANDEPVWIKRGIFQGDSLSPLWFCLALNPLSTLLEDSGLGYRLRRGGQVISHLLYMDDLKLFAPNKLQLMELLKVTETFSSTIRMEFGVDKCAVMHVKRGEVMEPEGIQLSDSIHLRSLSSSESYKYLGMSEALGINVADMKQSLRERFFGRLKKVLISLLSGGNKVRAFNCWVMPVLMYSFGILKWTQTELDALDRRVRRLLTANRMHHPRSSVMRLYIPRKCGGRGFLNAKTLHNREVCSLREYFLKAEVGMHRDVVAVDKGLTPLSMAKENWRKPVVLTTDDRKEVWQSKELHGRFYRALHEPGVDFLAFVSWLRFGDLFGETEGFVCAIMDEVILTNNYRRHIMKDGTVDMCRACHRPGESIRHVVSGCSRLANGEYLHRHNQVARIIHQQLALKYKLVDSEVPYYKYVPDPVLENDHITLYWDRSIITDRTIVANKPDIVVIDRLARRTMIIDITIPHDENLVKAEKEKQIKYLDLAHEVVDMWNVSSAVIVPIVVSANGLMAKSLDQHLSRLSLGGWVKGLIQKAVLLDTARIVRKFLSLEP

SEQ ID NO: 30166 - protein, 1201 aa, Mythimna impura
MLTRAAARRARHPPPGSPLSSASPPPDLESPVSPAAAVASSSSDEYFSPPTSPTPVRRQRRGRPPKSLGSRGQPAPSRVPAAGGCVQRMRWTQSMNENVMCAYYGSTEGGTNLTAYRDRMLSLFQDLEPTVNVSAQRLSDQVRVIQRNHRLDDATLDRLRSEVLSNQIVSTSIQTQTAATPTTNAISPRSNPNNDDADDRVVTVSNQCNDELRSALEDALREYRTTPTELRPRLPRLPMHKKNRALVCTLDSLLKNNFESSENLVDTHSILYCGAVAACRLANINFPNIDGTIRPKPAVPAWQYRIERRIDGARVLIGKLHCFREGNTRPRVMRFVRRAFLGTGISPQEYMSRVTERIDFLKQKVCAWASRIRRYKRRVDRYSQNRMFQSDERWVYRAWERPEQNVIDGRRPDDFATITFWRNIWSVPVSHTEGDWMRDVERVCEAIPEMEKVVITPADVAKAVRPLPNWKSPGPDGLQNFWLKWFSNSHAPLASQFQSTLGSGSLPEYLTTGVTHLLHKTGNPVEPKNYRPITCLSTVYKLLTSILRAKINRHIENNLIMSASQNGCRNGSRGTKELLLIDMAISQQARRSRKDLSTCWIDYKKAYDSVPHTWLMRVLELYKVDMTLRTFLESCMRQWKTVLRYPGCRPIQGNDEPIRIKRGIFQGDSLSPLWFCLALNPLSTLLEESGLGYRLRRGGQAISHLLYMDDLKLFAPSNLQLMELLKVTETFSSAIRMEFGVDKICAAMHVKRGEIMESEGIQLPDSIHLRSLSSTETYRYLGMSEALGINNADMKQSLKERFFGRLKKVLNSLLSGGNKVRAFNGWVMPVLMYSFGILKWTQTELDALDRRVRTLLTANRMHHPRSSVMRLYISRKCGGRGFLNAKTLHNRAVCSLREYFLKTDVGMHRDVVAVDKGLTPLSMAKEDWRKPVILTTDDRKEIWKGKELHGRFYRALHEPDVDFLASVAWLRFSDLFGETEGFICAIMDEVILTNNYRRYIMKDGTVDVCRACHRPGESIRHIISGCSRLANGEYLHRHNQVARIIHQQLALKYNLVDSEVPYYKYVPDPVLENDHVTLYWDRSIITDRTIVANKPDIVVIDRLARRAVIVDVTIPHDENLVKAEKEKQIKYLDLAHEVVDMWNVDSAVIVPMVVTANGLIAKSFDDHLSKLSLRGWIKGLIQKAVLLDTARIVRRFLSLEP

SEQ ID NO: 30167 - protein, 1078 aa, Atethmia centrago
MLTRSAARARPPPPDSSLSSASPPPVPSPTVSAVTTPAAVVALSASDEYFSPPTSPTPVRRQGRGRPPKSLGLRGQLAPSRVPAAGGCVQRMRWTQSMNENVMRAYYGSTEGGTNLTAYRVRMLSLFQELEPTVNVSAQRLSDQVRVIQRNHRLDDAALDRLRSEVLSNHIVSTPAQTATHAPIIDAIPPRSNHDVEEEDDRVATVSSQCNVRLRSALEDAFREYRSTPTELRPRLPRLPMHKKNRALVCALDSLLKDFFESSEDLVDTHSILYCAAVAACRLANVKFPNCDEATRPKPAVPAWQYRIERRIDGARVLISKLYCFREGNTRPRVMRFVRRAFSGTGISPREYMSRVTERIDFLKQKVCAWASRIRRYKRRVDRYTQNRMFQSDERWVYRAWERPEQNETDMCRPDDATTTAFWRSIWSEPVCHAEADWMRDVERVCETIPEMEVVVITPSDIARAVRPLPNWKSPGPDGLHNFWLKWLTSSHTYLASQFQSSLESGSLPQFLTTGITHLLHKSGSPAEPKNYRPITCLSTVYKLLTSILRAKINTHIDSNSIMSASQNGCRNGSRGTKELLLIDMAISQQVRRSRKDLSTCWIDYKKAYDSVPHTWLMKVLELYKIDTTLRTFLESCMGQWRTVLRYPGCRRIQGNDEPVWIKRGIFQGDSLSPLWFCLALNPLSTLLEDSGLGYRLRRGGQVISHLLYMDDLKIFAPNKLRLMELLKVTETFSGAIRMEFGVDKCAVMHVKRGEIMESEGIQLSDSIHLRSLSSPESYKYLGMSEALGINVTDMKQLLKERFFGRLKKVLISLLSGGNKVRAFNGWVMPVLMYSFGILKSPMIVHHPRSSVMRLYIPRKCGGRGFLNAKTLHNREICSLREYFLKAEVGMHRDVVAVDKGLTPLSMAKENWCKPVVLTTDDRKEIWQNKELHGRFYRALHEPDVDFLASVSWLRFGDLFGETEGFVCAIMDEVILTNNYRRHIMKDGTVDVCRACHRPGESIRHIISGCSRLANGEYLHRHNQVARIIHQQLALKYKLVNSEVPYYKYVPDPVLENDHVTLYWDRSIITDRTIVANR

SEQ ID NO: 30168 - protein, 868 aa, Xestia c-nigrum
MRFVRRAFSGTEISPQEYMSRVTERIDFLKQKVYAWASRIRRYKRRVDRYSQNRMFQCDERWVYRAWERPDQNVTDVCHPGDAATSSFWRSIWSVPVCHSEADWMRDVERVCEPIPEMAPVVITSLDIARAVRPLPNWKSPGPDGLHNFWLKWLCSSHTCLASQFQSSLESGSLPQFLTTGVTHLLHKSGSPTEPQNYRPITCLSTVYKLLTSILRTKINTHIDNNSIMSASQNGCRNGSRGTKELLLIDMAISQQVRRSRKDLSTCWIDYKKAYDSVPHSWLMRVLELYKIDATLCTFLKSCMGQWRTVLRYPGCRQIQGSDESVWIKRGIFQGDSLSPLWFCLALNPLSTLLENSGLGYQLRKDGQVISHLLYMDDLKLFAPNKLRLMELLKVTETFSNAIRMEFGVDKCAVMYVKRGEIMESEGLQLSDSIHLRSLSSSESYKYLGMSEALGMNVTDMKQSLRERFFGRLKKVLNSLLSGGNKVRAFNGWVMPVLMYSFGILKWTQTELDALDRRVRTLLTENRMHYPRSSVMRLYIPRKCGGRGFLNAKTLHNREVCSLREYFLKAEVGMHRDVVAVDKGLTPLSMAKENWRKPVILTTDDRKKEWQGKVLHGRFYRALHGPDVDFLASVSWLRFGDLFGETEGFVCAIMDEVMLTNNYRKYIMKDGTVDVCWACHCPGESIRHIISGCSRLANGEYLHRHNQVARIIHQQLALKFKLVESEVPYYKYVPDPVLVKDHITLYWDQSIITDRTIVANKPDIVVIDRSARRVMIIDVTIPHDENLVKAEKEKQIKYLDLAHEVRDMWNMNSVIIVPIVVTANGLIAKSLDEHLSRLSLGGWIKGLIQKAVLLDTARIVRRFLSLQP

SEQ ID NO: 30169 - protein, 1250 aa, Spodoptera exigua
MLTRAKARARAAPPPSPDSSLSSASPSPETRTTRSPVIAVASSSSDEYFSPLASPAPERRQRRGRPPMGLGTRGQRAPGRVPATGGCARRMKWSQSMNENVMRAYYGATEGGTNLTAYRDRMLSLFQVLEPSVNVSAQRLSDQVRVIQRSRRLDDAALDRLRLETLHNRVVLTSSQSETQTPVENATLATPVADVEDDKVEQVSTQCNERLRNALEDAIHEYRFAPSELRPKLPRLPMCGKNRALVCALDSLLENYFESSENLYDTHSILYCGAIAACRLANVRFPNLDAAVRPKPAAPAWQCRIERRIDEARVLIGKLTCFREGNNRPRVMRFVRRAFVGTETSPHEYLTRVTERIDFLKQKIYAWANRIRRYKKRVERYTQNRMFQSDQRWVYRDWERSSQDVVNGQRPDDETTNSFWRNIWSVPVNHTEADWMCDVKRECETLPEMEKVVITSSDVANAACSVPNWKSPGPDGLHNFWLKSFSSSHDRLASQFQMALEAGSLPQFLTTGITHLLHKSGSYTEPKNYRPITCLPTVYKLFTSILRAKITKHIEKNSIMSVSQNGCRKGSRGTKELLLIDMVISQQVRRSRKDLSTCWIDYKKAYDSVPHTWLMRVLELYKINTTLRTFLQSCMRQWSTVLSYPGCKQIQRSEEPVRIVRGIFQGDSLSPLWFCLALNPLSTLLEASGLGYRLRRKGHVISHLLYMDDLKLFAPNKEELMELLKITKNFSSSIRMEFGVDKCAVMHVKRGGIVESESLELSDFTKLRSLSANDTYKYLGMSEGLGINGPHMKQSLQERFFGRLNKVLKSSLSGGNKVRAFNGWVMPVLMYSFGILKWTQTELDTLDRRVRTLLTANRMHHPRSSVMRLYIPRKRGGRGFLNAKTLHNREVCNLREHFLKVDEDMHREVVTVDKGFTPLSLAKENWCKPVVLSVNDRKTVWSSKELHGRFFRALHGPDVDFLASVAWLRFSNLFGETEGFVCAIMDEVILTNNYRKYIMKDGTVDICRACHSPGESIRHIISGCGRLANGEYLHRHNQVAKIIHQQLALKYRLVESEVPYYKYVPDPVLEKDHITLYWDRSIITDRTIVANKPDIVVVDRLARRTTIIDVAIPHDENLVKAEKDKQLKYLDLAHEVVDMWSVDSAIVVPIVVSANGLVPKSLDNHLKRLTMRRIVTGDETWVYEFDMRASQQASEWRLPTEPKPKKPRQSRSKVKVMLTVFFDYRGVVHSEFLPEGQTVNKEYYLSVMRR

SEQ ID NO: 30170 - protein, 868 aa, Trichoplusia ni
MRFVKRAFAGTNISPSEYTARVTERIDFFKQKVCAWASRIRRYKTRGDRFHQNRMFQRDQRWVYRSWEQPASEEGAGRLPDDVATNLFWRSIWSAPVTHSEGDWIRDVEQSCERIEEMGAIDISPQDVANAVRPLANWKAPGPDGLHNFWLKWLPSSHGCLASQFQSAVDSGVLPQFFTTGSTHLLHKTGSTTDPKNYRPITCLPTIYKLLTSILREKINDHIERFSIMSASQNGCRNGSRGTKELLLIDMTICQQVRRSKKGVSTCWIDYKKAYDSVPHAWLMRVLELYKINTTLRTFLKSCMGQWTTVLHYPGCRDIQRSGQLIRIERGIFQGDSLSPLWFCLALNPLSTLLENSRLGYSLRRGSQVISHLLYMDDLKLFASNKLQLMKLLKITESFSNSIRMEFGVDKCAVMHVKRGGIVESQGIQLSDSINLRSLSSTETYKYLGMSEALGINVADMKQSLQTRFFGRLNKVLKSSLSGGNKVRAFNGWVMPVIMYSFGILKWTQTELDALDRRVRTLLTANRMHHPRSSVMRLYIPRKCGGRGFLNAKTLHNREVCNLREYFLRVNVGMHRDVVAVDKAFTPLCLGKENWHKPVVMSVKDRKDVWQSKELHGRYYRTLHGADVDFLASVAWLRFGDLFGETEGFVCAIMDEVIMTNNYRKYIIKDGTVDICRACHSSGESLRHIVSGCSRLANGEYLHRHNQVARIIHQQLALKYKLVESEVPYYKYVPDPVLESGHITLYWDRSIITDRTIVANKPDIVVIDRSERRTMIVDITIPHDENLVKAEKEKQLKYLDLAHEVVDLWEVDSAIIVPIVVSANGLIAKSLDQHLRRLSLGGWVKGLIQKAVLLDTARIVRRFLSLEP

SEQ ID NO: 30171 - protein, 1200 aa, Spodoptera litura
MLTRARCRQDAPPPPPDSSLSSASPSPEPRSAGSPVTAVASSSSDDYFSPPTSPPPVRRPGRGRPPTGLGTRGHQALGRVPATGGCVRRMKWSQTINENVMRAYYGATEGGTNLTAYRERMLSMFQVLEPSVNVSAQRLSDQVRVIQRNCRLDEATLDRLRLEALRNRVVPAPPQLVAQTPVVSQCVTSTTPIVGVEDDRVEQVSTQCNERLRSALEDAVREYRLAPSDLRPKLPRLPMCRKNRALVSALDSLLKKYFESSENLYDTHSILYCGAVAACRVANVRFPNLDAAVRPKPAVPAWQYRIERRISEARVLIGKLSCFREGNTRPRVMRFVRRAFVGTETSPHEYLSRVTERIDFLKQKVYAWANRIRRYKKRVERYTQNRMFQRDQRWVYRDWERSNQDVVDGRRPDDDATSTFWRNIWSVPVSHTEGDWMFDVKRRCETIPEMEEVEITSSDVASAACSVPNWKSPGPDGLHNFWIKWFKSSHVRLALHFQAALETGSLPQFLTTGVTHLLHKSGSSTEPKNYRPITCLPTVYKLLTSILRTKITKHIKQNSIMSVSQNGCREGSRGTKELLLIDMVVSQQVRRSRKDLSTCWIDYKKAYDSVPHTWLLKVLELYKIHASLRAFLESCMRQWSTVLCYPGCRQIQGNEEPVRIVRGIFQGDSLSPLWFCLALNPLSTLLEDSGLGYPLRRRGLVISHLLYMDDLKLFAPNKKQLMELLNITEKFSSSIRMEFGVDKCAVMHVKRGGIVESEGLELSDFTKLRSLSANDTYKYLGMSEGLGINGLDMKQSLQERFFGRLNKVLKSSLSGGNKVRAFNGWVMPVLMYSFGILKWTQTELDTLDRRVRTLLTANRMHHPRSSVMRLYIPRKCGGRGLLNAKTLHNREVCSLREYFLKVNEGMHREVAAVDNGFTPLSLAKENWRKPVVLSVNDRKEIWHSKELHGRFFRALHGPSVDFLASVSWLRFSNLFGETEGFVCAIMDEVILTNNYRKYIIKDGTVDICRACHSPGESIRHIISGCGRLANSEYLHRHNQVAKIIHQQLALHYRLVESEVPYYKYVPDPVLENDHITLYWDRSIITDRTIIANKPDIVVIDRQVRRTMIIDITIPHDENLVKAEKDKQIKYLDLAHEVVDMWNVDSAIIVPIVVSANGLIPNSLDDHLRRLALGSWVKGLIQKAVLLETARIVRRFLSLEP

SEQ ID NO: 30172 - protein, 1220 aa, Mythimna ferrago
MLTRSRARSQIAQPTSSGSSLNSASQPPRPAPAVSPVIPEAAVASSSSDEYFSPPTTPPPARRRGRGRPPACLGPRGPPASDRVPAAGGSVQRMRWTSSINENVMRSYFGATEGGINLTAYRGRMLSLFQVLEPAVNVSVQRLSDQVRVIQRNRMLDDAVLDRLRLESQSSRVSAATPSAAAQRQPSAAPRPDHVGDADDDAAISVSTQCNERLRGALEDAFREYRSIPPEVRPRLPRLPMHKRNRALVCALDSQLSICFDSSEDLADTHSILYCAAVAACRVAHVKFPNCNRATRPAVPAWQCRIERRIGEARALIGKLICFREGNTRPRVMRFVRRAFSGTDISPRDYLPCVTERIDFLKQKIYAWANRIRRYKRRVERYTQNRTFQSNERWVYRAWERPDQGVTDTRLPDDDAMCSFWRSIWSAPVSHTEGDWIREVERACDLLPEMGAITISPQDVARAVRPLPNWKSPGPDGLHNFWLKWFQGSHARLASQFQSALESGSLPQFLTTGITHLLHKSGSTAEPKNYRPITCLPTVYKVLTSILRAKINSHIETNSIMSVSQNGCRNGSRGTKELLLIDIAISQQVRRTRKNLSACWIDYKKAYDSVPHTWLMRVLELYKVDATLRTFLMSCMGQWRTVLHYPGCRQIWENSEPIRIERGIFQGDSLSPLWFCLALNPLSTLLEGSGLGYRLKRGGQVISHFLYMDDLKLFAPNNLQLMELLKVTETFSSAIRMDFGVDKCAVIHVKRGEIMESEGIQLSDSIHLRSLSSTETYKYLGMSEALDINTDDMKQSLKERFFGRLNKVLNSLLSGGNKVRAFNGWVMPVLMYSFGILKWTQTELDALDRRVHTRLTANRMYHPRSSVMRLYIPRKCGGRGFLNAKSLHNREVCSLREYFLAVDVGMHRDVVAVDKGLTPLSLANENWRKPLVLDTNDRRKVWQGKELHGRFYRALHGPDVDLLASVSWLRFGDLFGETEGFVFAIMDEVMMTNNYRKYIVKDGTVDICRACHRPGESIRHIISGCSRLANGDYLHRHNLVARIIHQQLALKYNLVESEVPYYRYVPDPVLDNGSITLYWDRSIITDRTIVANKPDIVVIDRLERRTMIVDIAVPHDENLVKAEKDKQIKYLNLAREVVDMWEVDKATIVPIVVTANGLIAKSLEQHLRRLSLGSWIKGQIQKAVLLDTARIVRRFLSQEPWPPAAWTLFPMPVGYYFLYF

SEQ ID NO: 30173 - protein, 920 aa, Eilema sororculum
MAGAKFPIKDPAIRPKPVIPAWQCRIERRVAEARVLIGKLICFRSGNTRPRVMRYVTRAFAGTDISPQDYASRVTERIDFLKQKVYAWANRIRRYKKRVDRYTLNCMFQRDQRWVYRSWERTEESVDDVRRPDAEATNAFWRSIWSVPVSHTEGDWMREVERACETIPEMEEINIDAIDVDCAVRSLSNWKSPGPDGLHNFWLKWLRSSHVVLASQFQSAVESGTLPAFMTTGVTHLLHKTGSTLEPNNYRPITCLPTVYKLLASILRAKINNHINNNSIMCASQNGCRNGARGTKELLLIDMTISQQARRNRKDLAACWIDYKKAFDSVPHTWLLRVLELYKVNTTLCTFLRSCMGQWRTVLFYPGCRQALGSGVPITIERGIFQGDSLSPLWFCLALNPLSTLLVNSGLGYRLRREGQMVSHLFYMDDLKLFAHTNPQLIALLKITETFSNSIKMAFGVDKCAVIHVKRGRVVESEGIQLSDSTNLRSLLVTETYKYLGMSQALCINEADMKQMLQDRFFGRLKKVLNSLLSGGNKVRACNSWVMPLLMYSFGILKWTQTELDTIDRKVRAQLTAFRMHHPRSSVMRLYIPRKCGGRGFLNAKNLHNREVCNLRDYFLKSNVDMHRDVVNVDTGLTPLGLAKENWRRPTIVSTDSRREVWKSKELHGRFYRALHRPEVDLLASVSWLRFSDLFGETEGFVCAIADEVIKTNNYRKYIMRDGTIDICRACHQPGESLRHITSGCSRLANGEYLHRHNQVARIIHQRLALKYNLVEVEVPYYRYVPEPVLENSHITLYWDRSIITDRTVVANKPDIVVIDRSERRALIVDVTIPHDENLVKAEKDKQVKYLDLAHEVVDMWSVDSAIIVPIVVSVNGLIAKSLDQHLKRLGLDGWVKGQMQKAVLLDAARIVRKFLSLEP

SEQ ID NO: 30174 - protein, 1160 aa, Vanessa cardui
MFKTQKHVDKSQPSSPTPVRRAGRRRPPTGLGARGQPVSNGVPASGGGVQRMRWTQPINENVMRAYYGATKGGTNLTAYRVRMLSLFQALEPAINVSAQRLSDQVRVILRNNRLSDTVLDRIRSETCNSDVTSGPSTPVVEEPLPAIPQGPEHDDEGGGDMAITKSKYSDHLRSALGDAIREYRNTPAELRPRLPRLPMTKRNRDLVYTLDSLLADYFESSENLEDTHSILFCAAVAACRVAGVTFEDTERATRPKAVAPAWQSRIEKRINETRVLIGKLYCFKEGNRRPRVMRFVGRAFLGTGIGPQEYPSHVVERIDFLKQKVYAWASRIRRYRRRVDRYHLNRKFQSDQRWVYRTWERLDQDVSDRCRPDDDATNTFWRNIWSVPVDHIEGDWMLEVRQACEPLEVMGKISIASEDVAAAVRSVANWKSPGPDGLHNFWLKWLRSSHECLASQFQSALESGSLPQFLTTGVTHLLHKTGSATDPKYYRPITCLPTVYKLLTAILRDKINSHIQNNSILSVSQNGCRGGSRGTKELLLIDMTISQQVRRSRKSLSTCWIDYKKAYDFVPHTWLLRVLELYKLDTTLCSFLRSCMGQWRTVLRYPGCRTIHGNDELIRIERGIFQGDSLSPLWFCLALNPLSTLLESSRLGYRLRRGGKVISHLLYMDDLKLFAPSDSQLMELLKVTETFSNSIRMEFGVDKCAVMHVKRGEIMESDGLQLSDSINFKSLSANESYKYLGMSETLGINVTDMKQSLQERFFGRLKKVFKSLLSGGNKVRAFNGWVMPVLMYSFGILKWTQKELDALDRKVRVLLTAYRMHHPRSSVMRLYIPRRCGGRGFLNAKTLHNREVYKLREYFLHTDLDMHRDVVTMDKGLTPLSLGKENWHKPVVLSTENRKEVWKSKELHGRFYRALHGPDVDYMASVSWLRFGNLFGETEGFVCAIMDEVIMTNNYRKYVVRDGTVDICRACHTLGESLRHIISGCSRLANGEYLHRHNQVAKIIHQQLALRYGLVVSEVPYYKYVPDPVLENGHITLYWDRSIINDRTVVANKPDIVVIDRSERRTIIVDITMPHDENLVKAEKDKQIKYLDLAHEVVDMWDVDTAVIVPIVVSANGLMAKSLEQHLKRLSLGSWVKGLMQKAVLLGTARIVRKFLSLEP

SEQ ID NO: 30175 - protein, 1197 aa, Vanessa cardui
MLTRARQQAHNNPSPDPPLSSASQAQDPAQGSSLVSAAASSSSDEYFSPPTSPTPVRRAGRRRPPTGLGARGQPVSNRVPASGGGVQRMRWTQPINENVMRAYYGATKGGTNLTAYRVRMLSLFQALEPAVNVSAQRLSDQVRVILRNNRLSDTVLDRIRSETCNSDITSGPSTPVVEEPLPAIPQGPEHDDEGGGVMAITKSKYSDHLRSALGDAIGEYRNTPAELRPRLPRLPMTKRNRDLVCTLDSLLADYFESSENLEDTHSILFCAAVAACRVAGVTFEDTERATRPKAVAPAWQSRIEKRINETRVLIGKLYCFKEGNTRPRVMRFVGRAFLGTGISPQEYPSHVVERIDFLKQKVYAWASRIRRYRRRVDRYHLNRKFQSDQRWVYRTWERLDQDVSDGCRPDDDATNTFWRNIWSVPVDHIEGDWMLEVRQACEPLEVIGKISIASEDVAAAVRSVANWKSPGPDGLHNFWLKWLRSSHECLASQFQSALESGSLPQFLTTGVTHLLHKSGSATDPKNYRPITCLPTVYKLLTAILRDKINSHIQNNSILSVSQNGCRGGSRGTKELLLIDMTISQQVRRSRKSLSTCWIDYKKAYDSVPHTWLLRVLELYKLDTTLCSFLRSCMGQWRTVLRYPGCRTIHGNDEPIRIERGIFQGDSLSPLWFCLALNPLSTLLESSRLGYRLRRGGKVISHLLYMDDLKLFAPSDSQLMELLKVTETFSNSIRMEFGVDKCAVMHVKRGEIMESDGLQLSDSINFKLLSANESYKYLGMSEALGINVTDMKQSLQERFFGRLKKVLKSLLSGGNKVRAFNGWVMPVLMYSFGILKWTQKELDALDRKVRVLLTAYRMHHPRSSVMRLYIPRRCGGRGFLNAKTLHNREVYKLREYFLHTDLDMHRDVVTMDKGLTPLSLGKENWHKPVVLSTENRKEVWKSKELHGRFYRALHGPDVDFMASVSWLRFGNLFGETEGFVCAIMDEVIMTNNYRRYIVRDGTVDICRACHSPGESLRHIISGCSRLANGEYLHRHNQVAKIIHQQLALRYGLVVSEVPYYKYVPDPVLENGHITLYWDRSIITDRTVVANKPDIVVIDRSERRTIIVDITIPHDENLVKAEKDKQIKYLDLAHEVVDMWDVDTAVIVPIVVSANGLMAKSLDQHLKRLSLDSWVKGLMQKAVLLGTARIVRKFLSLEP

SEQ ID NO: 30176 - protein, 1198 aa, Schrankia costaestrigalis
MITRAASRRALLTPPDSSLSSASQTMQNVPDSVEASSSSSSDEFFSPPSSPTPVLRRGRGRPPIGLGSRAPQASNRVPAAGGNVHRMKWTSSINENVMRAYFVATEGGTNLTAYRDRMLSLFQELEPAVNVSTQRLSDQVRAIQRCHLLNDTVLDRIRSDILSNLTISTPPSVTTQVNTTIPLSQPTELNSFETIDCEVTNVSIQYNDQLRSALECAIREYRFMDPGRRPRIPRLPTHKQNIALVCALDSLLLNYFDNSENLGDAHSILYCGAVAACRVAHIKFPVDDIATRLRPTVPAWQCRIERRIAEARALIGKLICFRSGNTRPRVMRFVTRAFSETNIDRRDYMLHVTERIDFLKQKVYAWANRIKRFKKRMERYTQNRAFQKDERWVYRNWERPVLGSVDMQLPDADATNDFWRSIWSVPVNHTEGAWIGDVEKACEHIHQMEPVVITTEDVTCAVRRLPNWKSAGPDGLHNFWLKWLHSSHACLASHFQSSLETGTLPDFITTGVTHLLYKSGSSTDPKNYRPITCLPTIYKLLTSILRKKISLHIQENSIMCISQNGCRNEARGTKEQLLIDTTISEQVRRNRKDLSTCWIDYKKAYDSVPHTWLLRVLELYKIDATLCTFLRTCMTKWNTVLFYSGCRLGLGNEVPIQIKRGIFQGDSLSPLWFCLALNPLSTLLECSGLGYRLKRHGQVISHLLYMDDLKLFAPTKSQLLVLLKETETFSNSIKMEFGVDKCAVMHVKRGKVVESDELQLSDSIKLRCLSPSDTYKYLGMSQALCITETDMKQQLRDCFFARLKKVLNSLLTGGNKVRAYNSWVMPVLMYSFGILKWTQTELEALDRKVRTLLTAHRMHHPRSSVMRLYIPRKSGGRGYLSAKTLHNREVYNLREYFLTVDADIHRDVVSVDVGLTPLSLGKENWRKPIIQTIDDRKEIWKSKELHGRFYRALNGPDVDTLSSVSWLRFGDLFGETEGFVFAIMDEVVMTKNYRKYILKDGTVDICRACHCPGESLRHIVSSCSRLANGEYLHRHNQVARIVHQQLALKYHLVDAEVPYYKYVPDPVLENSSVTLYWDRSIITDRTIVANKPDIVVIDRSERRAMIIDITIPHDENLVKAEKDKQTKYLDLAHEVVDMWNVDSAIIVPIVLSVNGLIPKSLYQHLRRLSLDSWIIGLMQKAVLLDTARIVRRFLSLEP

SEQ ID NO: 30177 - protein, 1193 aa, Trichoplusia ni
MLTRLQARAARLPSPDSSPSSASQLPPDRGSATAVAVASSSSDEYYSPPTSPTPVRRQGRRRPPSSLAPSGQPASNRAPAPGGVVQRMKWTRPMNENVMRAYYGATGGGTNLTAYRARMLSLFRALEPDVDVSAQRLSDQVRVIQRNRRLDDATLDRLRSEVRISPVVSAPSLTVVPMHGTPPTNFDGEHDDGAITVSTQCNDLIRSTLEDVIREYRTSPPGLRPRVPRLPMHNKNKAIMGVLDSLLPTYFESSVDLTDTHSILYCAALTACRVANVAIRPNNNATRPKPAVPAWQCRIEQRIAGARTLIAKLKTFKEGNSRPRVMRFVKRAFAGTNISPSEYFSRVTERIDFYKQKVYAWANRIRRYKCRVERYHLNRMFQKDERWVYRTWERPGLGVDDGSLPDDDATKSFWRSIWSEPVSHAECDWMREVEQSCEHIQEMGAITISPQDVATATRSLSNWKAPGPDGLQNYWLKWLRSSHDCLASQFQSVIESGKLPLFFTTGSTHLLHKTGSTTDPKNYRPITCLPSIYKLLTSILREKITNHINTYSIMSASQNGCRSGSRGTKELLLIDMSICQQVRRSKKDLSTCWIDYKKAYDSVPHTWLLRVLELYKINATLRTFLMTCMRQWSTVLRYPGCREILQSGEPIKIERGIFQGDSLSPLWFCLALNPLSTLLENSRLGYSLRRGSQVISHLLYMDDLKLFACTKLQLMKLLKITESFSNSIRMEFGVDKCAVMHVKRGGIVESQGIQLSDSINLRSLSSTETYKYLGMSEALGINVVDMKQSLQTRFFGRLNKVLKSSLSGGNKVRAFNGWVMPVIMYSFGILKWTQTELDALDRRVRTLLTANRMHHPRSSVMRLYIPRKCGGRGFLNAKTLHNREISNLREYFLRMDVGMHRDVVAVDKAFTPLSLGKENWRKPVVLSVKDRKDVWQSKELHGRYYRTLHGADVDFLASVAWLRFGDLFGETEGFVCAIMDEVILTNNYRKYIIKDGTVDICRACHCPGESLRHIVSGCSRLANGEYLHRHNQVARIIHQQLALKYKLVESEVPYYRYVPDPVLENGHVTLYWDRSIITDRTIVANKPDIVVIDRSERRAMIVDVTIPHDENLVKAEKEKQLKYLDLAHEVVDLWEVDSAIIVPIVVSVNGLIAKSLDQHLMRLSLGVWVKGLIQRAVLLDTARIVRRFLSLEP

SEQ ID NO: 30178 - protein, 962 aa, Spodoptera exigua
MCGKNRALVCALDSLLENYFESSENLYDTHSILYCGAIAACRVANVRFPNLDAAVRPKPAAPAWQCRIERRIDEARVLIGKLTCFREGNNRPRVMRFVRRAFVGTETSPHEYLTRVTERIDFLKQKIYAWANRIRRYKKRVERYTQNRMFQSDQRWVYRDWERSSQDVVNGQRPDDETTNSFWRNIWSVPVNHTEADWMCDVKRECETLPEMEKVVITSSDVANAACSVPNWKSPGPDGLHNFWLKSFSSSHDRLASQFQMALEAGSLPQFLTTGITHLLHKSGSYTEPKNYRPITCLPTVYKLFTSILRAKITKHIEKNSIMSVSQNGCRKGSRGTKELLLIDMVISQQVRRSRKDLSTCWIDYKKAYDSVPHTWLMRVLELYKINTTLRTFLQSCMRQWSTVLSYPGCKQIQRSEEPVRIVRGIFQGDSLSPLWFCLALNPLSTLLEASGLGYRLRRKGHVISHLLYMDDLKLFAPNKEELMELLKITKNFSSSIRMEFGVDKCAVMHVKRGGIVESESLELSDFTKLRSLSANDTYKYLGMSEGLGINGPHMKQSLQERFFGRLNKVLKSSLSGGNKVRAFNGWVMPVLMYSFGILKWTQTELDTLDRRVRTLLTANRMHHPRSSVMRLYIPRKRGGRGFLNAKTLHNREVCNLREHFLKVDEDMHREVVTVDKGFTPLSLAKENWCKPVVLSVNDRKTVWSSKELHGRFFRALHGPDVDFLASVAWLRFSNLFGETEGFVCAIMDEVILTNNYRKYIMKDGTVDICRACHSPGESIRHIISGCGRLANGEYLHRHNQVAKIIHQQLALKYRLVESEVPYYKYVPDPVLEKDHITLYWDRSIITDRTIVANKPDIVLVDRLARRTTIIDVAIPHDENLVKAEKDKQLKYLDLAHEVVDMWSVDSAIVVPIVVSANGLVPKSLDNHLKRLTLGGWIKGLIQKAVLLETARIVRRFLSLEP

SEQ ID NO: 30179 - protein, 868 aa, Spodoptera exigua
MRFVRRAFVGTETSPHEYLTRVTERIDFLKQKICAWANRIRRYKKRVERYTQNRMFQSDQRWVYRDWERSSQDVVNGQRPDDETTNSFWRNIWSVPVNHTEADWMCDVKRECETLPEMEEVVITSSDVANAACSVPNWKSPGPDGLHNFWLKSFTSSHDRLASQFQMALEAGSLPQFLTTGITHLLHKSGSYTEPKNYRPITCLPTVYKLFTSILRAKITKHIEKNAIMSVSQNGCRKGSRGTKELLLIDMVISQQVRRSRKDLSTCWIDYKKAYDSVPHTWLMRVLELYKINTTLRTFLQSCMRQWSTVLSYPGCKQIQRSEEPVRIVRGIFQGDSLSPLWFCLALNPLSTLLEASGLGYRLRRKGHVISHLLYMDDLKLFAPNKEELMELLKITKNFTSSIRMEFGVDKCAVMHVKRGGIVESESLELSDFTKLRSLSANDTYKYLGISEGLGINGPHMKQSLQERFFGRLNKVLKSSLSGGNKVRAFNGWVMPVLMYSFGILKWTQTELDTLDRRVRTLLTANRMHHPRSSVMRLYIPRKCGGRGFLNAKTLHNREVCNLREHFLKVDEDMHREVVTVDKGFTPLSLAKENWCKPVVLSVNDRKAVWSSKELHGRFFRALHGPDIDFLASVAWLRFSNLFGETEGFVCAIIDEVILTNNYRKYIMKDGTVDICRACHSSGESIRHIISGCGRLANGEYLHRHNQVAKIIHQQLALKYRLVESEVPYYKYVPDPVLEKDHITLYWDRSIITDRTIVANKPDIVVVDRLARRTTIIDVAIPHDENLVKAEKDKQLKYLDLAHEVVDMWNVDSAIVVPIVVSANGLVPKSLDNHLKRLTLGGWIKGLIQKAVLLETARIVRRFLSLEP

SEQ ID NO: 30180 - protein, 1201 aa, Spodoptera litura
MMLTRARSKQGAPPPPPDSSLSSASPSPDPSPAGSPVTAVASSSSDDYFSPPTSPTPVRRPGRGRPPTGLGARGQQAPGRVPATGGCVRRMKWSQTINENVMRSYYGATEGGTNLTAYRERMLSIFQVLEPSINVSAQRLSDQVRVIQRNRRLDEAALDRLRLEALRNRVVPAPPQSVAQTPIVSQCVTPTTPIVGVEDDRVEQVSTQCNERLRSALEDAVREYRLAPSNLRPKLPRLPMCRKNRALVSALDSLLKKYFESSENLYDTHSILYCGAVAACRVANVRFPNLDAAVRPKPAVPAWQYRIERRISEARVLIGKLSCFREGNTRPRVMRFVRRAFVGTETSPHEYLSRVTERIDFLKQKVYAWANRIRRYKKRVERYTQNRMFQRDQRWVYRDWERSNQDVADGRRPDDDATNTFWRNIWSVPVSHTEGDWMFDVKRRCETIPEMEEVEITSSDVASAACSVPNWKSPGPDGLHNFWIKWFKSSHVRLALHFQAALETGSLPQFLTTGVTHLLHKSGSSTEPKNYRPITCLPTVYKLLTSILRTKITKHIEQNSIMSVSQNGCREGSRGTKELLLIDMVVSQQVRRSRKDLSTCWIDYKKAYDSVPHTWLLKVLELYKIHASLRAFLESCMRQWSTVLCYPGCRQIQGNEEPVRIVRGIFQGDSLSPLWFCLALNPLSTLLEDSGLGYPLRRRGLVISHLLYMDDLKLFAPNKKQLMELLNITEKFSSSIRMEFGVDKCAVMHVKRGGIVESEGLELSDFTKLRSLSANDTYKYLGMSEGLGINGPDMKQSLQERFFGRLNKVLKSSLSGGNKVRAFNGWVMPVLMYSFGILKWTQTELDTLDRRVRTLLTANRMHHPRSSVMRLYIPRKCGGRGLLNAKTLHNREVCSLREYFLKVNEGMHREVAAVDNGFTPLSLAKENWRKPVVLSVNDRKEVWHSKELHGRFFRALHGPSVDFLASVSWLRFSNLFGETEGFVCAIMDEVILTNNYRKYIIKDGTVDICRACHSPGESIRHIISGCGRLANSEYLHRHNQVAKIIHQQLALHYRLVESEVPYYKYVPDPVLENDHITLYWDRSIITDRTIIANKPDIVVIDRQVRRTMIIDITIPHDENLVKAEKDKQIKYLDLAHEVVDMWNVDSAIIVPIVVSANGLIPNSLDNHLRRLALGSWVKGLIQKAVLLETARIVRRFLSLEP

SEQ ID NO: 30181 - protein, 1035 aa, Vanessa tameamea
MCNSGFTSAPSQPVVEGPLPATPQGPDHDDEGEGDMAITTSKYSDQLRSALGDAIREYRNTPAELRPRLPRLPMTKRNRDLVCTLDSLLADYFESSENLEDTHSILFCAAVAACRVAGVTFEDTERATRPKAATPAWQSRIEKRINKTRVLIGKLYCFKEGNTRPRVMRFVGRAFLGTGISPQEYPSHVVERIDFLKQKVYAWASRIRRYRRRVDRYYLNRMFQSDQRWVYRTWERLDQGVSDGCRPDDDATNIFWRNIWSVPVDHIEGDWMREVRQACEPLEAMGEISIASEDVAAAVRSVPNWKSPGPDGLHSFWLKWLRSSHDCLASQFQSALESGSLPQFLTTGVTHLLHKSGSATDPKNYRPITCLPTVYKLLTSILRDKINSHIQNNSILSVSQNGCRGGSRGTKELLLIDMTISQQVRRFRKSLSTCWIDYKKAYDSVPHTWLLRVLELYKLDTTLCSFLRSCMGQWRTVLRYPGCRTIHSNDEPIRIERGIFQGDSLSPLWFCLALNPLSTLLECSRLGYCLWRGGKVISHLLYMDDLKLFAPSGSQLMELLKVTETFSNSIGMEFGVDKCAVMHVKRGEIMESDGLQLSDSINFRSLSANESYKYLGVSEALGINVTDMKQSLRERFFGRLKKVLKSLLSGGNKVRAFNGWVMPVLMYSFGILKWTQKELDALDRRVRVLLTAYRMHHPRSSVMRLYIPRRCGGRGFLNAKTLHNREVYKLREYFLHTDLDMHRDVVTMDKGLTPLSLGKENWRKPVVLSTENRKGVWKSKELHGRFYRALHGPDVDFMASVSWLRFGNLFGETEGFVCAIMDEVIMTNNYRKYIVRDGTVDICRACHTPGESLRHIISGCSRLANGEYLHRHNQVAKIIHQQLALRYGLVVSEVPYYRYVPDPVLENGRITLYWDRSIITDRTVVANKPDIVVIDRSERRTIIVDVTIPHDENLVKAEKDKQIKYLDLAHEVVDMWDVDTAVIVPIVVSANGLMAKSLDQHLKRLSLGSWVKGLMQKAVLLGTARIVRKFLSLGP

SEQ ID NO: 30182 - protein, 1192 aa, Eilema sororculum
MLTRAQAKRNGSAPITSPDSSLSSAAQPPAVEPAASSSSSSDEFFSPPTSPTPVRRPGRGRPPTCLGPRRPPASNGAPATGGDVHRMRWTNSINENVMRAYFAATEGGTNLSAYRTRMLPLFQALEPSIKVSAQRLSDQVRVIQRNRMLNETVLETLRLECLRNICVTPAPVPVPASTVELNDDTCVAPDDTPIPVSIQYNEEIKEALECALREYRSMPVHVRPRLPRLPIHRRNIALVSALDSLLPRYLENSENLGDTHSILYCTAVAACRMAGAKFPIKDPAIRPKSAIPAWQCRIERRVTEARVLIGKLICFRSGNTRPRVMRYVTRAFAGTDISPQDYTSRVTERIDFLKQKVYAWANRIRRYKKRVDRYTVNRMFQRDQRWVYRSWERTEESVDDVRRPDAEVTNAFWRSIWSVPVSHTEGDWMHEVKRACETIPEMEEINIDAIDVDCAVRSLSNWKSPGPDGLHNFWLKWLRSSHVVLASQFQSAVESGTLPAFMTTGVTHLLHKTGSTLEPNNYRPITCLPTVYKLLTSILRAKINNHINNNSIMCASQNGCRNGARGTKELLLIDMAISQQARRNRKDLTACWIDYKKAFDSVPHTWLLRVLELYKVNTTLCTFLRSCMGQWRTVLFYPGCRQALGGGVPITIERGIFQGDSLSPLWFCLALNPLSTLLVNSGLGYRLRREGQMVSHLFYMDDLKLFAHTNPQLITLLKITETFSNSIKMAFGVDKCAVIHVKRGRVVESEGIQLSDSTNLRSLLVTETYKYLGMSQALCINEVDMKQMLQERFFGRLKKVLNSLLSGGNKVRACNSWVMPLLMYSFGILKWTQTELDTIDRKVRTQLTAFRMHHPRSSVMRLYIPRKCGGRGFLNAKTLHNREVCNLRDYFLKSNVDMHRDVVNVDTGLTPLGLAKENWRRPTIVSTDSRREVWQSKELHGRFYRALHRPEVDLLASVSWLRFSDLFGETEGFVCAIADEVIKTNNYRKYIMRDGTIDICRACHQPGESLRHITSGCSRLANGEYLHRHNQVARIIHQRLALKYNLVEFEVPYYRYVPEPVLENTHITLYWDRSIITDRTVVANKPDIVVIDRSERRALIVDVTIPHDENLVKAEKDKQVKYLDLAHEVVDMWSVDSAIIVPIVVSVNGLIAKSLDQHLKRLGLDGWVKGQMQKAVLLDTARIVRKFLSLEP

SEQ ID NO: 30183 - protein, 1199 aa, Schrankia costaestrigalis
MMITRAKARIAQATPPDSSLSSASQTVENVPDSVEASSSSSSDEFFSPPSSPTPVLRRGRGRPPIGLGSRAPQASNRVPAVGGNVHRMKWTSTINENVMRAYFVATEGGTNLTAYRDRMLSLFQELEPAVNVSTQRLSDQVRAIQRCHLLNDTVLDRIRSDILSNLTISTPPPVTTQVNTIIPLSQPIELNSSETIDCEVTNVSIQYNDQLRSALECTIGEYRFMEPDKRPRLPRLPTHKKNIALVCALDSLLSNYFDNSENLSDAHSILYCGAVTACRVAHIRFPTDDIATRLRPTVPAWQCRIERRIAEARALIGKLICFRSGNTRPRVMRFVTRAFADTNIDRRDYILHVTERIDFLKQKVYAWANRIKRFKKRMERYTQNRAFQRDERWVYRNWERPVQDSGDRQLPDADATTNFWRSIWSVPVSHVEGDWIGDVEKACERIHQMEPVTISTLDVSSAVRRLPNWKSAGPDGLHNFWLKWLHSSHACLASHFQSSLETGTLPDFITTGETHLLYKSGSSTDPKNYRPITCLPTIYKLLTSILRKKISLHIQHNSIMYISQNGCRNEARGTKEQLLIDTTISEQVRRNRKDLSTCWIDYKKAYDSVPHTWLLRVLELYKIDATLCTFLRTCMTKWNTVLFYSGCRQGLGNNVPIQIKRGIFQGDSFSPLWFCLALNPLSTLLECSGLGYRLKRHGQVISHLLYMDDLKLFAPTKSQLLVLLKETETFSNSIKMEFGVDKCAVMHVKRGKVVESDELQLSDTIKLRCLSPSDTYKYLGMSQALCIAETDMKQQLRDRFFARLKKVLNSLLTGGNKVRAYNGWVMPVLMYSFGILRWTQTELETLDRKVRTLLTAHRMHHPRSSEMRLYIPRKSGGRGFLSAKTLHNREVYNLREYFLSVDADIHRDVVSVDVGLTPLCLGKENWRKPIIHTIDDRKEVWKSKELHGRFYRTLNGPDVDTLASVSWLRFGDLFGETEGFVFAIMDEVVMTKNYRKYILKDGTVDICRACHCPGESLRHIVSGCSRLANGEYLHRHNQVARIVHQQLALKYHLVDAEVPYYKYVPDPVLENSSVTLYWDRSIITDRTIVANKPDIVVIDRSERRAMIIDITIPHDENLVKAEKDKQTKYLDLAHEVVDMWHVDSAIIVPIVLSVNGLIPKSLYQHLRRLSLDSWIIGLMQKAVLLDTARIVRRFLSLEP

SEQ ID NO: 30184 - protein, 1198 aa, Schrankia costaestrigalis
MITRAASRRALLTPPDSSLSSASQSVQNVPDSVEASSSSSSDEFFSPPSSPTPVLRRGRGRPPIGLGSRAPQASNRVPAAGGNVHRMKWTSSINENVMRAYFVATEGGTNLTAYRDRMLSLFQELEPAVNVSTQRLSDQVRAIQRCHLLNDTVLDRIRSDILSNLTISTPPSVTTQVNTTIPLSQPTELNSFETIDCEVTNVSIQYNDQLRSSLECAIREYRFMDPGRRPRIPRLPTHKQNIALVCALDSLLLNYFDNSENLGDAHSILYCGAVAACRVAHIKFPVDDIATRLRPTVPAWQCRIERRIAEARALIGKLICFRSGNTRPRVMRFVTRAFSETNIDRRDYMLHVTERIDFLKQKVYAWANRIKRFKKRMERYTQNRAFQKDERWVYRNWERPVLGSVDMQLPDADATNDFWRSIWSVPVNHTEGAWIGDVEKACEHIHQMEPVVITTEDVTCAVRRLPNWKSAGPDGLHNFWLKWLHSSHACLASHFQSSLETGTLPDFITTGVTHLLYKSGSSTDPKNYRPITCLPTIYKLLTSILRKKISLHIQENSIMCISQNGCRNEARGTKEQLLIDTTISEQVRRNRKDLSTCWIDYKKAYDSVPHTWLLRVLELYKIDATLCTFLRTCMTKWNTVLFYSGCRLGLGNEVPIQIKRGIFQGDSLSPLWFCLALNPLSTLLECSGLGYRLKRHGQVISHLLYMDDLKLFAPTKSQLLVLLKETETFSNSIKMEFGVDKCAVMHVKRGKVVESDELQLSDTIKLRCLSPSDTYKYLGMSQALCITETDMKQQLRDRFFARLKKVLNSLLTGGNKVRAYNSWVMPVLMYSFGILKWTQTELEALDRKVRTLLTAHRMHHPRSSVMRLYIPRKSGGRGYLSAKTLHNREVYNLREYFLTVDADIHRDVVSVDVGLTPLSLGKENWRKPIIQTIDDRKEIWKSKELHGRFYRALNRPDVDTLSSVSWLRFGDLFGETEGFVFAIMDEVVMTKNYRKYILKDGTVDICRACHCPGESLRHIVSSCSRLANGEYLHRHNQVARIVHQQLALKYHLVDAEVPYYKYVPDPVLENSSVTLYWDRSIITDRTIVANKPDIVVIDRSERRAMIIDITIPHDENLVKAEKDKQTKYLDLAHEVVDMWNVDSAIIVPIVLSVNGLIPKSLYQHLRRLSLDSWIIGLMQKAVLLDTARIVRRFLSLEP

SEQ ID NO: 30185 - protein, 1197 aa, Vanessa atalanta
MLTRARQRAHNNPSPDSPLSSASQAQDPTQGTNLVSAIASSSSDEYFSPPMSPTPVRRAGRRRPPTGLGARGQPASNGVPAFGGGVQRMRWTQPINENVMRAYYGATEGGTNLTVYRVRMLSLFQALEPAINVSAQRLSDQVRVILRNNRLSDTVLDRIRSEVSNSDVTSAPSQPVVEGPLPVTPQGSDHVDEGEGDMAITTSKYSDQLRSALGDAIREYRNTSAELRPRLPRLPMTKRNRDLVCTLDSLLADYFESSENLEDTHSILFCAAVAACRVAGVTFEDTERATRPKAAAPAWQSRIEKRINETRVLIGKLYCFKEGNTRPRVMRYVGRAFLGTGIIPQEYPSHVVERIDFLKQKVYAWASRIRRYRRRVDRYYLNRMFQNDQRWVYRTWERLDQGVSDGCRPDDDATSTFWRNIWSVPVDHIEGDWMREVRQACEPLEAMGEISIASEDVAAAVRSVPNWKSPGPDGLHSFWLKWLRSSHECLASQFQSALESGSLPQFLTTGVTHLLHKSGSATDPKNYRPITCLPTVYKLLTSILRDKINSHIQNNSILSVSQNGCRGGSQGTKELLLIDMIISQQVRRFRKSLSTCWIDYKKAYDSVPHTWLLRVLELYKLDTTLCSFLRSCMGQWRTVLRYPGCRTIHGNDEPIRIERGIFQGDSLSPLWFCLALNPLSTLLEGSRLGYRLRRGGKVISHLLYMDDLKLFAPSGSQLMELLKVTETFSNSIRMEFGVDKCAVMHVERGEIMESDGLQLSDSINFRSLSANESYKYLGVSEALGINVTDMKQSLQERFFGRLKKVLKSLLSGGNKVRAFNGWVMPVLMYSFGILKWTQKELDALDRRVRVLLTAYRMHHPRSSVMRLYIPRRCGGRGFLNAKTLHNREVYKLREYFLHTDLDMHRDVVTMDKGLTPLSLGKENWRKPVVLSTENRKGVWKSKELHGRFYRALHGPDVDFMASVSWLRFGNLFGETEGFVCAIMDEVIMTNNYRKYIVRDGTVDICRACHTPGESLRYIISGCSRLANGEYLHRHNQVAKIIHQQLALRYDLVVSEVPYYRYVPDPVLENGRITLYWDRSIITDRAVVANKPDIVVIDRSERCTIIVDVTIPHDENLVKAEKDKQIKYLDLAHEVVDMWDVDTAVIVPIVVSANGLMAKSLDQHLKRLSLGSWVKGLMQKAVLLGTARIVRKFLSLEP

SEQ ID NO: 30186 - protein, 1197 aa, Sesamia nonagrioides
MLTRSAARRARPPSPDSLLSSALPPPVSSATVSAVTTPAATVASSSSDEYFSPPTTPPPVRRRGGRRPPDCLGPRGPPASDRVPAPGGSVQPMRWTQSINENVMRSYYGATEGGTNLTAYRVRMLSLFQVLEPAVNVSAQRLSDQVRVIQRNHMLDDTVLDRLRNEMQSSRIIAHQSQSAEIPPQPTIYADEGSNDRATNVSTQCNEELRNALEAAIREYRSISAELRPRLPRLPMHNRNRALMGALDAQLSNYFDTCEDLTDTHSILYCAAVAACRVAHVKFPSDSRATRPKPVVPAWQHRIERRIGGARALIGKLICFREGNTRPRVMRFVRRAFSGTNTSPQNYMARVTERIDFLKQKVYAWANRIRRYKRRVERYTQNRTFQSNERRVYRDWERPEQGVTDTCLPDDDAMCSFWRSIWSVPVSHTEGDWAQDVERACDPIPEKGAITICPQDVAHAVRPLPNWKSPGPNGLHNFWIKWFPRSHARLASQFQTALVSGSLPQFLTTGITHLLHKSGSTAEPKNYRSITCLPTVYKVLTSILKTKINKHIDSNSILSASQNGCRSGSRGTKELLLIDMAISQQVRRSRKDLSTCWIDYKKAYDSVPHTWLMRVLELYKVDATLRTFLMTCMRTWRTVLRYPGCRNIQRNSEPIRIEREIFQGDSLSPLWFYLALNPLSTLLEDSGLGYRLRRGGQVISHLLYMDDLKLFAPNNSQLNELLKITEIFSSSIRMEFGVDKCAIMHVKRGEIMEPVGTQLTSSTNLRALSASETYKYLGMSEALGINVTDMKQSLKERFFGRLKKVLNSLLSGGNKVRAFNGWVMPVLMYSFGILKWTQTELDALDQRVRTLLTANRLHHPRSSVMRLYIPRKCGGRGFLNAKTLHNREICSLRDYFLETDVGMHRDVVAADKGLTPLSLAKENWRKPVGLDTNDRMEVWKSKELHGRFFRALHGPDVDFQASVAWLRFGDLFGETEGFVFAIMDEVMMTNNYRRFIVKDGTVDICRACHRPGESIRHVISGCSRLANGEYLHRHNLVARIIHQQLALKYKLVESEVPYYRYMPDPVLENGHITLYWDRSIITDRTIIANKPDIVLVDRSERRAMIVDIIIPHDENLVKAEKDKQTKYLDLAHEVVDMWAVDSAIIVPIVVTANGLIAKSLDQHLRRLSLGSWIKGLIQKAVLLDTARIVRKFLSLEP

SEQ ID NO: 30187 - protein, 961 aa, Trichoplusia ni
MHNRNKALMGVLDSLLSSYFGNSEDLGDTHSLLYCAAVAACRVAGVTFRDNTAARPKQAAPAWQCRIEKRVAEARTLIAKLVAFRGGNTRPRVMRFVKRAFAGTNISPSEYTARVTERIDFFKQKVCAWASRIRRYKTRVDRFHQNRMFQRDQRWVYRSWEQPASEEGAGRLPDDVATNLFWRSIWSAPVTHSEGDWIRDVEQSCERIEEMGAIYISPQDVANAVRPLANWKAPGPDGLHNFWLKWLPSSHGCLASQFQSAVDSGVLPQFFTTGSTHLLHKTGSTTDPKNYRPITCLPTIYKLLTSILREKINDHIERFSIMSASQNGCRNGSRGTKELLLIDMTICQQVRRSKKGVSTCWIDYKKAYDSVPHAWLMRVLELYKINTTLRTFLKSCMGQWTTVLHYPGCRDIQKSGQLIRIERGIFQGDSLSPLWFCLALNPLSTLLENSRLGYSLRRGSQVISHLLYMDDLKLFASNKLQLMKLLKITESFSNSIRMEFGVDKCAVMHVKRGGIVESQGIQLSDSINLRSLSSTETYKYLGMSEALGINVADMKQSLQTRFFGRLNKVLKSSLSGGNKVRAFNGWVMPVIMYSFGILKWTQTELDALDRRVRTLLTANRMHHPRSSVMRLYIPRKCGGRGFLNAKTLHNREVCNLREYFLRVDVGMHRDVVAVDKGFTPLSLGKENWHKPIVLSVKDRKDVWQSKELHGRYYRTLHGADVDFLASVAWLRFGDLFGETEGFVCAIMDEVIMTNNYRKYIIKDGTVDICRACHCPGESLRHIVSGCSRLANGEYLHRHNQVARIIHQQLALKYKLVESEVPYYKYVPDPVLESGHITLYWDRSIITDRTIVANKPDIVVIDRSERRTMIVDITIPHDENLVKAEKEKQLKYLDLAHEVVDLWEVDSAIIVPIVVSANGLIAKSLDQHLRRLSLGVWVKGLIQKAVLLDTARIVRRFLSLEP

SEQ ID NO: 30188 - protein, 869 aa, Spodoptera frugiperda
MRFVRRAFVGTETSPHEYMSRVTERIDFLKQKVYAWANRIRRYKKRVERYTQNRMFQRDQRWVYRNWERSNQDVTDGRRPDDEATNTFWRNIWSVPVSHTEDDWICDVERRCETVPEMEEVIITSSDVSSAACSVPNWKSPGPDGLHNFWLKWFTSSHARLASQFQAALEAGSLPQFRATTGVTHLLHKSGSSTEPKNYRPITCLPTVYKLLTSILRTKITKHIEKHSIMSVSQNGCRKGSRGTKELLLIDMVVSQQVRRSRKNLSTCWIDYKKAYDSVPHTWLMRVLELYKIDATLRAFLQSCMRQWSTVLCYPGCRQIQGSEEPVRIVRGIFQGDSLSPLWFCLALNPLSTLLEASGLGYPLRRRGLVISHLLYMDDLKLFAPNNKLLMELLKITEKFSSSIRMEFGVDKCAVMHVKRGGIVESEGLELSDFTKLRVLSANDTYKYLGMSEGLGINGPDMKQSLRERFFGRLNKVLKSSLSGGNRVRAYNGWVMPVLMYSFGILKWTQTELDALDRRVRTLLTANRMHHPRSSIMRLYIPRKCGGRGLLNAKTLHNREVCNLREYFLKVNEGMHREVVAVDNGFTPLSLAKENWRKPVVLSVNDRKEVWHSKELHGRFFRALHGPSVDFLASVSWLRFSNLFGETEGFVCAIMDEVILTNNYRKYIIKDGTVDICRACHSPGESIRHIISGCGRLANGEYLHRHNQVAKIIHQQLALHYQLVEFEVPYYKYVPDPVLENGHITLYWDRSIITDRTIVANKPDIVVIDRQARRAMIVDITIPHDENLVKAEKDKQIKYLDLAHEVVDMWSVDSAIIVPIVVSANGLIPNSLDNHLRRLGLGGWIKGLMQKAVLLETARIVRRFLSLEP

SEQ ID NO: 30189 - protein, 1197 aa, Aptinothrips rufus
MLTRARRRYAHPPSPDSSLSSASPSPEPNHEELPVTVVASSSSDDYFSPPTSPPPVRRPRRGRPPTGLGARGQQTPGRVPATGGCARRMKWTQTINENVMRAYYGATEGGTNLTAYRERMLSMFQVLEPSVNVSAQRLSDQVRVIQRNRRLDEAALDRLRSEALRNRVVPAPPQEVAQTPIASQNVIPTTPAAGVEDDRVEQVSTQCNERLRSALEDAIREYRFAPLKPKLPRLPMCGKNRALVSALDSLLKTYFESSENLYDTHSILYCGAVAACRVANVRFSNLDAAVRPKPAVPAWQCRIERRISEARVLIGKLSCFRDGNTRPRVMRFVRRAFVGTETSPHEYMSRVTERIDFLKQKIYAWANRIRRYKKRVERYTQNRMFQRDQRWVYRNWERSNQDVTDGRRPDDEATNTFWRNIWSVPVSHTEDDWICDVERRCETVPEMEEVIITSSDVSSAACSVPNWKSPGPDGLHNFWLKWFTSSHARLASQFQAALEAGSLPQFLTTGVTHLLHKSGSSTEPKNYRPITCLPTVYKLLTSILRTKITKHIEKHSIMSVSQNGCRKGSRGTKELLLIDMVVSQQVRRSRKNLSTCWIDYKKAYDSVPHTWLMRVLELYKIDATLRAFLQSCMRQWSTVLCYPGCRQIQGSEEPVRIVRGIFQGDSLSPLWFCLALNPLSTLLEASGLGYPLRRRGLVISHLLYMDDLKLFAPNNKQLMELLKITEKFSSSIRMEFGVDKCAVMHVKRGGIVESEGLELSDFTKLRALSANDTYKYLGMSEGLGINGPDMKQSLRERFFGRLNKVLKSSLSGGNKVRAYNGWVMPVLMYSFGILKWTQTELDTLDRRVRTLLTANRMHHPRSSIMRLYIPRKCGGRGLLNAKTLHNREVCNLREYFLKVNEGMHREVAAVDNGFTPLSLAKENWRKPVVLSVNDRKEVWHSKELHGRFFRALHGPSVDFLASVSWLRFSNLFGETEGFVCAIMDEVILTNNYRKYIIKDGTVDICRACHSPGESIRHIISGCGRLANGEYLHRHNQVAKIIHQQLALHYQLVEFEVPYYKYAPDPVLENGHITLYWDRSIITDRTIVANKPDIVVIDRQARRTMIIDITIPHDENLVKAEKDKQIKYLDLAHEVVDMWNVDSAIVVPIVVSANGLIPNSLDNHLRRLGLGGWIKGLMQKAVLLETARIVRRFLSLEP

SEQ ID NO: 30190 - protein, 1200 aa, Spodoptera litura
MLTRARCRQDAPPPPPDSSLSSASPSPEPRSAGSPVTAVASSSSDDYFSPPTSPPPVRRPGRGRPPTGLGTRGHQALGRVPATGGCVRRMKWSQTINENVMRAYYGATEGGTNLTAYRERMLSMFQVLEPSVNVSAQRLSDQVRVIQRNCRLDEATLDRLRLEALRNRVVPAPPQLVAQTPVVSQCVTSTTPIVGVEDDRVEQVSTQCNERLRSALEDAVREYRLAPSDLRPKLPRLPMCRKNRALVSALDSLLKKYFESSENLYDTHSILYCGAVAACRVANVRFPNLDAAVRPKPAVPAWQYRIERRISEARVLIGKLSCFREGNTRPRVMRFVRRAFVGTETSPHEYLSRVTERIDFLKQKVYAWANRIRRYKKRVERYTQNRMFQRDQRWVYRDWERSNQDVADGRRPDDDATNTFWRNIWSVPVSHTEGDWMFDVKRRCETIPEMEEVEITSSDVASAACSVPNWKSPGPDGLHNFWIKWFKSSHVRLALHFQAALETGSLPQFLTTGVTHLLHKSGSSTEPKNYRPITCLPTVYKLLTSILRTKITKHIEQNSIMSVSQNGCREGSRGTKELLLIDMVVSQQVRRSRKDLSTCWIDYKKAYDSVPHTWLLKVLELYKIHASLRAFLESCMRQWSTVLCYPGCRQIQGNEEPVRIVRGIFQGDSLSPLWFCLALNPLSTLLEDSGLGYPLRRRGLVISHLLYMDDLKLFAPNKKQLMELLNITEKFSSSIRMEFGVDKCAVMHVKRGGIVESEGLELSDFTKLRSLSANDTYKYLGMSEGLGINGLDMKQSLQERFFGRLNKVLKSSLSGGNKVRAFNGWVMPVLMYSFGILKWTQTELDTLDRRVRTLLTANRMHHPRSSVMRLYIPRKCGGRGLLNAKTLHNREVCSLREYFLKVNEGMHREVAAVDNGFTPLSLAKENWRKPVVLSVNDRKEVWHSKELHGRFFRALHGPSVDFLASVSWLRFSNLFGETEGFVCAIMDEVILTNNYRKYIIKDGTVDICRACHSPGESIRHIISGCGRLANSEYLHRHNQVAKIIHQQLALHYRLVESEVPYYKYVPDPVLENDHITLYWDRSIITDRTIIANKPDIVVIDRQVRRTMIIDITIPHDENLVKAEKDKQIKYLDLAHEVVDMWNVDSAIIVPIVVSANGLIPNSLDNHLRRLALGSWVKGLIQKAVLLETARIVRRFLSLEP

SEQ ID NO: 30191 - protein, 1197 aa, Vanessa cardui
MLTRARQRAHNYPSPDPPLSSASQTQDPAQGSSLVSAVASSSSDEYFSPPTSPTPVRRAGRRRPPTGLGARGQPVSNRVPASGGGVQRMRWTQPINESVMRAYYGATKGGTNLTAYRVRMLSLFQALEPAVNVSAQRLSDQVRVILRNNRLSDTVLDRIRSETCNSGVTSGPSTPVVEEPLPTVPQGPEHDDEGGGDMAITTSKYSDHLRSALGDAIREYRNTPAELRPRLPHLPMTKRNRDLVCTLDSLLTDYFESSENLEDTHSILFCAAVAACRVAGVTFEDTERATRPKAVAPAWQSRIEKRINETRVLIGKLYCFKEGNMRPRVMRFVGRAFLGTGIGPQEYPSHVVERIDFLKQKVYAWASRIRRYRRRVDRYHLNRKFQSDQRWVYRTWERLDQDVSDGCRPNDDATNTFWRNIWSVPVDHIEGDWMLEVRQACEPLEVMGKISIASEDVAAAVRSVSNWKSPGPDGLHNFWLKWLRSSHECLASQFQSALESGSLPQFLTTGVTHLLHKSGSATDPKNYRPITCLPTVYKLLTAILRDKINSHIQNNSILSVSQNGCRGGSRGTKELLLIDMTISQQVRRSRKSLSTCWIDYKKAYDSVPHTWLLRVLELYKLDTTLCSFLRSCMGQWRTVLRYPGCRTIHGNDEPIRIERGIFQGDSLSPLWFCLALNPLSTLLESSRLGYRLRREGKVISHLLYMDDLKLFAPSDSQLMELLKVTETFSNSIRMEFGVDKCAVMHVKRGEIMESDGLQLSDSINFKSLSANESYKYLGMSEALGINVTDMKQSLQERFFGRLKKVLKSLLSGGNKVRAFNGWVMPVLMYSFGILKWTQKELDTLDRKVRVLLTAYRMHHPRSSVMRLYMPRRCGGRGFLNAKTLHNREVYKLREYFLHTDLDMHRDVVTMDKGLTPLSLGKENWRKPVVLSTENRKEVWKCKELHGRFYRVLHGPDVDFMASVSWLRFGNLFGETEGFVCAIMDEVIMTNNYRKYIVRDGTVDICRACHTPGESLRHIISGCSRLANGEYLYRHNQVAKIIHQQLVLRYGLVVSEVPYYRYVPDPVLENGHITLYWDRSIITDRTVVANKPDIVVIDRSERRTIIVDITIPHDENLVKAEKDKQIKYLDLAHEVVDMWDVDTAVIVPIVVSANGLMAKSLDQHLKRLSLGSWVKGLMQKAVLLGTARIVRKFLSLEP

SEQ ID NO: 30192 - protein, 1197 aa, Vanessa cardui
MLTRARQQAHNNPSPDPPLSSASQAQDPAQGSSLVSAAASSSSDEYFSPPTSPTPVRRAGRRRPPTGLGARGQPVSNRVPASGGGVQRMRWTQPINENVMRAYYGATKGGTNLTAYRVRMLSLFQALEPAVNVSAQRLSDQVRVILRNNRLSDTVLDRIRSETCNSDVTSGPSTPVVEEPLPAIPQGPEHDDEGGGDMTITKSKYSDHLRSALGDAIREYRNTPAELRPRLPRLPMTKRNRDLVCTLDSLLADYFESSENLEDTHSILFCAAVAACRVAGVTFEDTERTTRPKAVAPAWQSRIEKRINETRVLIGKLYCFKEGNTRPRVMRFVGRAFLGTGISPQEYPSHVVERIDFLKQKVYAWASRIRRYRRRVDRYHLNRKFQSDQRWVYRTWERLDQDVSDGCRPDDDATNTFWRNIWSVPVDHIEGDWMLEVRQACEPLEVMGKISIASEDVAAAVRSVANWKSPGPDGLHNFWLKWLRSSHECLASQFQSALESGSLPQFLTTGVTHLLHKSGSATDPKNYRPITCLPTVYKLLTAILRDKINSHIQNNSILSVSQNGCRGGSRGTKELLLIDMTISQQVRRSRKSLSTCWIDYKKAYDSVPHTWLLRVLELYKLDTTLCSFLRSCMGQWRTVLRYPGCRTIHGNDESIRIERGIFQGDSLSPLWFCLALNPLSTLLESSRLGYRLRRGGKVISHLLYMDDLKLFAPSDSQLMELLKVTETFSNSIRMEFGVDKCAVMHVKRGEIMESDGLQLSDSINFKSLSANESYKYLGMSEALGINVTDMKQSLQERFFGRLKKVLKSLLSGGNKVRAFNGWVMPVLMYSFGILKWTQKELDALDRKVRVLLTAYRMHHPRSSVMRLYIPRRCGGRGFLNAKTLHNREVYKLREYFLHTDLDMHRDVVTMDKGLTPLSLGKENWHKPVVLSTENRKEVWKSKELHGRFYRALHGPDVDFMASVSWLRFGNLFGETEGFVCAIMDEVIMTNNYRRYIVRDGTVDICRACHTPGESLRHIISGCSRLANGEYLHRHNQVAKIIHQQLALRYGLVVSEVPYYKYVPDPVLENGHITLYWDRSIITDRTVVANKPDIVVIDRSERRTIIVDITIPHDENLVKAEKDKQIKYLDLAHEVVDMWDVDTAVIVPIVVSANGLMAKSLDQHLKRLSLDSWVKGLMQKAVLLGTARIVRKFLSLEP

SEQ ID NO: 30193 - protein, 1191 aa, Trichoplusia ni
MLTRRRAARLPSPGSSPSSASQMPPGRGPAPAVAVASSSSDEYYSPPTSPTPVRRPGRRRPPSSLAPSGQPASNRAPAPGGVVQRMKWTRPMNENVMRAYYGATGGGTNLTAYRARMLSLFRTLEPDVDVSAQHLSDQVRVIQRNHRLDDATLDRLRSEVQTSPVVVTPSIAEAPAASALPANPADGGDDDGAITVSTQCSDHIRSTLEQAVLEYRSTPRDQRPRLPRLPMHNRNKALMGVLDSLLSSYFGNSEDLGDTHSLLYCAAVAACRVAGVTFRDNTAARPKQAAPTWQCRIEKRVAEARTLIAKLVAFRGGNTRPRVMRFVKRAFAGTNISPSEYTARVTERIDFFKQKVCAWASRIRRYKTRVDRFHQNRMFQRDQRWVYRSWEQPASEEGAGRLPDDVATNLFWRSIWSAPVTHSEGDWIRDVEQSCERIEEMGAIDISPQDVANAVRPLANWKAPGPDGLHNFWLKWLPSSHGCLASQFQSAVDSGVLPQFFTTGSTHLLHKTGSTTDPKNYRPITCLPTIYKLLTSILREKINDHIERFSIMSASQNGCRNGSRGTKELLLIDMTICQQVRRSKKGVSTCWIDYKKAYDSVPHAWLMRVLELYKINTTLRTFLKSCMGQWTTVLHYPGCRDIQKSGQLIRIERGIFQGDSLSPLWFCLALNPLSTLLENSRLGYSLRRGSQVISHLLYMDDLKLFASNKLQLMKLLKITESFSNSIRMEFGVDKCAVMHVKRGGIVESQGIQLSDSINLRSLSSTETYKYLGMSEALGINVADMKQSLQTRFFGRLNKVLKSSLSGGNKVRAFNGWVMPVIMYSFGILKWTQTELDALDRRVRTLLTANRMHHPRSSVMRLYIPRKCGGRGFLNAKTLHNREVCNLREYFLRVNVGMHRDVVAVDKAFTPLSLGKENWHKPVVMSVKDRKDVWQSKELHGRYYRTLHGADVDFLASVAWLRFGDLFGETEGFVCAIMDEVIMTNNYRKYIIKDGTVDICRACHSSGESLRHIVSGCSRLANGEYLHRHNQVARIIHQQLALKYKLVESEVPYYKYVPDPVLESGHITLYWDRSIITDRTIVANKPDIVVIDRSERRTMIVDITIPHDENLVKAEKEKQLKYLDLAHEVVDLWEVDSAIIVPIVVSANGLIAKSLDQHLRRLSLGVWVKGLIQKAVLLDTARIVRRFLSLEP

SEQ ID NO: 30194 - protein, 1197 aa, Spodoptera frugiperda
MLTRARRRYAHPPSPDSSLSSASPSPEPNHEELPVTVVASSSSDEYFSPPTSPPPARRPRRGRPPTGLGARGQQTPGRVPATGGCARRMKWSQTINENVMRAYYGATEGGTNLTAYRERMLSMFQVLEPSVNVSAQRLSDQVRVIQRNRRLDEAALDRLRSEALRNRVVPAPPQEVAQTPIASQNVIPTTPAAGVEDDRVEQVSTQCNERLRSALEDAIREYRFAPLKPKLPRLPMCGKNRALVSALDSLLKTYFESSENLYDTHSILYCGAVAACRVANVRFSNLDAAVRPKPAVPAWQCRIERRISEARVLIGKLSCFREGNTRPRVMRFVRRAFVGTETSPHEYMSRVTERIDFLKQKVYAWANRIRRYKKRVERYTQNRMFQRDQRWVYRNWERSNQDVTDGRRPDDEATNTFWRNIWSVPVSHTEDDWICDVERRCETVPEMEEVIITSSDVSSAACSIPNWKSPGPDGLHNFWLKWFTSSHSRLASQFQAALEAGSLPQFLTTGVTHLLHKSGSSTEPKNYRPITCLPTVYKLLTSILRTKITKHIEKHSIMSVSQNGCRKGSRGTKELLLIDMVVSQQVRRSRKNLSTCWIDYKKAYDSVPHTWLMRVLELYKIDATLRAFLQSCMRQWSTVLCYPGCRQIQGSEEPVRIVRGIFQGDSLSPLWFCLALNPLSTLLEASGLGYPLRRRSLVISHLLYMDDLKLFAPNNKQLMELLKITEKFSSSIRMEFGVDKCAVMHVKRGGIVESEGLELSDFTKLRALSANDTYKYLGMSEGLGINGPDMKQSLRERFFGRLNKVLKSSLSGGNKVRAYNGWVMPVLMYSFGILKWTQTELDTLDRRVRTVLTANRMHHPRSSIMRLYIPRKCGGRGLLNAKTLHNREVCNLREYFLKVNEGMHREVAAVDNGFTPLSLAKENWRKPVVLSVNDRKEVWHSKELHGRFFRALHGPSVDFLASVSWLRFSNLFGETEGFVCAIMDEVILTNNYRKYIIKDGTVDICRACHSPGESIRHIISGCGRLANGEYLHRHNQVAKIIHQQLALHYQLVEFEVPYYKYAPDPVLENGHITLYWDRSIITDRTIVANKPDIVVIDRQARRTMIIDVTIPHDENLVKAEKDKQIKYLDLAHEVVDMWNVDSAIVVPIVVSANGLIPNSLDNHLRRLGLGGWIKGLMQKAVLLETARIVRRFLSLEP

SEQ ID NO: 30195 - protein, 1196 aa, Spodoptera frugiperda
MLTRARRRRGAPPPSPDSSLSSASPSPEPNHEPVTAVASSSSDEYFSPPTSPPPVRRPRRGRPPTGLGARGQQTPGRVPAAGGCARRMKWTQTINENVMRAYYGATEGGTNLTAYRERMLSMFQVLEPSVNVSAQRLSDQVRVIQRNRRLDEAALDRLRSEALRNRVVPAPPQEVVQTPTASQNVTPTTPAAGVEDDRVEQVSTQCNERLRSALEDAIREYRFAPLKPKLPRLPMCGRNRALVSALDSLLKTYFESSENLYDTHSILYCGAVAACRVANVRFSNLDAAVRPKPAVPAWQCRIERRISEARVLIGKLSCFRDGNTRPRVMRFVRRAFVGTETSPHEYMSRVTERIDFLKQKIYAWANRIRRYKKRVERYTQNRMFQRDQRWVYRNWERSNQDVTDGRRPDDEATNTFWRNIWSVPVSHTEDDWICDVERRCETVPEMEEVIITSSDVSSAACSVPNWKSPGPDGLHNFWLKWFTSSHARLASQFQAALEAGSLPQFLTTGVTHLLHKSGSSTEPKNYRPITCLPTVYKLLTSILRTKITKHIEKHSIMSVSQNGCRKGSRGTKELLLIDMVVSQQVRRSRKNLSTCWIDYKKAYDSVPHTWLMRVLELYKIDATLRAFLQSCMRQWSTVLCYPGCRQIQGSEEPVRIVRGIFQGDSLSPLWFCLALNPLSTLLEASGLGYPLRRRGLVISHLLYMDDLKLFAPNNKQLMELLKITEKFSSSIRMEFGVDKCAVMHVKRGGIVESEGLELSDLTKLRALSANDTYKYLGMSEGLGINGPDMKQSLRERFFGRLNKVLKSSLSGGNKVRAYNGWVMPVLMYSFGILKWTQTELDTLDRRVRTLLTANRMHHPRSSIMRLYIPRKCGGRGLLNAKTLHNREVCNLREYFLKVNEGMHREVAAVDNGFTPLSLAKENWRKPVVLSVNDRKEVWHSKELHGRFFRALHGPSVDFLASVSWLRFSNLFGETEGFVCAIMDEVILTNNYRKYIIEDGTVDICRACHSPGESIRHIISGCGRLANGEYLHRHNQVAKIIHQQLALQYQLVEFEVPYYKYVPDPVLENGHITLYWDRSIITDRTIVANKPDIVVIDRQARRTMIIDITIPHDENLVKAEKDKQIKYLDLAHEVVDMWNVDSAIVVPIVVSANGLIPNSLDNHLRRLGLGGWIKGLMQKAVLLETARIVRRFLSLEP

SEQ ID NO: 30196 - protein, 1126 aa, Spodoptera litura
MMLTRARSKQGAPPPPPDSSLSSASPSPDPSPAGSPVTAVASSSSDDYFSPPTSPTPVRRPGRGRPPTGLGARGQQAPGRVPATGGCVRRMKWSQTINENVMRSYYGATEGGTNLTAYRERMLSIFQVLEPSINVSAQRLSDQVRVIQRNRRLDEAALDRLRLEALRNRVVPAPPQSVAQTPIVSQCVTPTTPIVGVEDDRVEQVSTQCNERLRSALEDAVREYRLAPSNLRPKLPRLPMCRKNRALVSALDSLLKKYFESSENLYDTHSILYCGAVAACRVANVRFPNLDAAVRPKPAVPAWQYRIERRISEARVLIGKLSCFREGNTRPRVMRFVRRAFVGTETSPHEYLSRVTERIDFLKQKVYAWANRIRRYKKRVERYTQNRMFQRDQRWVYRDWERSNQDVADGRRPDDDATNTFWRNIWSVPVSHTEGDWMFDVKRRCETIPEMEEVEITSSDVASAACSVPNWKSPGPDGLHNFWIKWFKSSHVRLALHFQAALETGSLPQFLTTGVTHLLHKSGSSTEPKNYRPITCLPTVYKLLTSILRTKITKHIEQNSIMSVSQNGCREGSRGTKELLLIDMVVSQQVRRSRKDLSTCWIDYKKAYDSVPHTWLLKVLELYKIHASLRAFLESCMRQWSTVLCYPGCRQIQGNEEPVRIVRGIFQGDSLSPLWFCLALNPLSTLLEDSGLGYPLRRRGLVISHLLYMDDLKLFAPNKKQLMELLNITEKFSSSIRMEFGVDKCAVMHVKRGGIVESEGLELSDFTKLRSLSANDTYKYLGMSEGLGINGPDMKQSLQERFFGRLNKVLKSSLSGGNKVRAFNGWVMPVLMYSFGILKWTQTELDTLDRRVRTLLTANRMHHPRSSVMRLYIPRKCGGRGLLNAKTLHNREVCSLREYFLKVNEGMHREVAAVDNGFTPLSLAKENWRKPVVLSVNDRKEVWHSKELHGRFFRALHGPSVDFLASVSWLRFSNLFGETEGFVCAIMDEVILTNNYRKYIIKDGTVDICRACHSPGESIRHIISGCGRLANSEYLHRHNQVAKIIHQQLALHYRLVESEVPYYKYVPDPVLENDHITLYWDRSIITDRTIIANKPDIVVIDRQVRRTMIIDITIPHDENLVKAEKD

SEQ ID NO: 30197 - protein, 867 aa, Eilema depressum
MRFVNRAFSGTGISPRDYAARVIERIDFLKQKVYAWANRLKRYKKRCDRYTLNRTFQRDERWVYRSWERPDLVDDVHLPDIDATNTFWRNIWSVPVAHTEGDWMREVKRSCEAIETMEPVIITEDDIACVVRSLPNWKAAGPDGLHNFWLKWLRSSHVRLASQFQSALESGSLPNFMTTGVTHLLFKSGSAVDPRNYRPITCLPTVYKLLTSVLRVKITNHITGNSILSYSQNGCRSGARGTKEHLIIDAAINQQVRRNRKDMATCWIDYKKAYDSVPHTWLLRVLELYKVDTTLCTFLKACMGQWRTALRYPGCRHIRDDGELIKIERGIFQGDSLSPLWFCLALNPLSTLLEDSGLGYCLRRGGQFISHLLYMDDLKLYAPNSLRLMKLLKVTETFSNSIRMEFGVDKCAVMQVKRGGIVESEGIELSDSTKLRSLSANDTYKYLGMSQALGINEAGMKQSLRERFFCRLKKVLNSLLSGGNKVRAYNDWVIPVLTYSFGILRWTQTELEALDRRVRTLLTAYRMHHPRSSVMRLYIPRKCGGRGFLNVKNLHNREIYNLREHFLKVDVDVHRDVVAVDNGLTPLALAKENWRKPAILSIDDRKEVWRSKELHGRFYRALYGPDIDLKASVSWLRFGDLFGETEGFVCAITDEVVMTNNYRRYILKDGTVDICRACHRPGESLRHIISGCSRLANGEYLHRHNLVARIIHQQLALKYKLVDSEVPYYRYVPDPVLDVGRVTLYWDRSIITDRTILANKPDIVVIDRSERRAIIVDITIPHDENLVKAEKDKQIKYLDLAREVVDMWAVDSAIVVPIVVSAHGLIAKSLDQHLKRLALDSWIKGLMQKAVLLDTARIVRRFLSLEP

SEQ ID NO: 30198 - protein, 974 aa, Eilema depressum
MNYQIRPRLPRLPVHKRNIALVCALDSRLPIYLDNSEDLGDTHSILYCAAIAACRVAGVKFPESDTTTRPSSGKPRWQCRIERRITEARALIGKLICFRSGNTRPRVMRFVNRAFSGTGISPRDYAARVIERIDFLKQKVYAWANRIKRYKKRCDRYTLNRTFQRDERWVYRSWERPDLVDDVHLPDIDATNTFWRNIWSVPVAHTEGDWMREVKRSCEAIETMEPVIITEDDIACVVRSLPNWKAAGPDGLHNFWLKWLRSSHVRLASQFQSALESGSLPNFMTTGVTHLLFKSGSAADPRNYRPITCLPTVYKLLTSVLRVKISNHITGNSILSYSQNGCRSGARGTKEHLIIDAAINQQVRRNRKDMATCWIDYKKAYDSVPHTWLLRVLELYKVDTTLCTFLKVCMGQWRTALRYPGCRHIRDDGEPIKIERGIFQGDSLSPLWFCLALNPLSTILEDSGLGYCLRRGGQVISHLLYMDDLKFYAPNSLRLMELLKVTETFSNSIRMEFGVDKCAVMHVKRGGIVESEGVELSDSTKLRSLSANDTYKYLGISQALGVNEAGMKQSLRERFFCRLKKVLNSLLSGGNKVCAYNDWVIPVLTYSFGILRWTQTELEALDRRVRTLLTAYRMHHPRSSVMRLYIPRKCGGRGFLNVKNLHNREICNLREYFLKVDVDVHRDVVAVDNGLTPLALAKENWRKRAILSTDDRKEVWRSKELHGRFYRALYGSDIDFKASVSWLRFGDLFGETEGFVCAITDEVVMTNNYRRYILRDGTVDICRACHRPGESLRHIISGCSRLANGEYLHRHNLVARIIHQQLALKYKLVDSEVPYYRYVPDPVLDDGRVTLYWDRSIITDRTILTNKPDIVVIDRLERRAIIVDITIPHDENLVKAEKDKQIKYLDLAREVVDMWSVDSAIIVPIVVSAHGLIAKSLDQHLKRLALDSWVKGLMQKAVLLDTARIVRRFLSLEP

SEQ ID NO: 30199 - protein, 868 aa, Vanessa cardui
MRFVGRAFLGTGISPQEYPSHVVERIDFLKQKVYAWASRIRRYRRRVDRYHLNRKFQSDQRWVYRTWERLDQDVSDGCRPDDDATNTFWRNIWSVPVDHSEGDWMLEVRQACEPLEVMGKISIASEDVAAAVRSVSNWKSPGPDGLHSFWLKWLRSSHECLASQFQSALESGSLPQFLTTGVTHLLHKSGSATDPKNYRPITCLPTVYKLLTAILRDKINNHIQNNSILSVSQNGCRGGSRGTKELLLIDMTISQQVRRSRKSLSTCWIDYKKAYDSVPHTWLLRVLELYKLDTTLCSFLRSCMGQWRTVLRYPGCRTIHGSDEPIRIERGIFQGDSLSPLWFCLALNPLSTLLESSGLGYRLRRGGKVISHLLYMDDLKLFAPSDSQLMELLKVTETFSNSIRMEFGVDKCAVMHVKRGEIMESEGLQLSDSINFKSLSANESYKYLGMSEALGINVTDMKQSLQERFFGRLKKVLKSLLSGGNKVRAFNGWVMPVLMYSFGILKWTQKELDALDRRVRVLLTTYRMHHPRSSVMRLYIPRRYGGRGFLNAKTLHNREVYKLREYFLHTDLDMHRDVVIMDKGLTPLSLGKENWRKPVVLSTENRREVWKSKELHGRFYRALHGPDVDFMASVSWLRFGNLFGETEGFVCAIMDEVIMTNNYRKYIVRDGTVDICRACHTPGESLRHIISGCSRLANGEYLHRHNQVAKIIHQQLALRYGLVVSEVPYYRYVPDPVLENGHITLYWDRSIITDRTVVANKPDIVVIDRSERRTIIVDITIPHDENLVKAEKDKQIKYLDLAHEVVDMWDVDTAVIVPIVVSANGLMAKSLDQHLKRLSLGSWVKGLMQKAVLLGTARIVRKFLSLEP

SEQ ID NO: 30200 - protein, 1191 aa, Trichoplusia ni
MLTRRRAARLPSPGSSPSSASQLPPGRGPAPAVAVASSSSDEYYSPPTSPTPVRRPGRRRPPSSLAPSGQPASNRAPAPGGVVQRMKWTRPMNENVMRAYYGATGGGTNLTAYRARMLSLFRALEPDVDVSAQRLSDQVRVIQRYHRLDDATLDRLRSEVQTSPVVVTPSIAEAPAASALPANPADGGDDDGAITVSTQCSDHIRSTLEQAVLEYRSTPRDQRPRLPRLPMHNRNKALMGVLDSLLSSYFGNSEDLGDTHSLLYCAAVAACRVAGVTFRDNTAARPKQAAPAWQCRIEKRVAEARTLIAKLDAFRGGNTRPRVMRFVKRAFAGTNISPSEYTARVTERIDFFKQKVCAWASRIRRYKTRVDRFHQNRMFQRDQRWVYRSWEQPASEEGAGRLPDDVATNLFWRSIWSAPVTHSEGDWIRDVEQSCERIEEMGAIDISPQDVANAVRPLANWKAPGPDGLHNFWLKWLPSSHGCLASQFQSAVDSGVLPQFFTTGSTHLLHKTGSTTDPKNYRPITCLPTIYKLLTSILREKINDHIERFSIMSASQNGCRNGSRGTKELLLIDMTICQQVRRSKKGVSTCWIDYKKAYDSVPHAWLMRVLELYKINTTLRTFLKSCMGQWTTVLHYPGCRDIQKSGQLIRIERGIFQGDSLSPLWFCLALNPLSTLLENSRLGYSLRRGSQVISHLLYMDDLKLFASNKLQLMKLLKITESFSNSIRMEFGVDKCAVMHVKRGGIVESQGIQLSDSINLRSLSSTETYKYLGMSEALGINVADMKQSLQTRFFGRLNKVLKSSLSGGNKVRAFNGWVMPVIMYSFGILKWTQTELDALDRRVRTLLTANRMHHPRSSVMRLYIPRKCGGRGFLSAKTLHNREVCNLREYFLRVDVGMHRDVVAVDKGFTPLSLGKENWHKPIVLSVKDRKDVWQSKELHGRYYRTLHGADVDFLASVAWLRFGDLFGETEGFVCAIMDEVIMTNNYRKYIIKDGTVDICRACHCPGESLRHIVSGCSRLANGEYLHRHNQVARIIHQQLALKYKLVESEVPYYKYVPDPVLESGHITLYWDRSIITDRTIVANKPDIVVIDRSERRTMIVDITIPHDENLVKAEKEKQLKYLDLAHEVVDLWEVDSAIIVPIVVSANGLIAKSLDQHLRRLSLGVWVKGLIQKAVLLDTARIVRRFLSLEP

SEQ ID NO: 30201 - protein, 962 aa, Spodoptera frugiperda
MCGKNRALVSALDSLLKTYFESSENLYDTHSILYCGAVAACRVANVRFSNLDAAVRPKPAVPAWQCRIERRISEARVLIGKLSCFREGNTRPRVMRFVRRAFVGTETSPHEYMSRVTERIDFLKQKVYAWANRIRRYKKRVERYTQNRMFQRDQRWVYRNWERSNQDVTDGRRPDDEATNTFWRNIWSVPVSHTEDDWICDVERRCETVPEMEEVIITSSDVSSAACSVPNWKSPGPDGLHNFWLKWFTSSHSRLASQFQAALEAGSLPQFLTTGVTHLLHKSGSSTEPKNYRPITCLPTVYKLLTSILRTKITKHIEKHSIMSVSQNGCRKGSRGTKELLLIDMVVSQQVRRSRKNLSTCWIDYKKAYDSVPHTWLMRVLELYKIDATLRAFLQSCMRQWSTVLCYPGCRQIQGSEEPVRIVRGIFQGDSLSPLWFCLALNPLSTLLEASGLGYPLRRRGLVISHLLYMDDLKLFAPNNKQLMELLKITEKFSSSIRMEFGVDKCAVMHVKRGGIVESEGLELSDFTKLRALSANDTYKYLGMSEGLGINGPDMKQSLRERFFGRLNKVLKSSLSGGNKVRAYNGWVMPVLMYSFGILKWTQTELDTLDRRVRTLLTANRMHHPRSSIMRLYIPRKCGGRGLLNAKTLHNREVCNLREYFLKVNEGMHREVAAVDNGFTPLSLAKENWRKPVVLSVNDRKEVWHSKELHGRFFRALHGPSVDFLASVSWLRFSNLFGETEGFVCAIMDEVILTNNYRKYIIKDGTVDICRACHSPGESIRHIISGCGRLANGEYLHRHNQVAKIIHQQLALHYQLVEFEVPYYKYAPDPVLENGHITLYWDRSIITDRTIVANKPDIVVIDRQARRTMIIDITIPHDENLVKAEKDKQIKYLDLAHEVVDMWNVDSAIVVPIVVSANGLIPNSLDNHLRRLGLGGWIKGLMQKAVLLETARIVRRFLSLEP

SEQ ID NO: 30202 - protein, 962 aa, Spodoptera litura
MCRKNRALVSALDSLLKKYFESSENLYDTHSILYCGAVAACRVANVRFPNLDAAVRPKPAVPAWQYRIERRISEARVLIGKLSCFREGNTRPRVMRFVRRAFVGTETSPHEYLSRVTERIDFLKQKVYAWANRIRRYKKRVERYTQNRMFQRDQRWVYRDWERSNQDVADGRRPDDDATNTFWRNIWSVPVSHTEGDWMFDVKRRCETIPEMEEVEITSSDVASAACSVPNWKSPGPDGLHNFWIKWFKSSHVRLALHFQAALETGSLPQFLTTGVTHLLHKSGSSTEPKNYRPITCLPTVYKLLTSILRTKITKHIEQNSIMSVSQNGCREGSRGTKELLLIDMVVSQQVRRSRKDLSTCWIDYKKAYDSVPHTWLLKVLELYKIHASLRAFLESCMRQWSTVLCYPGCRQIQGNEEPVRIVRGIFQGDSLSPLWFCLALNPLSTLLEDSGLGYPLRRRGLVISHLLYMDDLKLFAPNKKQLMELLNITEKFSSSIRMEFGVDKCAVMHVKRGGIVESEGLELSDFTKLRSLSANDTYKYLGMSEGLGINGLDMKQSLQERFFGRLNKVLKSSLSGGNKVRAFNGWVMPVLMYSFGILKWTQTELDTLDRRVRTLLTANRMHHPRSSVMRLYIPRKCGGRGLLNAKTLHNREVCSLREYFLKVNEGMHREVAAVDNGFTPLSLAKENWRKPVVLSVNDRKEVWHSKELHGRFFRALHGPSVDFLASVSWLRFSNLFGETEGFVCAIMDEVILTNNYRKYIIKDGTVDICRACHSPGESIRHIISGCGRLANSEYLHRHNQVAKIIHQQLALHYRLVESEVPYYKYVPDPVLENDHITLYWDRSIITDRTIIANKPDIVVIDRQVRRTMIIDITIPHDENLVKAEKDKQIKYLDLAHEVVDMWNVDSAIIVPIVVSANGLIPNSLDNHLRRLALGSWVKGLIQKAVLLETARIVRRFLSLEP

SEQ ID NO: 30203 - protein, 1109 aa, Vanessa tameamea
MRWTQSINENVMRSYYGATEGGTNLTAYRVRMLSLFQALEPAINVSAQRLSDQVRVILRNNRLSDTVLDRIRSEMCNSGFTSAPSQPVVEGPLPATPQGPDHDDEDEGDMAITTSKYSDQLRSALGDAIREYRNTPAELRPRLPRLPMTKRNRDLVCTLDSLLADYFESSEDLEDTHSILFCAAVAACRVAGVTFEDTERATRPKAATPAWQSRIEKRINKTRVLIGKLYCFKEGNTRPRVMRFVGRAFLGTGISPQEYPSHVVERIDFLKQKVYAWASRIRRYRRRVDRYYLNRMFQSDQRWVYRTWERLDQGVSDGCRPDDDATNIFWRNIWSVPVDHIEGDWMREVRQACEPLEAMGEISIASEDVAAAVRSVPNWKSPGPDGLHSFWLKWLRSSHDCLASQFQSALESGSLPQFLTTGVTHLLHKSGSATDPKNYRPITCLPTVYKLLTSILRDKINSHIQNNSILSVSQNGCRGGSRGTKELLLIDMTISQQVRRFRKSLSTCWIDYKKAYDSVPHTWLLRVLELYKLDTTLCSFLRSCMGQWRTVLRYPGCRTIHSNDEPIRIEQGIFQGDSLSPLWFCLALNPLSTLLECSRLGYCLWRGGKVISHLLYMDDLKLFAPSGSQLMELLKVTETFSNSIGMEFGVDKCAVMHVKRGEIMESDGLQLSDSINFRSLSANESYKYLGVSEALGINVTDMKQSLQERFFGRLKKVLKSLLSGGNKVRAFNGWVMPVLMYSFGILKWTQKELDALDRRVRVLLTAYRMHHPRSSVMRLYIPRRCGGRGFLNAKTLHNREVYKLREYFLHTHLDMHRDVVTMDKGLTPLSLGKENWRKPVVLSTENRKGVWKSKELHGRFYRALHGPDVDFMASVSWLRFGNLFGETEGFVCAIMDEVIMTNNYRKYIVRDGTVDICRACHTPGESLRHIISGCSRLANGEYLHRHNQVAKIIHQQLALRYGLVVSEVPYYRYVPDPVLENGRITLYWDRSIITDRTVVANKPDIVVIDRSERRTIIVDVTIPHDENLVKAEKDKQIKYLDLAHEVVDMWDVDTAIIVPIVVSANGLMAKSLDQHLKRLSLGSWVKGLMQKAVLLGTARIVRKFLSLGP

SEQ ID NO: 30204 - protein, 1198 aa, Eilema depressum
MLTRSQARKNASAPVTSPDSSLSSAAQPSPTEPAASSSSSSDEFFSPPTSPTPVRRPGRGRPPASLEPRRPPASNRAPAAGGNVRRMRWTTSINENVMRAYFAATGGGTNLTAYRDRMLLVFQGLEPTLNVSAQRLSDQVRAIQRCHLLDSSVLERIRSDLQNSDVIPPPPQAPLLTPRVQGFTQVTEPDSGDGELDNVAFSVSTQYNDLIRNTLECAIRDYRSMHYQIRPRLPRLPVHKRNIALVCALDSLLPIYLDNSENLGDTHSILYCAAIAACRVAGIRFPESNTTTRPNSGKPRWQCRIECRIAEARALIGKLICFRSGNTRPRVMRFVNRAFSGTGISPRDYAARVIERIDFLKQKVYAWANRLKRYKKRCDRYTLNRTFQRDERWVYRSWERPDLVDDVHLPDIDATNIFWRNIWSVPVAHTEGDWMREVKRSCEAIETMEPVIITEDDIACVVRSLPNWKAAGPDGLHNFWLKWLRSSHVRLASQFQSALESGSLPNFMTTGVTHLLFKSGSAVDPRNYRPITCLPTVYKLLTSVLRVKITNHITGNSILSYSQNGCRSGARGTKEHLIIDAAINQQVRRNRKDMATCWIDYKKAYDSVPHTWLLRVLELYKVDTTLCTFLKACMGQWRTALRYPGCRHIRDDGELIKIERGIFQGDSLSPLWFCLALNPLSTLLEDSGLGYCLRRGGQVISHLLYMDDLKLYAPNSLRLMELLKVTETFSNSIRMEFGVDKCAVMQVKRGGIVESEGIELSDSTKLRSLSANDTYKYLGMSQALGINEAGMKQSLRERFFCRLKKVLNSLLSGGNKVRAYNDWVIPVLTYSFGILRWTQTELEALDRRVRTLLTAYRMHHPRSSVMRLYIPRKCGGRGFLNVKNLHNREIYNLREYFLKVDVDVHRDVVAVDNGLTPLALAKENWRKPAILSIDDRKEVWRSKELHGRFYRALYGPDIDLKASVSWLRFGDLFGETEGFVCAITDEVVMTNNYRRYILKDGTVDICRACHRPGESLRHIISGCSRLANGEYLHRHNLVARIIHQQLALKYKLVDSEVPYYRYVPDPVLDDGRVTLYWDRSIITDRTILANKPDIVVIDRSERRAIIVDITIPHDENLVKAEKDKQIKYLDLAREVVDMWAVDSAIVVPIVVSAHGLIAKSLDQHLKRLALDSWIKGLMQKAVLLDTARIVRRFLSLEP

SEQ ID NO: 30205 - protein, 1199 aa, Vanessa cardui
MLTRARQRAHKNPSPDPPLSSASQAQDPAQGNNLMSAAASSSSDEYFSPPTSPTPVRRAGRRRPPTGLGARGQPVSNGVPASGGGVQRMRWTQSINENVMRAYYGATEGGTNLTAYRVRMLSMFQALEPAINVSAQRLSDQVRVILRNNRLSDTVLDRIRSEQCNGGVTSAPSQPVVQGPLPAIPQGPCHDHDDEGEGDMAITTSKYSDQLRSALEDAIREYRDIPAELRPRLPRLPMTKRNRDLVCTLDSLLADYFESSENLEDTHSILFCAAVAACRVAGVTFEDTERATRPKTVAPAWQSRIEKRINETRVLIGKLCCFKEGNTRPRVMRFVGRAFLGTGISPQEYPSHVVERIDFLKQKVYAWASRIRRYRRRVDRYYLNRMFQSDQRWVYRTWERLDQGVSDGCRPDDDATNTFWRNIWSVPVDHIEGDWMREVRQACEPLEAMGEISIASEDVAAAVRSVPNWKSPGPDGLHSFWLKWLRSSHECLASQFQSALESGSLPQFLTTGVTHLLHKSGSATDPKNYRPITCLPTVYKLLTSILRDKINSHIENNTILSVSQNGCRGGSRGTKELLLIDMTISQQVRRSRKSLSTCWIAYKKAYDSVPHTWLLRVLELYKLDTTLCSFLRSCMGQWRTVLRYPGCRTIHSNDEPIRIERGIFQGDSLSPLWFCLALNPLSTLLESSRLGYRLRRGGKVISHLLYMDDLKLFAPSDSQLVELLKVTETFSNSIRMEFGVDKCAVMHVKRGEIVESDGLQLSDSINFKSLSANESYKYLGMSEALGINVTDMKQSLQERFFGRLKKVLKSLLSGGNKVRAFNGWVMPVLMYSFGILKWTQKELDALDRRVRVLLTTYRMHHPRSSVMRLYIPRRCGGRGFLNAKTLHNREVYKLREYFLHTDLDMHRDVVTIDKGLTPLSLGKENWRKPVVLSTENRKEVWKSKELHGRFYRALHGPDVDFMASVSWLRFGNLFGETEGFVCAIMDEVIMTNNYRKYIVRDGTVDICRACHTPGESLRHIISGCSRLANGEYLHRHNQVAKIIHQQLALRYGLVVSEVPYYRYVPDPVLENGHITLYWDRSIITDRTVVANKPDIVVIDRSERRTIIVDITIPHDENLVKAEKDKQIKYLDLAHEVVDMWDVDTAVIVPIVVSANGLMAKSLDQHLKRLSLGSWVKGLMQKAVLLGTARIVRKFLSLEP

SEQ ID NO: 30206 - protein, 1112 aa, Schrankia costaestrigalis
MKWTSTINENVMRAYFVATEGGTNLTAYRDRMLSLFQELEPAVNVSTQRLSDQVRAIQRCHLLNDTVLDRIRSDILSNLTISTPPPVTTQVNTIIPLSQPIELNSSETIDCEVTNVSIQYNDQLRSALECTIGEYRFMEPDKRPRLPRLPTHKKNIALVCALDSLLSNYFDNSENLSDAHSILYCGAVTACRVAHIRFPTDDIATRLRPTVPAWQCRIERRIAEARALIGKLICFRSGNTRPRVMRFVTRAFADTNIDRRDYILHVTERIDFLKQKVYAWANRIKRFKKRMERYTQNRAFQRDERWVYRNWERPVQDSGDRQLPDADATTNFWRSIWSVPVSHVEGDWIGDVEKACERIHQMEPVTISTLDVSSAVRRLPNWKSAGPDGLHNFWLKWLHSSHACLASHFQSSLETGTLPDFITTGETHLLYKSGSSTDPKNYRPITCLPTIYKLLTSILRKKISLHIQHNSIMYISQNGCRNEARGTKEQLLIDTTISEQVRRNRKDLSTCWIDYKKAYDSVPHTWLLRVLELYKIDATLCTFLRTCMTKWNTVLFYSGCRQGLGNNVPIQIKRGIFQGDSFSPLWFCLALNPLSTLLECSGLGYRLKRHGQVISHLLYMDDLKLFAPTKSQLLVLLKETETFSNSIKMEFGVDKCAVMHVKRGKVVESDELQLSDTIKLRCLSPSDTYKYLGMSQALCIAETDMKQQLRDRFFARLKKVLNSLLTGGNKVRAYNGWVMPVLMYSFGILRWTQTELETLDRKVRTLLTAHRMHHPRSSVMRLYIPRKSGGRGFLSAKTLHNREVYNLREYFLSVDADIHRDVVSVDVGLTPLCLGKENWRKPIIHTIDDRKEVWKSKELHGRFYRTLNGPDVDTLASVSWLRFGDLFGETEGFVFAIMDEVVMTKNYRKYILKDGTVDICRACHCPGESLRHIVSGCSRLANGEYLHRHNQVARIVHQQLALKYHLVDAEVPYYKYVPDPVLENSSVTLYWDRSIITDRTIVANKPDIVVIDRSERRAMIIDITIPHDENLVKAEKDKQTKYLDLAHEVVDMWHVDSAIIVPIVLSVNGLIPKSLYQHLRRLSLDSWIIGLMQKAVLLDTARIVRRFLSLEP

SEQ ID NO: 30207 - protein, 1015 aa, Schrankia costaestrigalis
MNEFISSRGIPDSKILSFAYEIFSDDALHWYRSVRNNVNSWSELCGSLKQDFSPHNYDFKLMSEIRLRSQGQGENITLYVAKMQGLFSRLDNPVPDGEKLEILLNNIRPCYTNCLLTTTITDIPSLVSVCRNFEKYNSRSRDFSEPPTVTSNTLAPEFAYNNNNSNKHVTERIDFLKQKVYAWANRIKRFKKRMERYTQNRAFQRDERWVYRNWERPVQDSGDRQLPDADATTNFWRSIWSVPVSHVEGDWIGDVEKACERIHQMEPVTISTLDVSSAVRRLPNWKSAGPDGLHNFWLKWLHSSHACLASHFQSSLETGTLPDFITTGETHLLYKSGSSTDPKNYRPITCLPTIYKLLTSILRKKISLHIQHNSIMYISQNGCRNEARGTKEQLLIDTTISEQVRRNRKDLSTCWIDYKKAYDSVPHTWLLRVLELYKIDATLCTFLRTCMTKWNTVLFYSGCRQGLGNNVPIQIKRGIFQGDSFSPLWFCLALNPLSTLLECSGLGYRLKRHGQVISHLLYMDDLKLFAPTKSQLLVLLKETETFSNSIKMEFGVDKCAVMHVKRGKVVESDELQLSDTIKLRCLSPSDTYKYLGMSQALCIAETDMKQQLRDRFFARLKKVLNSLLTGGNKVRAYNGWVMPVLMYSFGILRWTQTELETLDRKVRTLLTAHRMHHPRSSVMRLYIPRKSGGRGFLSAKTLHNREVYNLREYFLSVDADIHRDVVSVDVGLTPLCLGKENWRKPIIHTIDDRKEVWKSKELHGRFYRTLNGPDVDTLASVSWLRFGDLFGETEGFVFAIMDEVVMTKNYRKYILKDGTVDICRACHCPGESLRHIVSGCSRLANGEYLHRHNQVARIVHQQLALKYHLVDAEVPYYKYVPDPVLENSSVTLYWDRSIITDRTIVANKPDIVVIDRSERRAMIIDITIPHDENLVKAEKDKQTKYLDLAHEVVDMWHVDSAIIVPIVLSVNGLIPKSLYQHLRRLSLDSWIIGLMQKAVLLDTARIVRRFLSLEP

SEQ ID NO: 30208 - protein, 1193 aa, Trichoplusia ni
MLTRLQARAARLPSPDSSPSSASQLPPDRGSATAVAVASSSSDEYYSPPTSPTPVHRQGRRRPPSSLAPSGQPASNRAPAPGGVVQRMKWTRPMNENVMRAYYGATGGGTNLTAYRARMLSLFQALEPDVDVSAQRLSDQVRVIQRNRRLDDATLDRLRSEVRISPIVSAPSLTVVPVHGTPPTNFDGEHDDGAITVSTQCNDLIRSTLEDVIREYRTSPPGLRPRVPRLPMHNKNKAIMGVLDSLLPTYFESSVDLTDTHSILYCAALTACRVANVAIRPNNNATRPKPAVPAWQCRIEQRIAGARTLIAKLKTFKEGNSRPRVMRFVKRAFAGTNISPSEYFSRVTERIDFYKQKVYAWANRIRRYKCRVERYHLNRMFQKDERWVYRTWERPGLGVDDGSLPDDDATKSFWRSIWSEPVSHAECDWMREVEQSCEHIQEMGAITISPQDVATATRSLSNWKAPGPDGLQNYWLKWLRSSHDYLASQFQSVIESGKLPLFFTTGSTHLLHKTGSTTDPKNYRPITCLPSIYKLLTSILREKITNHINTYSIMSASQNGCRSGSRGTKELLLIDMSICQQVRRSKKDLSTCWIDYKKAYDSVPHTWLLRVLELYKINATLRTFLMTCMWQWSTVLRYPGCREILQSGEPIKIERGIFQGDSLSPLWFCLALNPLSTLLENSRLGYSLRRGSQVISHLLYMDDLKLFACTKLQLMKLLKITESFSNSIRMEFGVDKCAVMHVKRGGIVESQGIQLSDSINLRSLSSTETYKYLGMSEALGINVVDMKQSLQTRFFGRLNKVLKSSLSGGNKVRAFNGWVMPVIMYSFGILKWTQTELDALDRRVRTLLTANRMHHPRSSVMRLYIPRKCGGRGFLNAKTLHNREICNLREYFLRMDVGMHRDVVAVDKAFTPLSLGKENWRKPVVLSVKDRKDVWQSKELHGRYYRTLHGADVDFLASVAWLRFGDLFGETEGFVCAIMDEVILTNNYRKYIIKDGTVDICRACHCPGESLRHIVSGCSRLANGEYLHRHNQVARIIHQQLALKYKLVESEVPYYRYVPDPVLENGHVTLYWDRSIITDRTIVANKPDIVVIDRSERRAMIVDVTIPHDENLVKAEKEKQMKYLDLAHEVVDLWEVDSAIIVPIVVSVNGLIAKSLDQHLMRLSLGVWVKGLIQRAVLLDTARIVRRFLSLEP

SEQ ID NO: 30209 - protein, 866 aa, Spodoptera exigua
MHQKREPFPFDHHDIVTISKLERIDFLKQKIYAWANRIRRYKKRVERYTQNRMFQSDQRWVYRDWERSSQDVVNGRHPDDETTNSFWRNIWSVPVNHTEADWMCDVKRECETLPEMEEVVITSSDVANAACSVPNWKSPGPDGLHNFLLKSFTSSHDRLASQFQMALEAGSLPQFLTTGITHLLHKSGSYTEPKNYRPITCLLTVYKLFTSILRAKITKHIEKNSIMSVSQNGCRKGSRGTKELLLIDMVISQQVRRSRKDLSTCWIDYKKAYDSVPHTWLMRVLELYKINTTLRTFLQSCMRQWSTVLSYPGCKQIQRSEEPVRIVRGIFQGDSLSPLWFCLALNPLSTLLEASGLGYRLRKKGHVISHLLYMDDLKLFAPNKEELMELLKITKNFSSSIRMEFGVDKCAVMHIKRGGIVESESLELSDFTKLRSLSANDTYMYLGMSEGLGINGPHMKQSLQERFFGRLNKVLKSSLSGGNKVRAFNGWVMPVLIYSFGILKWTQTELDTLDRRVRTLLTANRMHHPRSSVMRLYIPRKCGGRGFLNAKTLHNREVCNLREHFLKVDEDMHREVVTVDKGFTPLSLAKENWCKPVVLSVNDRKAVWSSKELHGRFFRALHGPDIDFLASVAWLRFSNLFGETEGFVCAIMDEVILTNNYRKYIMKDGTVDICRACHSSGESIRHIISGCGRLANGEYLHRHNQVAKIIHQQLAFKYRLVESEVPYYRYVPDPVLEKDHITLYWDRSIITDRTIVANKPDIVVVDRLARRTTIIDVAIPHDENLVKAEKDKQLKYLDLAHEVVDMWNVDSAIVVPIVVSANGLVLKSLDNHLKRLTLGGWIKGLIQKAVLLETARIVRRFLSLEP

SEQ ID NO: 30210 - protein, 1197 aa, Spodoptera frugiperda
MLTRARRRYAHPPSPDSSLSSASPSPEPNHEELPVTVVASSSSDEYFSPPTSPPPVRRPRRGRPPTGLGARGQQTPGRVPATGGCARRMKWSQTINENVMRAYYGATEGGTNLTAYRERMLSMFQVLEPSVNVSAQRLSDQVRVIQRNRRLDEAALDRLRSEALRNRVVPAPPQEVAQTPTASQNVTPTTPAAGVEDDRVEQVSTQCNERLRSALEDAIREYRFAPLKPKLPRLPICGKNRALLSALDSLLKTYFESSENLYDTHSILYCGAVAACRVANVRFSNLDAAVRPKPAVPAWQCRIERRISEARVLIGKLSCFREGNTRPRVMRFVRRAFVGTETSPHEYMSRVTERIDFLKQKVYAWANRIRRYKKRVERYTQNRMFQRDQRWVYRNWERSNQDVTDGRRPDDEATNTFWRNIWSVPVSHTEDDWICDVERRCETVPEMEEVIITSSDVSSAACSVPNWKSPGPDGLHNFWLKWFTSSHARLASQFQAALEAGSLPQFLITGVTHLLHKSGSSTEPKNYRPITCLPTVYKLLTSILRTKITKHIEKHSIMSVSQNGCRKGSRGTKELLLIDMVVSQQVRRSRKNLSTCWIDYKKAYDSVPHTWLMRVLELYKIDATLRAFLQSCMRQWSTVLCYPGCRQIQGSEEPVRIVRGIFQGDSLSPLWFCLALNPLSTLLEASGLGYPLRRRGLVISHLLYMDDLKLFAPNNKQLMELLKITEKFSSSIRMEFGVDKCAVMHVKRGGIVESEGLELSDFTKLRTLSANDTYKYLGMSEGLGINGPDMKQSLRERFFGRLNKVLKSSLSGGNKVRAYNGWVMPVLMYSFGILKWTQTELDALDRRVRTLLTANRMHHPRSSTMRLYIPRKCGGRGLLNAKTLHNREVCNLREYFLKVNEGMHREVAAVDNGFTPLSLAKENWRKPVVLSVNDRKEVWHSKELHGRFFRALHGPSVDFLASVSWLRFSNLFGETEGFVCAIMDEVILTNNYRKYIIKDGTVDICRACHSPGESIRHIISGCGRLANGEYLHRHNQVAKIIHQQLALHYQLVEFEVPYYKYVPDPVLENGHITLYWDRSIITDRTIVANKPDIVVIDRQARRAMIVDITIPHDENLVKAEKDKQIKYLDLAHEVVDMWSVDSAIIVPIVVSANGLIPNSLDNHLRRLGLGGWIKGLMQKAVLLETARIVRRFLSLEP

SEQ ID NO: 30211 - protein, 1199 aa, Spodoptera frugiperda
MLTRARRCYAHPPSPDSSLSSASPSPEPNHEELPVTVVASSSSDEYFSPPTSPPPARRPRRGWPPTGLGARGQQTSGRVPATGGCARRMKWSQTINENVMRAYYGATEGGTNLTAYRERMLSMFQVLEPSVNVSAQRLSDQVRVIQRNRRLDEAALDRLRSEALRNRVVPAPPQEVAQTPIASQNVIPTTPAAGVEDDRVEQVSTQCNERLRSALEDAIREYRFAPLKPKLPRLPMCGKNRALVSALDSLLKTYFESSENLYDTHSILYCGAVAACRVANVRFSNLDAAVRPKPAVPAWQCRIERRISEARVLIGKLSCFREGNTRPRVMRFVRRAFVGTETSPHEYMSRVTERIDFLKQKVYAWANRIRRYKKRVERYTQNRMFQRDQRWVYRNWERSNQDVTDGRRPDDEATNTFWRNIWSVPVSHTEDDWIWSGDVERRCETVPEMEEVIITSSDVSSAACSVPNWKSPGPDGLHNFWLKWFTSSHSRLASQFQAALEAGSLPQFLTTGVTHLLHKSGSSTEPKNYRPITCLPTVYKLLTSILRTKITKHIEKHSIMSVSQNGCRKGSRGTKELLLIDMVVSQQVRRSRKNLSTCWIDYKKAYDSVPHTWLMRVLELYKIDATLRAFLQSCMRQWSTVLCYPGCRQIQGSEEPVRIVRGIFQGDSLSPLWFCLALNPLSTLLEASGLGYPLRRRGLVISHLLYMDDLKLFAPNNKQLMELLKITEKFSSSIRMEFGVDKCAVMHVKRGGIVESEGLELSDFTKLRALSANDTYKYLGMSEGLGINGPDMKQSLRERFFGRLNKVLKSSLSGGNKVRAYNGWVMPVLMYSFGILKWTQTELDTLDRRVRTLLTANRMHHPRSSIMRLYIPRKCGGRGLLNAKTLHNREVCNLREYFLKVNEGMHREVAAVDNGFTPLSLAKENWRKPVVLSVNDRKEVWHSKELHGRFFRALHGPSVDFLASVSWLRFSNLFGETEGFVCAIMDEVILTNNYRKYIIKDGTVDICRACHSPGESIRHIISGCGRLANGEYLHRHNQVAKIIHQQLALHYQLVEFEVPYYKYAPDPVLENGHITLYWDRSIITDRTIVANKPDIVVIDRQARRTMIIDVTIPHDENLVKAEKDKQIKYLDLAHEVVDMWNVDSAIVVPIVVSANGLIPNSLDNHLRRLGLGGWIKGLMQKAVLLETARIVRRFLSLEP

SEQ ID NO: 30212 - protein, 962 aa, Spodoptera litura
MCRKNRALVSALDSLLKKYFESSENLYDTHSILYCGAVAACRVANVRFPNLDAAVRPKPAVPAWQYRIERRISEARVLIGKLSCFREGNTRPRVMRFVRRAFMGTEISPHEYLSRVTERIDFLKQKVYAWANRIRRYKKRVERYTQNRMFQRDQRWVYRDWERSNQDVADGRRPDDDATNTFWRNIWSVPVSHTEGDWMFDVKRKCETIPEMEEVVITSSDVASAACSVPNWKSPGPDGLHNFWIKWLKSSHVRLALHFQAALETGSLPQFLTTGVTHLLHKSGSSTEPKNYRPITCLPTVYKLLTSILRTKITKHIEKNSIMSVSQNGCREGSRGTKELLLIDMVVSQQARRSRKDLSTCWIDYKKAYDSVPHTWLLKVLELYKIDATLRAFLESCMRQWSTVLCYPGCRQIQGNEEPVRIVRGIFQGDSLSPLWFCLALNPLSTLLEDSGLGYPLRRRGLVISHLLYMDDLKLFAPNKKQLMELLNITEKFSSSIRMEFGVDKCAVMHVKRGGIVESEGLELSDFTKLRSLSANDTYKYLGMSEGLGINGPDMKQSLQERFFGRLNRVLKSSLSGGNKVRAFNGWVMPVLMYSFGILKWTQTELDTLDRRVRTLLTANRMHHPRSSVMRLYIPRKCGGRGLLNAKTLHNREVCNLREYFLKVNEGMHREVAAVDNGFTPLSLAKENWRKPVVLSVNDRKEVWHSKELHGRFFRALHGPNVDFLASVSWLRFSNLFGETEGFVCAIMDEVILTNNYRKYIIKDGTVDICRACHSPGESIRHIISGCGRLANSEYLHRHNQVAKIIHQQLALHYRLVESEVPYYKYVPDPVLENDHITLYWDRSIITDRTIVANKPDIVVIDRQVRRTMIIDVTIPHDENLVKAEKDKQIKYLGLAHEVVDMWSVDSAIIVPIVVSANGLIPKSLDIHLRRLALGGWIKGLIQKAVLLETARIVRRFLSLEP

SEQ ID NO: 30213 - protein, 1197 aa, Vanessa tameamea
MLTRARQRAHNKPSSDPPLSSASQTQDPAQGSSLVSAIESSSSDEYFSPPTSPTPVRRAGRRRPPTGLGARGQPASNRVPASGGGVQRMRWTQPINENVMRAYYRATEGGTNLTAYRVRMLSLFQALEPAINVSAQRLSDQVRIILRNNRLSDTVLDRIRSEMCNSGFTSAPSQPVVEGPLPATPQGPDHDDVGEGDMAITTSKYSDQLRSALADAIREYRNTPAELRPRLPRLPMTKRNRDLVCTLDSLLADYFESSENLEDTHSILFCAAVAAYRVAGVTFEDTERAIRPKAAAPAWQSRIEKRINKTRVLIGKLYCFKEGNTRPRVMRFVGRAFLGTGISPQEYPSHVVERIDFLKQKVYAWASRIRRYRRRVDRYYLNRMFQSDQRWVYRTWERLDQGVSDGCRPDDDATNTFWRNIWSVPVDHIEGDWMREVRQACEPLEAMGEISIASEDVASAVRSVPNWKSPGPDGLHSFWLKWLCSSHDCLASQFQSALESGSLPQFLTTGVTHLLHKSGSATDPKNYRPITCLPTVYKLLTSILRDKINSYIQNNSILSVSQNGCRGGSRGTKELLLIDMTISQQVRRFRKSLSTCWIDYKKAYDSVPHTWLLRVLELYKLDTTLCSFLRSCMGQWRTVLRYSGCRTIHGNDEPIRIERGIFQGDSLSPLWFCLALNPLSTLLEGSRLGYCLRRGGKVISHLLYMDDLKLFAPSGSQLMELLKVTETFSNSIRMEFGVDKCAIMHVERGEIMESDGLQLSDSINFRSLSANESYKYLGVSEALSINVTDMKQSLQERFFGRLKKVLKSLLSGGNKVRAFNGWVMPVLMYSFGILKWTQKELDALDRRVRVLLTAYRMHHPRSSVMRLYIPRRCGGRGFLNAKTLHNREVYKLREYFLHTDLDMHRDVVTMDKGLTPLSLGKENWRKPVVLSTENSKGVWKSKELHGRFYRALHGPDVDFIASVSWLRFGNLFGETEGFVCAIMDEVIMTNNYRKYIVRDGTVDICRACHTPGESLRHIISGCSRLANGEYLHRHNQVAKIIHQQLALRYGLVVSEVPYYRYVPDPVLENGCITLYWDRSIITDRTVVANKPDIVVIDRSERRTIIVDVTIPHDENLVKAEKDKQIKYLDLAHEVVDMWDVDTAVIVPIVVSANGLMAKSLDQHLKRLSLGSWVKGLMQKAVLLSTARIVRKFLSLGP

SEQ ID NO: 30214 - protein, 1198 aa, Eilema depressum
MLTRSQARKNASTPVTSPDSSLSSAAQPPPTEPAASSSSSSDEFFSPPTSPTPVRRPGRGRPPASLEPRRPPASNRAPAAGGNVRRMRWTTSINENVMRAYFAATGGGTNLTAYRDRMLLVFQGLEPTLNVSVQRLSDQVRAIQRCHLLDSSVLERIRSDLQNSDVIPPPPQAPLLAPRVQGFTQVTEPDSVDGELDNVAFSVSTQYNDLIRNTLECAIRDYRSMHYQIRPRLPRLPVHKRNIALVCALDSLLPIYLDNSENLGDTHSILYCAAIAACRVAGIRFPEGNTTTRPNSGKPRWQCRIECRIAEARALIGKLICFRSGNTRPRVMRFVNRAFSGTGISPRDYAARVIERIDFLKQKVYAWANRIKRYKKRCDRYTLNRTFQRDERWVYRNWERPDLVGDVHLPDIDATNTFWRNIWSVPVAHTEGDWMREVKRSCEAIEIMEPVIISEDDIACVVRSLPNWKAAGPDGLHNFWLKWLRSSHVRLASQFQSALESGSLPNFMTTGVTHLLYKSGSATDPKNYRPITCLPTVYKLLTSVLRVKIANHITGNSILSYSQNGCRSGARGTKEHLIIDMAVNQQVRRNRKDMATCWIDYKKAYDSVPHTWLLKVLELYKVDTTLCTFLKACMGQWRTALRYPGCRHIRDDGELIKIERGIFQGDSLSPLWFCLALNPLSTLLEDSGLGYCLRRGGQVISHLLYMDDLKLYAPNSLRLMELLKVTESFSNSIRMEFGVDKCAVIQVKRGGIVESEGIELSDSTKLRSLSANDTYKYLGMSQALGINEAGMKQSLRERFFCRLKKVLNSLLSGGNKVRAYNDWVIPVLTYSFGILRWTQTELEALDRRVRTLLTAYRMHHPRSSVMRLYIPRKCGGRGFLNVKNLHNREIYNLREYFLKVDVDVHRDVVAVDNGLTPLALAKENWRKPAILSINDRKEVWRSKELHGRFYRALYGPDVDLKASVSWLRFGDLFGETEGFVCAITDEVVMTNNYRRYILKDGTVDICRACHRPGESLRHIISGCSRLANGEYLHRHNLVARIIHQQLALKYKLVDSEVPYYRYVPDPVLDDGRVTLYWDRSIITDRTILANKPDIVVIDRLERRAIIVDITIPHDENLVKAEKDKQIKYLDLAREVVDMWAVDSAIVVPIVVSAHGLIAKSLDQHLKRLALDSWIKGLMQKAVLLDTARIVRRFLSLEP

SEQ ID NO: 30215 - protein, 1197 aa, Vanessa cardui
MLTRARQQAHNNPSPDPPLSSASQAQDPAQGSSLVSAAASSSSDEYFSPPTSPTPVRRAGRRRPPTGLGARGQPVSNRVPASGGGVQRMRWTQPINENVMRAYYGATKGGTNLTAYRVRMLSLFQALEPAVNVSAQRLSDQVRVILRNNRLSDTVLDRIRSETCNSDVTSGPSTPVVEEPLPAIPQGPEHDDEGGGDMAITKSKYSDHLRSALGDAIQEYRNTPAELRPRLPRLPMTKRNRDLVCTLDSLLADYFESSENLEDTHSILFCAAVAACRVAGVTFEDTERATRPKAVAPAWQSRIEKRINETRVLIGKLYCFKEGNTRPRVMRFVGRAFLGTGISPQEYPSHVVERIDFLKQKVYAWASRIRRYRRRVDRYHLNRKFQSDQRWVYRTWERLDQDVSDGCRPDDDATNTFWRNIWSVPVDHIEGDWMLEVRQACEPLEVMGKISIASEDVAAAVRSVANWKSPGPDGLHNFWLKWLRSSHECLASQFQSALESGSLPQFLTTGVTHLLHKSGSATDPKNYRPITCLPTVYKLLTAILRDKINSHIQNNSILSVSQNGCRGGSRGTKELLLIDMTISQQVRRSRKSLSTCWIDYKKAYDSVPHTWLLRVLELYKLDTTLCSFLRSCMGQWRTVLRYPGCRTIHGNDEPIRIERGIFQGDSLSPLWFCLALNPLSTLLESSRLGYRLRRGGKVISHLLYMDDLKLFAPSDSQLMELLKVTETFSNSIRMEFGVDKCAVMHVKRGEIMESDGLQLSDSINFKSLSANESYKYLGMSEALGINVTDMKQSLRERFFGRLKKVLKSLLSGGNKVRAFNGWVMPVLMYSFGILKWTQKELDALDRKVRVLLTAYRMHHPRSSVMRLYIPRRCGGRGFLNAKTLHNREVYKLREYFLHTDLDMHRDVVTMDKGLTPLSLGKRNWHKPVVLSTENRKEVWKSKELHGRFYRALHGPDVDFMASVSWLRFGNLFGETEGFVCAIMDEVIMTNNYRRYIVRDGTVDICRACHTPGESLRHIISGCSRLANGEYLHRHNQVAKIIHQQLALRYGLVVSEVPYYKYVPDPVLENGHITLYWDRSIITDRTVVANKPDIVVIDRSERRTIIVDITIPHDENLVKAEKDKQIKYLDLAHEVVDMWDVDTAVIVPIVVSANGLMAKSLDQHLKRLSLDSWVKGLMQKAVLLGTARIVRKFLSLEP

SEQ ID NO: 30216 - protein, 1199 aa, Schrankia costaestrigalis
MMITRAKARIAQATPPDSSLSSASQTVENVPDSVEASSSSSSDEFFSPPSSPTPVLRRGRGRPPIGLGSRAPQASNRVPAVGGNVHRMKWTSTINENVMRAYFVATEGGTNLTAYRDRMLSLFQELEPAVNVSTQRLSDQVRAIQRCHLLNDTVLDRIRSDILSKLTISTPPPVTTQVNTIIPLSQPIELNSSETIDCEVTNVSIQYNDQLRSALECTIGEYRFMEPDKRPRLPRLPTHKKNIALVCALDSLLSNYFDNSENLSDAHSILYCGAVTACRVAHIRFPTDDIATRLRPTVPAWQCRIERRIAEARALIGKLICFRSGNTRPRVMRFVTRAFADTNIDRRDYILHVTERIDFLKQKVYAWANRIKRFKKRMERYTQNRAFQRDERWVYRNWERPVQDSGDRQLPDADATTNFWRSIWSVPVSHVEGDWIGDVEKACERIHQMEPVTISTLDVSSAVRRLPNWKSAGPDGLHNFWLKWLHSSHACLASHFQSSLETGTLPDFITTGETHLLYKSGSSTDPKNYRPITCLPTIYKLLTSILRKKISLHIQHNSIMYISQNGCRNEARGTKEQLLIDTTISEQVRRNRKDLSTCWIDYKKAYDSVPHTWLLRVLELYKIDATLCTFLRTCMTKWNTVLFYSGCRQGLGNNVPIQIKRGIFQGDSFSPLWFCLALNPLSTLLECSGLGYRLKRHGQVISHLLYMDDLKLFAPTKSQLLVLLKETETFSNSIKMEFGVDKCAVMHVKRGKVVESDELQLSDTIKLRCLSPSDTYKYLGMSQALCIAETDMKQQLRDRFFARLKKVLNSLLTGGNKVRAYNGWVMPVLMYSFGILRWTQTELETLDRKVRTLLTAHRMHHPRSSVMRLYIPRKSGGRGFLSAKTLHNREVYNLREYFLSVDADIHRDVVSVDVGLTPLCLGKENWRKPIIHTIDDRKEVWKSKELHGRFYRTLNGPDVDTLASVSWLRFGDLFGETEGFVFAIMDEVVMTKNYRKYILKDGTVDICRACHCPGESLRHIVSGCSRLANGEYLHRHNQVARIVHQQLALKYHLVDAEVPYYKYVPDPVLENSSVTLYWDRSIITDRTIVANKPDIVVIDRSERRAMIIDVTIPHDENLVKAEKDKQTKYLDLAHEVVDMWHVDSAIIVPIVLSVNGLIPKSLYQHLRRLSLDSWIIGLMQKAVLLDTARIVRRFLSLEP

SEQ ID NO: 30217 - protein, 868 aa, Schrankia costaestrigalis
MRFVTRAFSETNIDRRDYMLHVTERIDFLKQKVYAWANRIKRFKKRMERYTQNRAFQKDERWVYRNWERPVLGSVDMQLPDADVTNDFWRSIWSVPVNHTEGAWIGDVEKACEHIHQMEPVVITTEDVTCAVRRLPNWKSAGPDGLHNFWLKWLHSSHACLASHFQSSLETGTLPDFITTGVTHLLYKSGSSTDPKNYRPITCLPTIYKLLTSILRKKISLHIQENSIMCISQNGCRNEARGTKEQLLIDTTISEQVRRNRKDLFTCWIDYKKAYDSVPHTWLLRVLELYKIDATLCTFLRTCMTKWNTVLFYSGCRLGLGNEVPIQIKRGIFQGDSLSPLWFCLALNPLSTLLECSGLGYRLKRHGQVISHLLYMDDLKLFAPTKSQLLVLLKETETFSNSIKMEFGVDKCAVMHVKRGKVVESDELQLSDSIKLRCLSPSDTYKYLGMSQALCITETDMKQQLRDRFFARLKKVLNSLLTGGNKVRAYNSWVMPVLMYSFGILKWTQTELEALDRKVRTLLTAHRMHHPRSSVMRLYIPRKSGGRGYLSAKTLHNREVYNLREYFLTVDADIHRDVVSVDVGLTPLGLCKENWRKPIIQTIDDRKEIWKSKELHGRFYRALNGPDVDTLSSVSWLRFGDLFGETEGFVFAIMDEVVMTKNYRKYILKDGTVDICRACHCPGESLRHIVSSCSRLANGEYLHRHNQVARIVHQQLALKYHLVDAEVPYYKYVPDPVLENSSVTLYWDRSIITDRTIVANKPDIVVIDRSERRAMIIDVTIPHDENLVKAEKDKQTKYLDLAHEVVDMWNVDSAIIVPIVLSVNGLIPKSLYQHLRRLSLDSWIIGLMQKAVLLDTARIVRRFLSLEP

SEQ ID NO: 30218 - protein, 962 aa, Spodoptera exigua
MCGKNRALVCALDSLLENYFESSENLYDTHSILYCGAIAACRVANVRYPNLDAAVRPKPAAPAWQCRIERRIDEARVLIGKLTCFREGNNRPRVMRFVRRAFVGTATSPHEYLTRVTERIDFLKQKIYAWANRIRRYKKRVERYTQNRMFQSDQRWVYRDWERSSQDVVNGQRPDDETTNSFWRNIWSVPVNHTEADWMCDVKRECETLPEMEEVVITSSDVANAACSVPNWKSPGPDGLHNFWLKSFTSSHDRLASQFQMALEAGSLPQFLTTGITHLLHKSGSYTEPKNYRPITCLPTVYKLFTSILRAKITKHIEKNAIMSVSQNGCRKGSRGTKELLLIDMVISQQVRRSRKDLSTCWIDYKKAYDSVPHTWLMRVLELYKINTTLRTFLQSCMRQWSTVLSYPGCKQIQRSEEPVRIVRGIFQGDSLSPLWFCLALNPLSTLLEASGLGYRLRRKGHVISHLLYMDDLKLFAPNKEELMELLKITKNFSSSIRMEFGVDKCAVMHVKRGGIVEFESLELSDFTKLRSLSANDTYKCLGMSEILGINGPHMKQSLQERFFGRLNKVLKSSLSGGNKVRAFNGWVMPVLMYSFVILKWTQTELDTLDRRVRTLLTANRMHHPRSSVMRLYIPRKCGGRGFLNEKTLHNREVCNLREHFLKEDEDMHREVVTVDKGFTPLSLAKENWCKPVVLSVNDRKAVWSSKELHGRFFRALHGPDIDFLASVAWLRFSNLLGETEGFVCAIMDEVILTNNYRKYIMKDGTVDICRACHSSGESIRHIISGCGRLANGEYLHRHNQVAKIIHQQLALKYRLVESEVPYYKYVPDPVLEKDHITLYWDRSIITDRTIVANKPDIVVVDRLARRTTIIDVAIPHNENLVKAEKDKQLKYLDLAHEVVDMWNVDSAIVVPIVVSANGLVPKSLDNHLKRLTLGGWIKGLIQKAVLLETARIVRRFLSLEP

SEQ ID NO: 30219 - protein, 1197 aa, Spodoptera frugiperda
MLTRARRCYAHPPSPDSSLSSASPSPEPNHEELPVTVVASSSSDEYFSPPTSPPPARRPRRGRPPTGLGARGQQTSGRVPATGGCARRMKWTQTINENVMRAYYGATEGGTNLTAYRERMLSMFQVLEPSVNVSAQRLSDQVRVIQRNRRLDEAALDRLRSEALRNRVVPAPPREVAQTPIASQNVIPTTPAAGVEDDRVEQVSTQCNERLRSALEDAIREYRFAPLKPKLPRLPMCGKNRALVSALDSLLKTYFESSENLYDTHSILYCGAVAACRVANVRFSNLDAAVRPKPAIPAWQCRIERRISEARVLIGKLSCFREGNTRPRVMRFVRRAFVGTETSPHEYMSRVTERIDFLKQKVYAWANRIRRYKKRVERYTQNRMFQRDQRWVYRNWERSNQDVTDGRRPDDEATNTFWRNIWSVPVSHTEDDWICDVERRCETVPEMEEVIITSSDVSSAACSVPNWKSPGPDGLHNFWLKWFTSSHSRLASQFQAALEAGSLPQFLTTGVTHLLHKSGSSTEPKNYRPITCLPTVYKLLTSILRTKITKHIEKHSIMSVSQNGCRKGSRGTKELLLIDMVVSQQVRRSRKNLSTCWIDYKKAYDSVPHTWLMRVLELYKIDATLRAFLQSCMRQWSTVLCYPGCRQIQGSEEPVRIVRGIFQGDSLSPLWFCLALNPLSTLLEASGLGYPLRRRGLVISHLLYMDDLKLFAPNNKQLMELLKITEKFSSSIRMEFGVDKCAVMHVKRGGIVESEGLELSDFTKLRALSANDTYKYLGMSEGLGINGPDMKQSLRERFFGRLNKVLKSSLSGGNKVRAYNGWVMPVLMYSFGILKWTQTELDTLDRRVRTLLTANRMHHPRSSIMRLYIPRKCGGRGLLNAKTLHNREVCNLREYFLKVNEGMHREVAAVDNGFTPLSLAKENWRKPGVLSVNDRKEVWHSKELHGRFFRALHGPSVDFLASVSWLRFSNLFGETEGFVCAIMDEVILTNNYRKYIIKDGTVDICRACHSPGESIRHIISGCGRLANGEYLHRHNQVAKIIHQQLALHYQLVEFEVPYYKYAPDPVLENGHITLYWDRSIITDRTIVANKPDIVVIDRQARRTMIIDITIPHDENLVKAEKDKQIKYLDLAHEVVDMWNVDSAIVVPIVVSANGLIPNSLDNHLRRLGLGGWIKGLMQKAVLLETTRIVRRFLSLEP

SEQ ID NO: 30220 - protein, 1196 aa, Spodoptera frugiperda
MLTRARRRRGAPPPSPDSSLSSASPSPEPNHEPVTAVASSSSDEYFSPPTSPPPVRRPRRGRPPTGLGARGQQTPGRVPAAGGCARRMKWTQTINENVMRAYYGATEGGTNLTAYRERMLSMFQVLEPSVNVSAQRLSDQVRVIQRNRRLDEAALDRLRSEALRNRVVPAPPQEVAQTPTASQNVTPTTPAAGVEDDRVEQVSTQCNERLRSALEDAIREYRFAPLKPKLPRLPMCGRNRALVSALDSLLKTYFESSENLYDTHSILYCGAVAACRVANVRFSNLDAAVRPKPAVPAWQCRIERRISEARVLIGKLSCFRDGNTRPRVMRFVRRAFVGTETSPHEYMSRVTERIDFLKQKVYAWANRIRRYKKRVERYTQNRMFQRDQRWVYRNWERSNQDVNDGRRPDDEATNTFWRNIWSVPVSHTEDDWICDVERGCETVPEMEEVIITSSDVSSAACSVPNWKSPGPDGLHNFWLKWFTSSHARLASQFQAALEAGSLPQFLTTGVTHLLHKSGSSTEPKNYRPITCLPTVYKLLTSILRTKITKHIEKHSIMSVSQNGCRKGSRGTKELLLIDMVVSQQVRRSRKNLSTCWIDYKKAYDSVPHTWLMRVLELYKIDATLRAFLQSCMRQWSTVLCYPGCRQIQGSEEPVRIVRGIFQGDSLSPLWFCLALNPLSTLLEASGLGYPLRRRGLVISHLLYMDDLKLFAPNNKQLMELLKITEKFSSSIRMEFGVDKCAVMHVKRGGIVESEGLELSDFTKLRALSANDTYKYLGMSEGLGINGPDMKQSLRERFFGRLNKVLKSSLSGGNKVRAYNGWVMPVLMYSFGILKWTQTELDTLDRRVRTLLTANRMHHPRSSIMRLYIPRKCGGRGLLNAKTLHNREVCNLRVYFLKVNEGMHREVAAMDNGFTPLSLAKENWRKPVVLSVNDRKEVWHSKEFHGRFFRALHGPSVDFLASVSWLRFSNLFGETEGFVFAIMDEVILTNNYRKYIIKDGTVDICRACHSPGESIRHIISGCGRLANGEYLHRHNQVAKIIHQQLALHYQLVEFEVPYYKYAPDPVLENGHITLYWDRSIITDRTIVANKPDIVVIDRQARRTMIIDITIPHDENLVKAEKDKQIKYLDLAHEVVDMWNVDSAIVVPIVVSANGLIPNSLDNHLRRLGLGGWIKGLMQKAVLLETARIVRRFLSLEP

SEQ ID NO: 30221 - protein, 1196 aa, Spodoptera frugiperda
MLTRARRRRGAPPPSPDSSLSSASPSPEPNHEPVTAVASSSSDEYFSPPTSPPPVRRPRRGRPPTGLGARGQQTPGRVPAAGGCARRMKWTQTINENVMRAYYGATEGGTNLTAYRERMLSMFQVLEPSVNVSAQRLSDQVRVIQRNRRLDEAALDRLRSEALRNRVVPAPPQEVVQTPTASQNVTPTTPTAGVEDDRVEQVSTQCNERLRSALEDAIREYRFAPLKPKLPRLPMCGRNRALVSALDSLLKTYFESSENLYDTHSILYCGAVAACRVANVRFSNLDAAVRPKPAIPAWQCRIERRISEARVLIGKLSCFRDGNTRPRVMRFVRRAFVGTETSPHEYMSRVTERIDFLKQKIYAWANRIRRYKKRVERYTQNRMFQRDQRWVYRNWERSNQDVTDGRRPDDEATNTFWRNIWSVPVSHTEDDWICDVERRCETVPEMEEVIITSSDVSSAACSVPNWKSPGPDGLHNFWLKWFTSSHARLASQFQAALEAGSLPQFLTTGVTHLLHKSGSSTEPKNYRPITCLPTVYKLLTSILRTKITKHIEKHSIMSVSQNGCRKGSRGTKELLLIDMVVSQQVRRSRKNLSTCWIDYKKAYDSVPHTWLMRVLELYKIDATLRAFLQSCMRQWSTVLCYPGCRQIQGSEEPVRIVRGIFQGDSLSPLWFCLALNPLSTLLEASGLGYPLRRRGLVISHLLYMDDLKLFAPNNKQLMELLKITEKFSSSIRMEFGVDKCAVMHVKRGGIVESEGLELSDFTKLRALSANDTYKYLGMSEGLGINGPDMKQSLRERFFGRLNKVLKSSLSGGNKVRAYNGWVMPVLMYSFGILKWTQTELDTLDRRVRTLLTANRMHHPRSSIMRLYIPRKCGGRGLLNAKTLHNREVCNLREYFLKVNEGMHREVAAMDNGFTPLSLAKENWRKPVVLSVNDRKEVWHSKELHGRFFRALHGPSVDFLASVSWLRFSNLFGETEGFVFAIMDEVILTNNYRKYIIKDGTVDICRACHSPGESIRHIISGCGRLANGEYLHRHNQVAKIIHQQLALHYQLVEFEVPYYKYAPDPVLENGHITLYWDRSIITDRTIVANKPDIVVIDRQARRTMIIDITIPHDENLVKAEKDKQIKYLDLAHEVVDMWNVDSAIVVPIVVSANGLIPNSLDNHLRRLGLGGWIKGLMQKAVLLETARIVRRFLSLEP

SEQ ID NO: 30222 - protein, 1200 aa, Spodoptera litura
MLTRARRRQGAPPPPPDSSLSSASPSPDPSSAGSPVTAVASSSSDDYFSPPTSPTPVRRPGRGRPPTGLGARGQQAPGRVPATGGCVRRMKWSQTINENVMRSYYGATEGGTNLTAYRERMLSIFQVLEPSINVSAQRLSDQVRVIQRNRRLDEAALDRLRLEALRNRVVPAPPQSVAQTPIVSQCVTPTTPIVGVEDDRVEQVSTQCNERLRSALEDAVREYRLAPSNLRPKLPRLPMCRKNRALVSALDSLLKKYFESSENLYDTHSILYCGAVAACRVANVRFPNLDAAVRPKPAVPAWQYRIERRISEARVLIGKLSCFREGNTRPRVMRFVRRAFVGTETSPHEYLSRVTERIDFLKQKVYAWANRIRRYKKRVERYTQNRMFQRDQRWVYRDWERSNQDVADGRRPDDDATNTFWRNIWSVPVSHTEGDWMFDVKRRCETIPEMEEVEITSSDVASAACSVPNWKSPGPDGLHNFWIKWFKSSHVRLALHFQAALETGSLPQFLTTGVTHLLHKSGSSTEPKNYRPITCLPTVYKLLTSILRTKITKHIEQNSIMSVSQNGCREGSRGTKELLLIDMVVSQQVRRSRKDLSTCWIDYKKAYDSVPHTWLLKVLELYKIHASLRAFLESCMRQWSTVLCYPGCRQIQGNEEPVRIVRGIFQGDSLSPLWFCLALNPLSTLLEDSGLGYPLRRRGLVISHLLYMDDLKLFAPNKKQLMELLNITEKFSSSIRMEFGVDKCAVMHVKRGGIVESEGLELSDFTKLRSLSANDTYKYLGMSEGLGINGPDMKQSLQERFFGRLNKVLKSSLSGGNKVRAFNGWVMPVLMYSFGILKWTQTELDTLDRRVRTLLTANRMHHPRSSVMRLYIPRKCGGRGLLNAKTLHNREVCSLREYFLKVNEGMHREVAAVDNGFTPLSLAKENWRKPVVLSVNDRKAVWHSKELHGRFFRALHGPSVDFLASVSWLRFSNLFGETEGFVCAIMDEVILTNNYRKYIIKDGTVDICRACHSPGESIRHIISGCGRLANSEYLHRHNQVAKIIHQQLALHYRLVESEVPYYKYVPDPVLENDHITLYWDRSIITDRTIIANKPDIVVIDRQVRRTMIIDITIPHDENLVKAEKDKQIKYLDLAHEVVDMWNVDSAIIVPIVVSANGLIPNSLDNHLRRLALGSWVKGLIQKAVLLETARIVRRFLSLEP

SEQ ID NO: 30223 - protein, 1000 aa, Vanessa cardui
MAITTSKYSDQLRSALEDAIREYRDIPAELRPRLPRLPMTKRNRDLVCTLDSLLADYFESSENLEDTHSILFCAAVAACRVAGVTFEDTERATRPKTVAPAWQSRIEKRINETRVLIGKLCCFKEGNTRPRVMRFVGRAFLGTGISPQEYPSHVVERIDFLKQKVYAWASRIRRYRRRVDRYYLNRMFHSDQRWVYRTWERLDEGVSDGCRPDDDATNTFWRNIWSVPVDHIEGDWMREVRQACEPLEAMGEISIASEDVAAAVRSVPNWKSPGPDGLHSFWLKWLRSSHECLASQFQSALESGSLPQFLTTGVTHLLHKSGSATDPKNYRPITCLPTVYKLLTSILRDKINSHIENNTILSVSQNGCRGGSRGTKELLLIDMTISQQVRRSRKSLSTCWIDYKKAYDSVPHTWLLRVLELYKLDTTLFSFLRSCMGQWRTVLRYPGCRTIHSNDEPIRIKRGIFQGDSLSPLWFCLALNPLSTLLESSRLGYRLRRGGKVISHLLYMDDLKLFAPSDSQLVELLKVTETFSHSIRMEFGVDKCAVMHVKRGEIVESDGLQLSDSINFKSLSANESYKYLGMSEALGINVTDMKQSLQERFFGRLKKVLKSLLSGGNKVRAFNGWVMPVLMYSFGILKWTQKELDALDRRVRVLLTTYRMHHPRSSVMRLYIPRRCGGRGFLNAKTLHNREVYKLREYFLHTDLDMHRDVVTIDKGLTPLSLGKENWRKPVVLSTENRKEVWKSKELHGRFYRALHGPDVDFMASVSWLRFGNLFGETEGFVCAIMDEVIMTNNYRKYIVRDGTVDICRACHTPGESLRHIISGCSRLANGEYLHRHNQVAKIIHQQLALRYGLVVSEVPYYRYVPDPVLENGHITLYWDRSIITDRTVVANKPDIVVIDRSERRTIIVDITIPHDENLVKAEKDKQIKYLDLAHEVVDMWDVDTAVIVPIVVSANGLMAKSLDQHLKRLSLGSWVKGLMQKAVLLGTARIVWKFLSLEP

SEQ ID NO: 30224 - protein, 1102 aa, Vanessa cardui
MKMRAYYGATEGGTNLTAYRVRMLSMFQALEPAINVSAQRLSDQVRVILRNNRLSDTVLDRIRSEQCNGGVTSAPSQPVVQGPLPAIPQGPCHDHDDEGEGDMAITTSKYSDQLRSALEDAIREYRDIPAELRPRLPRLPMTKRNRDLVCTLDSLLADYFESSENLEDTHSILFCAAVAACRVAGVTFEDTERATRPKTVAPAWQSRIEKRINETRVLIGKLCCFKEGNTRPRVMRFVGRAFLGTGISPQEYPSHIVERIDFLKQKVYAWASRIRRYRRRVDRYYLNRMFQSDQRWVYRTWERLDQGVSDGCRPDDDATNTFWRNIWSVPVDHIEGDWMREVRQACEPLEAMGEISIASEDVAAAVRSVPNWKSPGPDGLHSFWLKWLRSSHECLASQFQSALESGSLPQFLTTGVTHLLHKSGSATDPKNYRPITCLPTVYKLLTSILRDKINSHIENNTILSVSQNGCRGGSRGTKELLLIDMTISQQVRRSRKSLSTCWIDYKKAYDSVPHTWLLRVLELYKLDTTLCIFLRSCMGQWRTVLRYPGCRTIHSNDEPIRIERGIFQGDSLSPLWFCLALNPLSTLLESSRLGYRLRRGGKVISHLLYMDDLKLFAPSDSQLVELLKVTETFSNSIRMEFGVDKCAVMHVKRGEIVESDGLQLSDSINFKSLSANESYKYLGMSEALGINVTDMKQSLQERFFGRLKKVLKSLLSGGNKVRAFNGWVMPVLMYSFGILKWTQKELDALDRRVRVLLTTYRMHHPRSSVMRLYIPRRCGGRGFLNAKTLHNREVYKLREYFLHTDLDMHRDVVTIDKGLTPLSLGKENWRKPVVLSTENRKEVWKSKELHGRFYRALHGPDVDFMASVSWLRFGNLFGETEGFVCAIMNEVIMTNNYRKYIVRDGTVDICRACHTPGESLRHIISGCSRLANGEYLHRHNQVAKIIHQQLALRYGLVVSEVPYYRYVPDPVLENGHITLYWDRSIITDRTVVANKPDIVVIDRSERRTIIVDITIPHDENLVKAEKDKQIKYLDLAHEVVDMWDVDTAVIVPIVVSANGLMAKSLDQHLKRLSLGSWVKGLMQKAVLLGTARIVRKFLSLEP

SEQ ID NO: 30225 - protein, 919 aa, Schrankia costaestrigalis
MVLDKNIRKKFFRLRPTVPAWQCRIERRIAEARALIGKLICFRSGNTRPRVMRFVTRAFSETNVDRRDYMLHVTERIDFLKQKVYAWANRIKRFKKRMERYTQNRAFQKDERWVYRNWERPVVGSVDMQLPDADATNDFWRSIWSVPVNHTEGGWIGDVEKACERIHQMEPVIITTEDVTCAVRRLPNWKSAGPDGLHNFWLKWLHSSHACLASHFQSSLETGTLPDFITTGVTHLLYKSGSSTDPKNYRPITCLPTIYKLLTSILRKKISLHIQKNSIMCISQNGCRNEARGTKEQLLIDTTISEQVRRNRKDLSTCWIDYKKAYDSVPHTWLLRVLELYKIDATLCTFLRTCMTKWNTVLFYSGCRQGLGNEVPIQIKRGIFQGDSLSPLWFCLALNPLSTLLECSGLGYRLKRHGQVISHLLYMDDLKLFAPTKSQLLVLLKETETFSNSIKMEFGVDKCAVMHVKRGKVVESDELQLSDSIKLRCLSPSDTYKYLGMSQALCITETDMKQQLRDRFFARLKKVLNSLLTGGNKVRAYNSWVMPVLMYSFGILKWTQTELEALDRKVRTLLTAHRMHHPRSSVMRLYIPRKSGGRGFLSARTLHNREVYNLREYFLTVDADIHKDVVSVDVGLTPLCMAKENWRKPIIQTIDDRKEIWKSKELHGRFYRALNGPDVDTLSSVSWLRFGDLFGETEGFVFAIMDEVVMTKNYRKYILKDGTVDICRACHCPGESLRHIVSGCSRLANGEYLHRHNQVARIVHQQLALKYHLVDAEVPYYKYVPDPVLENSSVTLYWDRSIITDRTIVANKPDIVVIDRSERRAMIIDVTVPHDENLVKAEKDKQTKYLDLAHEVVDMWNVDSAIIVPIVLSVNGLIPKSLYQHLRRLDLGSWIIGLMQKAVLLDTARIVRRFLSLEP

SEQ ID NO: 30226 - protein, 1152 aa, Trichoplusia ni
MWFRTSPPTSPTPVRRPGRRRPPSSLAPSGQPASNRAPAPGGVVQRMKWTRPMNENVMRAYYGATGGGTNLTAYRTRMLSLFRALEPDVDVSAQRLSDQVRVIQRNHRLDDATLDRLRSEVQTSPVVVTPSIAEAPAASALPANPADGGDDDGAITVSTQCSDHIRSTLEQAVLEYRSTPRDQRPRLPRLPMHNRNKALMGVLDSLLSSYFGNSEDLGDTHSLLYCAAVAACRVAGVTFRDNTAARPKQAAPAWQCRIEKRVAEARTLIAKLVAFRGGNTRPRVMRFVKRAFAGTNISPSEYTARVTERIDFFKQKVCAWANRIRRYKTRVDRFHQNRMFQRDQRWVYRSWEQPASEEGAGRLPDDVATNLFWRSIWSAPVTHSEGDWIRDVEQSCERIEEMGAIDISPQDVANAVRPLANWKAPGPDGLHNFWLKWLPSSHGCLASQFQSAVDSGVLPQFFTTGSTHLLHKTGSTTDPKNYRPITCLPTIYKLLTSILREKINDHIERFSIMSASQNGCRNGSRGTKELLLIDMTICQQVRRSKKGVSTCWIDYKKAYDSVPHAWLMRVLELYKINTTLRTFLKSCMGQWTTVLHYPGCRDIQKSGQLIRIERGIFQGDSLSPLWFCLALNPLSTLLENSRLGYSLRRGSQVISHLLYMDDLKLFASNKLQLMKLLKITESFSNSIRMEFGVDKCAVMHVKRGGIVESQGIQLSDSINLRSLSSTETYKYLGMSEALGINVADMKQSLQTRFFGRLNKVLKSSLSGGNKVRAFNGWVMPVIMYSFGILKWTQTELDALDRRVRTLLTANRMHHPRSSVMRLYIPRKCGGRGFLNAKTLHNREVCNLREYFLRVDVGMHRDVVAVDKGFTPLSLGKENWHKPIVLSVKDRKDVWQSKELHGRYYRTLHGADVDFLASVAWLRFGDLFGETEGFVCAIMDEVIMTNNYRKYIIKDGTVDICRACHCPGESLRHIVSGCSRLANGEYLHRHNQVARIIHQQLALKYKLVESEVPYYKYVPDPVLESGHITLYWDRSIITDRTIVANKPDIVVIDRSERRTMIVDITIPHDENLVKAEKEKQLKYLDLAHEVVDLWEVDSAIIVPIVVSANGLIAKSLDQHLRRLSLGVWVKGLIQKAVLLDTARIVRRFLSLEP

SEQ ID NO: 30227 - protein, 868 aa, Spodoptera exigua
MRFVRRAFVGTETSPHEYLTRVTERIDFLKQKICAWANRIRRYKKRVERYTQNRMFQSDQRWVYRDWERSSQDVVNGQRPDDETTNSFWRNIWSVPVNHTEADWMCDVKRECETLPEMEEVVITSSDVANAACSVPNWKSPGPDGLHNFWLKSFTSSHDRLASQFQMALEAGSLPQSLTTGITHLLHKSGSYTEPKNYRPITCLPTVYKLFTSILRAKITKHIEKNAIMSVSQNGCRKGSRGTKELLLIDMVISQQVRRSRKDLSTCWIDYKKAYDSVPHTWLMRVLELYKINTTLRTFLQSCMRQWSTVLSYPGCKQIQRSEEPVRIVRGIFQGDSLSPLWFCLALNPLSTLLEASGLGYRLRRKGHVISHLLYMDDLKLFAPNKEELMELLKITKNFSSSIRMEFGVDKCAVMHVKRGGIVESESLELSDFTKLRSLSANDTYKYLGMSEGLGINGPHMKQSLQERFFGRLNKVLKSSLSGGNKVRAFNGWVMPVLMYSFGILKWTQTELDTLDRRVRTLLTANRMHHPRSSVMRLYIPRKCGGRGFLNAKTLHNREVCNLREHFLKVDEDMHREVVTVDKGFTPLSLAKENWCKPVVLSVNDRKAVWSSKELHGRFFRALHGPDIDFLASVAWLRFSNLFGETEGFVCAIMDEVILTNNYRKYIMKDGTVDICRACHSSGESIRHIISGCGRLANGEYLHRHNQVAKIIHQQLALKYRLVESEVPYYKYVPDPVLEKDHITLYWDRSIITDRTIVANKPDIVVVDRLARRTTIIDVAIPHDENLVKAEKDKQLKYLDLAHEVVDMWNVDSAIVVPIVVSANGLVPKSLDNHLKRLTLGGWIKGLIQKAVLLETARIVRRFLSLEP

SEQ ID NO: 30228 - protein, 962 aa, Spodoptera litura
MCRKNRALVSALDSLLKKYFESSENLYDTHSILYCGAVAACRVANVRFPNLDAAVRPKPAVPAWQYRIERRISEARVLIGKLSCFREGNTRPRVMRFVRRAFVGTETSPHEYLSRVTERIDFLKQKVYAWANRIRRYKKRVERYTQNRMFQRDQRWVYRDWERSNQDVVDGRRPDDDATSTFWRNIWSVPVSHTEGDWMFDVKRRCETIPEMEEVEITSSDVASAACSVPNWKSPGPDGLHNFWIKWFKSSHVRLALHFQAALETGSLPQFLTTGVTHLLHKSGSSTEPKNYRPITCLPTVYKLLTSILRTKITKHIKKNSIMSVSQNGCREGSRGTKELLLIDMVVSQQVRRSRKDLSTCWIDYKKAYDSVPHTWLLKVLELYKIHASLRAFLESCMRQWSTVLCYPGCRQIQGNEEPVRIVRGIFQGDSLSPLWFCLALNPLSTLLEDSGLGYPLRRRGLVISHLLYMDDLKLFAPNKKQLMELLNITEKFSSSIRMEFGVDKCAVMHVKRGGIVESEGLELSDFTKLRSLSANDTYKYLGMSEGLGINGPDMKQSLQERFFGRLNRVLKSSLSGGNKVRAFNGWVMPVLMYSFGILKWTQTELDTLDRRVRTLLTANRMHHPRSSVMRLYIPRKCGGRGLLNAKTLHNREVCSLREYFLKVNEGMHREVAAVDNGFTPLSLAKENWRKPVVLSVNDRKEVWHSKELHGRFFRALHGPSVDFLASVSWLRFSNLFGETEGFVCAIMDEVILTNNYRKYIIKDGTVDICRACHSPGESIRHIISGCGRLANSEYLHRHNQVAKIIHQQLALHYRLVESEVPYYKYVPDPVLENDHITLYWDRSIITDRTIIANKPDIVVIDRQVRRTMIIDITIPHDENLVKAEKDKQIKYLDLAHEVVDMWNVDSAIIVPIVVSANGLIPNSLDNHLRRLALGSWVKGLIQKAVLLETARIVRRFLSLEP

SEQ ID NO: 30229 - protein, 1109 aa, Vanessa tameamea
MRWTQSINENVMRAYYGATEGGTNLTAYRVRMLSLFQALEPAINVSAQRLSDQVRIILRNNRLSDTVLDRIRSEMCDSGFTSAPSQPVVEGPLPATPQGPDHDDEGEGDMAITTSKYSDQLRSALADAIREYRNTPAELRPRLPRLPMTKRNRDLVCTLDSLLADYFESSENLEDTHSILFCAAVAACRVAGVTFEDTERAIRPKAAAPAWQSRIEKRINETRVLIGKLYCFKEGNTRPRVMRFVGRAFLGTGISSQEYPSHVMERIDFLKQKVYAWASRIRRYRRRVDRYYLNRIFQSDQRWVYRTWERLDQGVSDGYRPDDDTTNTFWRNIWSVPVDHIEGDWMREVRQACEPLEAMGEISIASEDVAAAVWSVPNWKSPGPDGLHSFWLKWLRSSHDCLASQFQSALESGSLPQFLTTGVTHLLHKSGSATDPKNYRPITCLPTVYKLLTSILRHKINSHIQNNNILSVSQNGCRGGSRGTKELLLIDMTISQQVRRFRKSLSTCWIDYKKAYDSVPHTWLLRVLELYKLDTTLCSFLRSCMGQWRTVLRYPGCRTIHGNDEPIRIERGIFQGDSLSPLWFCLALNPLSTLLEGSRLGYCLRRGGKVISHLLYMDDLKLFAPSGSQLMELLKVTETFSNSIRMEFGVDKCAVMHVERGEIMESDGLQLSDSINFRSLSANESYKYLGVSEALGINVTDMKQSLQERFFGRLKKVLKSLLSGGNKVRAFNGWVMPVLMYSFGILKWTQKELDALDRRVRVLLTAYRMHHPRSSVMRLYIPRRCGGRGFLNAKTLHNSEVYKLREYFLHTDLDMHRDVVTMDKGLTPLSLGKENWRKPVVLSTENRKEVWKSKELHGRFYRALHGPDVDFIASVAWLRFGNLFGETEGFVCAIMDEVIMTNNYRKYIVRDGTVDICRACHTPGESIRHIISGCSRLANGEYLHRHNQVAKIIHQQLALRYGLVVSEVPYYRYVPDPVLENSCITLYWDRSIITDRTVVANKPDIVVIDRSERRTIIIDVTIPHDENLVKAEKDKQIKYLDLAHEVVDMWDVDTAVIVPIVVSANGLMAKSLDQHLKRLSLGSWVKGLMQKAVLLGTARIVRKFLSLGP

SEQ ID NO: 30230 - protein, 974 aa, Eilema depressum
MNHQIRPRLPRLPVHKRNIALVCALDSLLPIYLDNSEDLGDTHSILYCAAIAACRVAGVKFPESNTTTRPSSGKPRWQCRIERRITEARALIGKLICFRSGNTRPRVMRFVNRAFSGTGISPRDYAARVIERIDFLKQKVYAWANRIKRYKKRCDRYTLNRTFQRDERWVYRSWERPDLVGDVHLPDIDATNTFWRNIWSVPVAHTEGDWMREIKRSCEAIETMEPVIITEDDIACVVRSLPNWKAAGPDGLHNFWLKWLRSSHVRLASQFQSALESGSLPNFMTTGVTHLLFKSGSAADPRNYRPITCLPTVYKLLTSVLRVKITNHITGNSILSYSQNGCRSGARGTKEHLIIDAAINQQVRRNRKDMATCWIDYKKAYDSVPHTWLLRVLELYKVDTTLCTFLKACMGQWRTALRYPGCRHIRDDGELIKIERGIFQGDSLSPLWFCLALNPLSTILEDSGLGYCLRRGGQVISHLLYMDDLKLYAPNSLRLMELLKVTETFSNSIRMEFGVDKCAVMHVKRGGIVESDGIELSDSTKLRSLSASDTYKYLGMSQALGVNETGMKQSLRERFFCRLKKVLNSLLSGGNKVRAYNDWVIPVLTYSFGILRWTQTELEALDRRVRTLLTAYRMHHPRSSVMRLYIPRKCGGRGFLNVKNLHNREICNLREYFLMVDVDVHRDVVAVDNGLTPLALAKENWRKPTILSIDDRKEVWRSKELHGRFYRALHGPDIDLKASVSWLRFGDLFGETEGFVCAITDEVVMTNNYRRYILKDGTVDICRACHRPGESLRHIISGCSRLANGEYLHRHNLVARIIHQQLALKYRLVDSEVPYYRYVPDPVLDDGRVTLYWDRSVITDRTIVANKPDIVVIDRLERRAIIVDITIPHDDNLVKAEKDKQIKYLDLAREVVDMWSVDSAIIVPIVVSAHGLIAKSLDQHLKRLALDSWVKGLMQKAVLLDTARIVRRFLSLEP

SEQ ID NO: 30231 - protein, 1197 aa, Vanessa cardui
MLTRARQQAHNNPSPDPPLSSASQAQDPAQGSSLVSAVASSSSDEYFSPPTSPTPVRREGRRRPPTGLGARGQPVSNRVPASGGGVQRMRWTQPINENVMRAYYGATKGGTNLTAYRVRMLSLFQALEPAVNVSAQRLSDQVRVILRNNRLSDTVLDRIRSETCNSDVTSGPSTPVVEEPLPAIPQGPEHDDEGGGDMAITKSKYSDHLRSALGDAIREYRNTPAELRPRLPRLPMTKRNRDLVCTLDSLLADYFESSENLEDTHSILFCAAVAACRVAGVTFEDTERATRPKAVAPAWQSRIEKRINETRVLIGKLYCFKEGNTRPRVMRFVGRAFLGTGISPQEYPSHVVERIDFLKQKVYAWASRIRRYRRRVDRYHLNRKFQSDQRWVYRTWERLDQDVSDGCRPDDDATNTFWRNIWSVPVDHIEGDWMLEVRQACEPLEVMGKISIASEDVAAAVRSVANWKSPGPDGLHNFWLKWLRSSHECLASQFQSALESGSLPQFLTTGVTHLLHKSGSATDPKNYRPITCLPTVYKLLTAFLRDKINSHIQNNSILSVSQNGCRGGSRGTKELLLIDMTISQQVRRSRKSLSTCWIDYKKAYDSVPHTWLLRVLELYKLDTTLCSFLRSCMGQWRTVLRYPGCRTIHGNDEPIRIERGIFQGDSLSPLWFCLALNPLSTLLESSRLGYRLRRGGKVISHLLYMDDLKLFAPSDSQLMELLKVTETFSNSIRMEFGVDKCAVMHVKRGEIMESDGLQLSDSINFKSLSANESYKYLGMSEALGINVTDMKQSLQERFFGRLKKVLKSLLSGGNKVRAFNGWVMPVLMYSFGILKWTQKELDALDRKVRVLLTAYRMHHPRSSVMRLYIPRRCGGRGFLNAKTLHNREVYKLREYFLHTDLDMHRDVVTMDKGLTPLSLGKENWHKPVVLSTENRKEVWKSKELHGRFYRALHGPDVDFMASVSWLRFGNLFGETEGFVCAIMDEVIMTNNYRRYIVRDGTVDICRACHTPGESLRHIISGCSRLANGEYLHRHNQVAKIIHQQLALRYGLVVSEVPYYKYVPDPVLENGHITRYWDRSIITDRTVVANKPDIVVIDRSERRTIIVDITIPHDENLVKAEKDKQIKYLDLAHEVVDMWDVDTAVIVPIVVSANGLMAKSLDQHLKRLSLDGWVKGLMQKAVLLGTARIVRKFLSLEP

SEQ ID NO: 30232 - protein, 1196 aa, Lymantria monacha
MLTRSQTKAARPPPPGSSQSSASQPTASVPAASVTTEASSSSSSDEYFSPPTTPTPAPRRGRGRPPICLRPRGPPTSHRAPAAGGNVQRMKWTHSINENVMRAYFEATEGGIKLTAYRDRMLLLFQNLEPTINVTAQRLSDQVRAIQRCHLLDVATLDRLRLVSIQTCRVTPISTEISTIDTTQSVPPPYAEGEDATVSMDTQYNEEVRNALECAICEYRFIPHNIRPRLPRLPMHRKNRRLVGTLDSLLTSYLHTSDSISDTHSILYCVAVAACCIAGLKFLENESTIQQKKAKPAWQCRIKCRICEARVLIGKLICFRAGNTRPKVMRYVRRAFFGTDIKPDEYNARVTERIDFLKQKVYAWASRIRRYKKRMNRYSVNRMFESDQKSVYRNWERPCLIVDNERLPDAEVTNTFWRSIWSVPVVHSEGDWMGDVKRACENIPQMENVLIDKDDVTCAVRSLSNWKSPGPDGLHNFWLKWLHSAHARLASHFQSALVSGTLPEFMTTGITHLLHKTGSTTEPCNYRPITCLPSVYKLLTSILSNKIAKHVQLNSVMSISQNGCRNGGRGTKELLLIDTAISQQVRRNRKDLSVCWIDYRKAFDSVPHTWLLRVLELYKINSLLCTFLKSCMGQWKTFLKYPMHRLNLGSSEPIYIRRGIFQGDSLSPLWFCLALNPLSILLEHSGLGCRLRRGGQIISHLLYMDDLKLFAPNNPQLVKLLKVTETFSSSIKMEFGVDKCAVMHVKHGGIVEVDRGQLFNTLQFRPLQVTDTYKYLGMSQALNINESDMKQTLRERFFGRLKKVLNSLLSGGNKVRAYNAWVMPILMYSFGILKWTQTELDALDRKVRTLLTSHRMHHPRSSVMRLYIPRKCGGRGFLNAKTLHNREIYNLRDYFLKMTSGMLLDVVAVDNGLTPLGLAKENWHKPAVLSTKDRESIWQSKELHGRFYGALNASEVDFSASVTWLQFGNLFGETEGFVCAIADEVIKTNNYRKYILRDGTADICRACHLPGESLRHIVSGCSRLANGEYLHRHNQVARIIHQQLALLYRLVSTEVPYYRYIPQPVLENGRATLYWDRSIITDRTIVANKPDIVVIDRLQRRAMIVDVTVPHDGNLVKAEKDKQIKYQDLAHEIVDMWDVDTAIVVPIVISTNGLIAKSLAQHLKRLALGSWIGGLMQKAVLLDTARIVRKFLSLEP
